(19) United States
(12) Patent Application Publication
(10) Pub. No.: US 2006/0246483 A1
(43) Pub. Date: Nov. 2, 2006

(54) 337 human secreted proteins

(76) Inventors: Craig A. Rosen, Laytonsville, MD (US); Steven M. Ruben, Brookeville, MD (US)

Correspondence Address: HUMAN GENOME SCIENCES INC., 14200 SHADY GROVE ROAD, ROCKVILLE, MD, 20850, US

(21) Appl. No.: 11/366,486

(22) Filed: Mar. 3, 2006

Related U.S. Application Data
(63) Continuation-in-part of application No. 10/664,358, filed on Sep. 20, 2003, now abandoned.
Application No. 10/664,358 is a continuation-in-part of application No. PCT/US02/09785, filed on Mar. 19, 2002.
Application No. PCT/US02/09785 is a continuation-in-part of application No. 10/100,683, filed on Mar. 19, 2002.
Application No. PCT/US02/09785 is a continuation-in-part of application No. 09/981,876, filed on Oct. 19, 2001, now Pat. No. 7,053,190.
Application No. 09/981,876 is a division of application No. 09/621,011, filed on Jul. 20, 2000, now Pat. No. 6,878,687.
Application No. 09/621,011 is a continuation of application No. 09/148,545, filed on Sep. 4, 1998, now Pat. No. 6,590,075.
Application No. 09/148,545 is a continuation-in-part of application No. PCT/US98/04482, filed on Mar. 6, 1998.
Application No. 10/100,683 is a continuation-in-part of application No. 09/621,011, filed on Jul. 20, 2000, now Pat. No. 6,878,687.
Application No. 09/621,011 is a continuation of application No. 09/148,545, filed on Sep. 4, 1998, now Pat. No. 6,590,075.
Application No. 09/148,545 is a continuation-in-part of application No. PCT/US98/04482, filed on Mar. 6, 1998.
Application No. 10/100,683 is a continuation-in-part of application No. 09/148,545, filed on Sep. 4, 1998, now Pat. No. 6,590,075.
Application No. 09/148,545 is a continuation-in-part of application No. PCT/US98/04482, filed on Mar. 6, 1998.
Application No. 10/100,683 is a continuation-in-part of application No. PCT/US98/04482, filed on Mar. 6, 1998.
Application No. 10/100,683 is a continuation-in-part of application No. 09/882,171, filed on Jun. 18, 2001, now abandoned.
Application No. 09/882,171 is a continuation of application No. 09/809,391, filed on Mar. 16, 2001, now abandoned.
Application No. 09/809,391 is a continuation-in-part of application No. 09/149,476, filed on Sep. 8, 1998, now Pat. No. 6,420,526.
Application No. 09/149,476 is a continuation-in-part of application No. PCT/US98/04493, filed on Mar. 6, 1998.
Application No. 10/100,683 is a continuation-in-part of application No. 09/809,391, filed on Mar. 16, 2001, now abandoned.
Application No. 10/100,683 is a continuation-in-part of application No. 09/149,476, filed on Sep. 8, 1998, now Pat. No. 6,420,526.
Application No. 09/149,476 is a continuation-in-part of application No. PCT/US98/04493, filed on Mar. 6, 1998.
Application No. 10/100,683 is a continuation-in-part of application No. 09/149,476, filed on Sep. 8, 1998, now Pat. No. 6,420,526.
Application No. 09/149,476 is a continuation-in-part of application No. PCT/US98/04493, filed on Mar. 6, 1998.
Application No. 10/100,683 is a continuation-in-part of application No. PCT/US98/04493, filed on Mar. 6, 1998.
Application No. 10/100,683 is a continuation-in-part of application No. 10/058,993, filed on Jan. 30, 2002, now Pat. No. 6,951,924.
Application No. 10/100,683 is a continuation-in-part of application No. 09/852,659, filed on May 11, 2001, now abandoned.
Application No. 09/852,659 is a continuation-in-part of application No. 09/152,060, filed on Sep. 11, 1998, now Pat. No. 6,448,230.
Application No. 09/152,060 is a continuation-in-part of application No. PCT/US98/04858, filed on Mar. 12, 1998.
Application No. 10/058,993 is a continuation-in-part of application No. 09/853,161, filed on May 11, 2001, now Pat. No. 6,919,433.
Application No. 09/853,161 is a continuation-in-part of application No. 09/152,060, filed on Sep. 11, 1998, now Pat. No. 6,448,230.
Application No. 09/152,060 is a continuation-in-part of application No. PCT/US98/04858, filed on Mar. 12, 1998.
Application No. 10/058,993 is a continuation-in-part of application No. 09/852,797, filed on May 11, 2001, now Pat. No. 6,878,806.
Application No. 09/852,797 is a continuation-in-part of application No. 09/152,060, filed on Sep. 11, 1998, now Pat. No. 6,448,230.
Application No. 09/152,060 is a continuation-in-part of application No. PCT/US98/04858, filed on Mar. 12, 1998.
Application No. 10/100,683 is a continuation-in-part of application No. 09/852,659, filed on May 11, 2001, now abandoned.
Application No. 10/100,683 is a continuation-in-part of application No. 09/152,060, filed on Sep. 11, 1998, now Pat. No. 6,448,230.
Application No. 09/152,060 is a continuation-in-part of application No. PCT/US98/04858, filed on Mar. 12, 1998.
Application No. 10/100,683 is a continuation-in-part of application No. 09/853,161, filed on May 11, 2001, now Pat. No. 6,919,433.
Application No. 10/100,683 is a continuation-in-part of application No. 09/152,060, filed on Sep. 11, 1998, now Pat. No. 6,448,230.
Application No. 09/152,060 is a continuation-in-part of application No. PCT/US98/04858, filed on Mar. 12, 1998.
Application No. 10/100,683 is a continuation-in-part of application No. 09/852,797, filed on May 11, 2001, now Pat. No. 6,878,806.
Application No. 10/100,683 is a continuation-in-part of application No. 09/152,060, filed on Sep. 11, 1998, now Pat. No. 6,448,230.
Application No. 09/152,060 is a continuation-in-part of application No. PCT/US98/04858, filed on Mar. 12, 1998.
Application No. 10/100,683 is a continuation-in-part of application No. 09/152,060, filed on Sep. 11, 1998, now Pat. No. 6,448,230.
Application No. 09/152,060 is a continuation-in-part of application No. PCT/US98/04858, filed on Mar. 12, 1998.
Application No. 10/100,683 is a continuation-in-part of application No. PCT/US98/04858, filed on Mar. 12, 1998.
Application No. 10/100,683 is a continuation-in-part of application No. 10/059,395, filed on Jan. 31, 2002, now abandoned.
Application No. 10/059,395 is a division of application No. 09/966,262, filed on Oct. 1, 2001, now abandoned.
Application No. 09/966,262 is a continuation of application No. 09/154,707, filed on Sep. 17, 1998, now abandoned.
Application No. 09/154,707 is a continuation-in-part of application No. PCT/US98/05311, filed on Mar. 19, 1998, now abandoned.
Application No. 10/100,683 is a continuation-in-part of application No. 09/984,245, filed on Oct. 29, 2001, now abandoned.
Application No. 09/984,245 is a division of application No. 09/154,707, filed on Sep. 17, 1998, now abandoned.
Application No. 09/154,707 is a continuation-in-part of application No. PCT/US98/05311, filed on Mar. 19, 1998, now abandoned.
Application No. 10/100,683 is a continuation-in-part of application No. 09/983,966, filed on Oct. 26, 2001, now abandoned.
Application No. 09/983,966 is a division of application No. 09/154,707, filed on Sep. 17, 1998, now abandoned.
Application No. 09/154,707 is a continuation-in-part of application No. PCT/US98/05311, filed on Mar. 19, 1998, now abandoned.
Application No. 10/100,683 is a continuation-in-part of application No. 09/966,262, filed on Oct. 1, 2001, now abandoned.
Application No. 09/966,262 is a continuation of application No. 09/154,707, filed on Sep. 17, 1998, now abandoned.
Application No. 09/154,707 is a continuation-in-part of application No. PCT/US98/05311, filed on Mar. 19, 1998, now abandoned.
Application No. 10/100,683 is a continuation-in-part of application No. 09/154,707, filed on Sep. 17, 1998, now abandoned.
Application No. 09/154,707 is a continuation-in-part of application No. PCT/US98/05311, filed on Mar. 19, 1998, now abandoned.
Application No. 10/100,683 is a continuation-in-part of application No. PCT/US98/05311, filed on Mar. 19, 1998, now abandoned.
Application No. 10/100,683 is a continuation-in-part of application No. 09/814,122, filed on Mar. 22, 2001, now abandoned.
Application No. 09/814,122 is a continuation of application No. 09/577,145, filed on May 24, 2000, now abandoned.
Application No. 09/577,145 is a continuation of application No. 09/166,780, filed on Oct. 6, 1998, now abandoned.
Application No. 09/166,780 is a continuation-in-part of application No. PCT/US98/06801, filed on Apr. 7, 1998.
Application No. 10/100,683 is a continuation-in-part of application No. PCT/US98/06801, filed on Apr. 7, 1998.
Application No. 10/100,683 is a continuation-in-part of application No. PCT/US98/06801, filed on Apr. 7, 1998.
Application No. 10/100,683 is a continuation-in-part of application No. PCT/US98/10868, filed on May 28, 1998.
Application No. 10/100,683 is a continuation-in-part of application No. PCT/US98/11422, filed on Jun. 4, 1998.
(60) Provisional application No. 60/277,340, filed on Mar. 21, 2001.
(60) Provisional application No. 60/306,171, filed on Jul. 19, 2001.
(60) Provisional application No. 60/331,287, filed on Nov. 13, 2001.
(60) Provisional application No. 60/040,162, filed on Mar. 7, 1997.
(60) Provisional application No. 60/040,333, filed on Mar. 7, 1997.
(60) Provisional application No. 60/038,621, filed on Mar. 7, 1997.
(60) Provisional application No. 60/040,161, filed on Mar. 7, 1997.
(60) Provisional application No. 60/040,626, filed on Mar. 7, 1997.
(60) Provisional application No. 60/040,334, filed on Mar. 7, 1997.
(60) Provisional application No. 60/040,336, filed on Mar. 7, 1997.
(60) Provisional application No. 60/040,163, filed on Mar. 7, 1997.
(60) Provisional application No. 60/047,615, filed on May 23, 1997.
(60) Provisional application No. 60/047,600, filed on May 23, 1997.
(60) Provisional application No. 60/047,597, filed on May 23, 1997.
(60) Provisional application No. 60/047,502, filed on May 23, 1997.
(60) Provisional application No. 60/047,633, filed on May 23, 1997.
(60) Provisional application No. 60/047,583, filed on May 23, 1997.
(60) Provisional application No. 60/047,617, filed on May 23, 1997.
(60) Provisional application No. 60/047,618, filed on May 23, 1997.
(60) Provisional application No. 60/047,503, filed on May 23, 1997.
(60) Provisional application No. 60/047,592, filed on May 23, 1997.
(60) Provisional application No. 60/047,581, filed on May 23, 1997.
(60) Provisional application No. 60/047,584, filed on May 23, 1997.
(60) Provisional application No. 60/047,500, filed on May 23, 1997.
(60) Provisional application No. 60/047,587, filed on May 23, 1997.
(60) Provisional application No. 60/047,492, filed on May 23, 1997.
(60) Provisional application No. 60/047,598, filed on May 23, 1997.
(60) Provisional application No. 60/047,613, filed on May 23, 1997.
(60) Provisional application No. 60/047,582, filed on May 23, 1997.
(60) Provisional application No. 60/047,596, filed on May 23, 1997.
(60) Provisional application No. 60/047,612, filed on May 23, 1997.
(60) Provisional application No. 60/047,632, filed on May 23, 1997.
(60) Provisional application No. 60/047,601, filed on May 23, 1997.
(60) Provisional application No. 60/043,580, filed on Apr. 11, 1997.
(60) Provisional application No. 60/043,568, filed on Apr. 11, 1997.
(60) Provisional application No. 60/043,314, filed on Apr. 11, 1997.
(60) Provisional application No. 60/043,569, filed on Apr. 11, 1997.
(60) Provisional application No. 60/043,311, filed on Apr. 11, 1997.
(60) Provisional application No. 60/043,671, filed on Apr. 11, 1997.
(60) Provisional application No. 60/043,674, filed on Apr. 11, 1997.
(60) Provisional application No. 60/043,669, filed on Apr. 11, 1997.
(60) Provisional application No. 60/043,312, filed on Apr. 11, 1997.
(60) Provisional application No. 60/043,313, filed on Apr. 11, 1997.
(60) Provisional application No. 60/043,672, filed on Apr. 11, 1997.
(60) Provisional application No. 60/043,315, filed on Apr. 11, 1997.
(60) Provisional application No. 60/048,974, filed on Jun. 6, 1997.
(60) Provisional application No. 60/056,886, filed on Aug. 22, 1997.
(60) Provisional application No. 60/056,877, filed on Aug. 22, 1997.
(60) Provisional application No. 60/056,889, filed on Aug. 22, 1997.
(60) Provisional application No. 60/056,893, filed on Aug. 22, 1997.
(60) Provisional application No. 60/056,630, filed on Aug. 22, 1997.
(60) Provisional application No. 60/056,878, filed on Aug. 22, 1997.
(60) Provisional application No. 60/056,662, filed on Aug. 22, 1997.
(60) Provisional application No. 60/056,872, filed on Aug. 22, 1997.
(60) Provisional application No. 60/056,882, filed on Aug. 22, 1997.
(60) Provisional application No. 60/056,637, filed on Aug. 22, 1997.
(60) Provisional application No. 60/056,903, filed on Aug. 22, 1997.
(60) Provisional application No. 60/056,888, filed on Aug. 22, 1997.
(60) Provisional application No. 60/056,879, filed on Aug. 22, 1997.
(60) Provisional application No. 60/056,880, filed on Aug. 22, 1997.
(60) Provisional application No. 60/056,894, filed on Aug. 22, 1997.
(60) Provisional application No. 60/056,911, filed on Aug. 22, 1997.
(60) Provisional application No. 60/056,636, filed on Aug. 22, 1997.
(60) Provisional application No. 60/056,874, filed on Aug. 22, 1997.
(60) Provisional application No. 60/056,910, filed on Aug. 22, 1997.
(60) Provisional application No. 60/056,864, filed on Aug. 22, 1997.
(60) Provisional application No. 60/056,631, filed on Aug. 22, 1997.
(60) Provisional application No. 60/056,845, filed on Aug. 22, 1997.
(60) Provisional application No. 60/056,892, filed on Aug. 22, 1997.
(60) Provisional application No. 60/047,595, filed on May 23, 1997.
(60) Provisional application No. 60/057,761, filed on Sep. 5, 1997.
(60) Provisional application No. 60/047,599, filed on May 23, 1997.
(60) Provisional application No. 60/047,588, filed on May 23, 1997.
(60) Provisional application No. 60/047,585, filed on May 23, 1997.
(60) Provisional application No. 60/047,586, filed on May 23, 1997.
(60) Provisional application No. 60/047,590, filed on May 23, 1997.
(60) Provisional application No. 60/047,594, filed on May 23, 1997.
(60) Provisional application No. 60/047,589, filed on May 23, 1997.
(60) Provisional application No. 60/047,593, filed on May 23, 1997.
(60) Provisional application No. 60/047,614, filed on May 23, 1997.
(60) Provisional application No. 60/043,578, filed on Apr. 11, 1997.
(60) Provisional application No. 60/043,576, filed on Apr. 11, 1997.
(60) Provisional application No. 60/047,501, filed on May 23, 1997.
(60) Provisional application No. 60/043,670, filed on Apr. 11, 1997.
(60) Provisional application No. 60/056,632, filed on Aug. 22, 1997.
(60) Provisional application No. 60/056,664, filed on Aug. 22, 1997.
(60) Provisional application No. 60/056,876, filed on Aug. 22, 1997.
(60) Provisional application No. 60/056,881, filed on Aug. 22, 1997.
(60) Provisional application No. 60/056,909, filed on Aug. 22, 1997.
(60) Provisional application No. 60/056,875, filed on Aug. 22, 1997.
(60) Provisional application No. 60/056,862, filed on Aug. 22, 1997.
(60) Provisional application No. 60/056,887, filed on Aug. 22, 1997.
(60) Provisional application No. 60/056,908, filed on Aug. 22, 1997.
(60) Provisional application No. 60/048,964, filed on Jun. 6, 1997.
(60) Provisional application No. 60/057,650, filed on Sep. 5, 1997.
(60) Provisional application No. 60/056,884, filed on Aug. 22, 1997.
(60) Provisional application No. 60/190,068, filed on Mar. 17, 2000.
(60) Provisional application No. 60/040,161, filed on Mar. 7, 1997.
(60) Provisional application No. 60/040,162, filed on Mar. 7, 1997.
(60) Provisional application No. 60/040,333, filed on Mar. 7, 1997.
(60) Provisional application No. 60/038,621, filed on Mar. 7, 1997.
(60) Provisional application No. 60/040,626, filed on Mar. 7, 1997.
(60) Provisional application No. 60/040,334, filed on Mar. 7, 1997.
(60) Provisional application No. 60/040,336, filed on Mar. 7, 1997.
(60) Provisional application No. 60/040,163, filed on Mar. 7, 1997.
(60) Provisional application No. 60/047,600, filed on May 23, 1997.
(60) Provisional application No. 60/047,615, filed on May 23, 1997.
(60) Provisional application No. 60/047,597, filed on May 23, 1997.
(60) Provisional application No. 60/047,502, filed on May 23, 1997.
(60) Provisional application No. 60/047,633, filed on May 23, 1997.
(60) Provisional application No. 60/047,583, filed on May 23, 1997.
(60) Provisional application No. 60/047,617, filed on May 23, 1997.
(60) Provisional application No. 60/047,618, filed on May 23, 1997.
(60) Provisional application No. 60/047,503, filed on May 23, 1997.
(60) Provisional application No. 60/047,592, filed on May 23, 1997.
(60) Provisional application No. 60/047,581, filed on May 23, 1997.
(60) Provisional application No. 60/047,584, filed on May 23, 1997.
(60) Provisional application No. 60/047,500, filed on May 23, 1997.
(60) Provisional application No. 60/047,587, filed on May 23, 1997.
(60) Provisional application No. 60/047,492, filed on May 23, 1997.
(60) Provisional application No. 60/047,598, filed on May 23, 1997.
(60) Provisional application No. 60/047,613, filed on May 23, 1997.
(60) Provisional application No. 60/047,582, filed on May 23, 1997.
(60) Provisional application No. 60/047,596, filed on May 23, 1997.
(60) Provisional application No. 60/047,612, filed on May 23, 1997.
(60) Provisional application No. 60/047,632, filed on May 23, 1997.
(60) Provisional application No. 60/047,601, filed on May 23, 1997.
(60) Provisional application No. 60/043,580, filed on Apr. 11, 1997.
(60) Provisional application No. 60/043,568, filed on Apr. 11, 1997.
(60) Provisional application No. 60/043,314, filed on Apr. 11, 1997.
(60) Provisional application No. 60/043,569, filed on Apr. 11, 1997.
(60) Provisional application No. 60/043,311, filed on Apr. 11, 1997.
(60) Provisional application No. 60/043,671, filed on Apr. 11, 1997.
(60) Provisional application No. 60/043,674, filed on Apr. 11, 1997.
(60) Provisional application No. 60/043,669, filed on Apr. 11, 1997.
(60) Provisional application No. 60/043,312, filed on Apr. 11, 1997.
(60) Provisional application No. 60/043,313, filed on Apr. 11, 1997.
(60) Provisional application No. 60/043,672, filed on Apr. 11, 1997.
(60) Provisional application No. 60/043,315, filed on Apr. 11, 1997.
(60) Provisional application No. 60/048,974, filed on Jun. 6, 1997.
(60) Provisional application No. 60/056,886, filed on Aug. 22, 1997.
(60) Provisional application No. 60/056,877, filed on Aug. 22, 1997.
(60) Provisional application No. 60/056,889, filed on Aug. 22, 1997.
(60) Provisional application No. 60/056,893, filed on Aug. 22, 1997.
(60) Provisional application No. 60/056,630, filed on Aug. 22, 1997.
(60) Provisional application No. 60/056,878, filed on Aug. 22, 1997.
(60) Provisional application No. 60/056,662, filed on Aug. 22, 1997.
(60) Provisional application No. 60/056,872, filed on Aug. 22, 1997.
(60) Provisional application No. 60/056,882, filed on Aug. 22, 1997.
(60) Provisional application No. 60/056,637, filed on Aug. 22, 1997.
(60) Provisional application No. 60/056,903, filed on Aug. 22, 1997.
(60) Provisional application No. 60/056,888, filed on Aug. 22, 1997.
(60) Provisional application No. 60/056,879, filed on Aug. 22, 1997.
(60) Provisional application No. 60/056,880, filed on Aug. 22, 1997.
(60) Provisional application No. 60/056,894, filed on Aug. 22, 1997.
(60) Provisional application No. 60/056,911, filed on Aug. 22, 1997.
(60) Provisional application No. 60/056,636, filed on Aug. 22, 1997.
(60) Provisional application No. 60/056,874, filed on Aug. 22, 1997.
(60) Provisional application No. 60/056,910, filed on Aug. 22, 1997.
(60) Provisional application No. 60/056,864, filed on Aug. 22, 1997.
(60) Provisional application No. 60/056,631, filed on Aug. 22, 1997.
(60) Provisional application No. 60/056,845, filed on Aug. 22, 1997.
(60) Provisional application No. 60/056,892, filed on Aug. 22, 1997.
(60) Provisional application No. 60/057,761, filed on Sep. 5, 1997.
(60) Provisional application No. 60/047,595, filed on May 23, 1997.
(60) Provisional application No. 60/047,599, filed on May 23, 1997.
(60) Provisional application No. 60/047,588, filed on May 23, 1997.
(60) Provisional application No. 60/047,585, filed on May 23, 1997.
(60) Provisional application No. 60/047,586, filed on May 23, 1997.
(60) Provisional application No. 60/047,590, filed on May 23, 1997.
(60) Provisional application No. 60/047,594, filed on May 23, 1997.
(60) Provisional application No. 60/047,589, filed on May 23, 1997.
(60) Provisional application No. 60/047,593, filed on May 23, 1997.
(60) Provisional application No. 60/047,614, filed on May 23, 1997.
(60) Provisional application No. 60/043,578, filed on Apr. 11, 1997.
(60) Provisional application No. 60/043,576, filed on Apr. 11, 1997.
(60) Provisional application No. 60/047,501, filed on May 23, 1997.
(60) Provisional application No. 60/043,670, filed on Apr. 11, 1997.
(60) Provisional application No. 60/056,632, filed on Aug. 22, 1997.
(60) Provisional application No. 60/056,664, filed on Aug. 22, 1997.
(60) Provisional application No. 60/056,876, filed on Aug. 22, 1997.
(60) Provisional application No. 60/056,881, filed on Aug. 22, 1997.
(60) Provisional application No. 60/056,909, filed on Aug. 22, 1997.
(60) Provisional application No. 60/056,875, filed on Aug. 22, 1997.
(60) Provisional application No. 60/056,862, filed on Aug. 22, 1997.
(60) Provisional application No. 60/056,887, filed on Aug. 22, 1997.
(60) Provisional application No. 60/056,908, filed on Aug. 22, 1997.
(60) Provisional application No. 60/048,964, filed on Jun. 6, 1997.
(60) Provisional application No. 60/057,650, filed on Sep. 5, 1997.
(60) Provisional application No. 60/056,884, filed on Aug. 22, 1997.
(60) Provisional application No. 60/057,669, filed on Sep. 5, 1997.
(60) Provisional application No. 60/049,610, filed on Jun. 13, 1997.
(60) Provisional application No. 60/061,060, filed on Oct. 2, 1997.
(60) Provisional application No. 60/051,926, filed on Jul. 8, 1997.
(60) Provisional application No. 60/052,874, filed on Jul. 16, 1997.
(60) Provisional application No. 60/058,785, filed on Sep. 12, 1997.
(60) Provisional application No. 60/055,724, filed on Aug. 18, 1997.
(60) Provisional application No. 60/265,583, filed on Feb. 2, 2001.
(60) Provisional application No. 60/265,583, filed on Feb. 2, 2001.
(60) Provisional application No. 60/265,583, filed on Feb. 2, 2001.
(60) Provisional application No. 60/265,583, filed on Feb. 2, 2001.
(60) Provisional application No. 60/040,762, filed on Mar. 14, 1997.
(60) Provisional application No. 60/040,710, filed on Mar. 14, 1997.
(60) Provisional application No. 60/050,934, filed on May 30, 1997.
(60) Provisional application No. 60/048,100, filed on May 30, 1997.
(60) Provisional application No. 60/048,357, filed on May 30, 1997.
(60) Provisional application No. 60/048,189, filed on May 30, 1997.
(60) Provisional application No. 60/057,765, filed on Sep. 5, 1997.
(60) Provisional application No. 60/048,970, filed on Jun. 6, 1997.
(60) Provisional application No. 60/068,368, filed on Dec. 19, 1997.
(60) Provisional application No. 60/041,277, filed on Mar. 21, 1997.
(60) Provisional application No. 60/042,344, filed on Mar. 21, 1997.
(60) Provisional application No. 60/041,276, filed on Mar. 21, 1997.
(60) Provisional application No. 60/041,281, filed on Mar. 21, 1997.
(60) Provisional application No. 60/048,094, filed on May 30, 1997.
(60) Provisional application No. 60/048,350, filed on May 30, 1997.
(60) Provisional application No. 60/048,188, filed on May 30, 1997.
(60) Provisional application No. 60/048,135, filed on May 30, 1997.
(60) Provisional application No. 60/050,937, filed on May 30, 1997.
(60) Provisional application No. 60/048,187, filed on May 30, 1997.
(60) Provisional application No. 60/048,099, filed on May 30, 1997.
(60) Provisional application No. 60/048,352, filed on May 30, 1997.
(60) Provisional application No. 60/048,186, filed on May 30, 1997.
(60) Provisional application No. 60/048,069, filed on May 30, 1997.
(60) Provisional application No. 60/048,095, filed on May 30, 1997.
(60) Provisional application No. 60/048,131, filed on May 30, 1997.
(60) Provisional application No. 60/048,096, filed on May 30, 1997.
(60) Provisional application No. 60/048,355, filed on May 30, 1997.
(60) Provisional application No. 60/048,160, filed on May 30, 1997.
(60) Provisional application No. 60/048,351, filed on May 30, 1997.
(60) Provisional application No. 60/048,154, filed on May 30, 1997.
(60) Provisional application No. 60/054,804, filed on Aug. 5, 1997.
(60) Provisional application No. 60/056,370, filed on Aug. 19, 1997.
(60) Provisional application No. 60/060,862, filed on Oct. 2, 1997.
(60) Provisional application No. 60/042,726, filed on Apr. 8, 1997.
(60) Provisional application No. 60/042,727, filed on Apr. 8, 1997.
(60) Provisional application No. 60/042,728, filed on Apr. 8, 1997.
(60) Provisional application No. 60/042,754, filed on Apr. 8, 1997.
(60) Provisional application No. 60/042,825, filed on Apr. 8, 1997.
(60) Provisional application No. 60/048,068, filed on May 30, 1997.
(60) Provisional application No. 60/048,070, filed on May 30, 1997.
(60) Provisional application No. 60/048,184, filed on May 30, 1997.
(60) Provisional application No. 60/042,726, filed on Apr. 8, 1997.
(60) Provisional application No. 60/042,727, filed on Apr. 8, 1997.
(60) Provisional application No. 60/042,728, filed on Apr. 8, 1997.
(60) Provisional application No. 60/042,754, filed on Apr. 8, 1997.
(60) Provisional application No. 60/042,825, filed on Apr. 8, 1997.
(60) Provisional application No. 60/048,068, filed on May 30, 1997.
(60) Provisional application No. 60/048,070, filed on May 30, 1997.
(60) Provisional application No. 60/048,184, filed on May 30, 1997.
(60) Provisional application No. 60/044,039, filed on May 30, 1997.
(60) Provisional application No. 60/048,093, filed on May 30, 1997.
(60) Provisional application No. 60/048,190, filed on May 30, 1997.
(60) Provisional application No. 60/050,935, filed on May 30, 1997.
(60) Provisional application No. 60/048,101, filed on May 30, 1997.
(60) Provisional application No. 60/048,356, filed on May 30, 1997.
(60) Provisional application No. 60/056,250, filed on Aug. 29, 1997.
(60) Provisional application No. 60/056,296, filed on Aug. 29, 1997.
(60) Provisional application No. 60/056,293, filed on Aug. 29, 1997.
(60) Provisional application No. 60/048,885, filed on Jun. 6, 1997.
(60) Provisional application No. 60/049,375, filed on Jun. 6, 1997.
(60) Provisional application No. 60/048,881, filed on Jun. 6, 1997.
(60) Provisional application No. 60/048,880, filed on Jun. 6, 1997.
(60) Provisional application No. 60/048,896, filed on Jun. 6, 1997.
(60) Provisional application No. 60/049,020, filed on Jun. 6, 1997.
(60) Provisional application No. 60/048,876, filed on Jun. 6, 1997.
(60) Provisional application No. 60/048,895, filed on Jun. 6, 1997.
(60) Provisional application No. 60/048,884, filed on Jun. 6, 1997.
(60) Provisional application No. 60/048,894, filed on Jun. 6, 1997.
(60) Provisional application No. 60/048,971, filed on Jun. 6, 1997.
(60) Provisional application No. 60/048,964, filed on Jun. 6, 1997.
(60) Provisional application No. 60/048,882, filed on Jun. 6, 1997.
(60) Provisional application No. 60/048,899, filed on Jun. 6, 1997.
(60) Provisional application No. 60/048,893, filed on Jun. 6, 1997.
(60) Provisional application No. 60/048,900, filed on Jun. 6, 1997.
(60) Provisional application No. 60/048,901, filed on Jun. 6, 1997.
(60) Provisional application No. 60/048,892, filed on Jun. 6, 1997.
(60) Provisional application No. 60/048,915, filed on Jun. 6, 1997.
(60) Provisional application No. 60/049,019, filed on Jun. 6, 1997.
(60) Provisional application No. 60/048,970, filed on Jun. 6, 1997.
(60) Provisional application No. 60/048,972, filed on Jun. 6, 1997.
(60) Provisional application No. 60/048,916, filed on Jun. 6, 1997.
(60) Provisional application No. 60/049,373, filed on Jun. 6, 1997.
(60) Provisional application No. 60/048,875, filed on Jun. 6, 1997.
(60) Provisional application No. 60/049,374, filed on Jun. 6, 1997.
(60) Provisional application No. 60/048,917, filed on Jun. 6, 1997.
(60) Provisional application No. 60/048,949, filed on Jun. 6, 1997.
(60) Provisional application No. 60/048,974, filed on Jun. 6, 1997.
(60) Provisional application No. 60/048,883, filed on Jun. 6, 1997.
(60) Provisional application No. 60/048,897, filed on Jun. 6, 1997.
(60) Provisional application No. 60/048,898, filed on Jun. 6, 1997.
(60) Provisional application No. 60/048,962, filed on Jun. 6, 1997.
(60) Provisional application No. 60/048,963, filed on Jun. 6, 1997.
(60) Provisional application No. 60/048,877, filed on Jun. 6, 1997.
(60) Provisional application No. 60/048,878, filed on Jun. 6, 1997.
(60) Provisional application No. 60/057,645, filed on Sep. 5, 1997.
(60) Provisional application No. 60/057,642, filed on Sep. 5, 1997.
(60) Provisional application No. 60/057,668, filed on Sep. 5, 1997.
(60) Provisional application No. 60/057,635, filed on Sep. 5, 1997.
(60) Provisional application No. 60/057,627, filed on Sep. 5, 1997.
(60) Provisional application No. 60/057,667, filed on Sep. 5, 1997.
(60) Provisional application No. 60/057,666, filed on Sep. 5, 1997.
(60) Provisional application No. 60/057,764, filed on Sep. 5, 1997.
(60) Provisional application No. 60/057,643, filed on Sep. 5, 1997.
(60) Provisional application No. 60/057,769, filed on Sep. 5, 1997.
(60) Provisional application No. 60/057,763, filed on Sep. 5, 1997.
(60) Provisional application No. 60/057,650, filed on Sep. 5, 1997.
(60) Provisional application No. 60/057,584, filed on Sep. 5, 1997.
(60) Provisional application No. 60/057,647, filed on Sep. 5, 1997.
(60) Provisional application No. 60/057,661, filed on Sep. 5, 1997.
(60) Provisional application No. 60/057,662, filed on Sep. 5, 1997.
(60) Provisional application No. 60/057,646, filed on Sep. 5, 1997.
(60) Provisional application No. 60/057,654, filed on Sep. 5, 1997.
(60) Provisional application No. 60/057,651, filed on Sep. 5, 1997.
(60) Provisional application No. 60/057,644, filed on Sep. 5, 1997.
(60) Provisional application No. 60/057,765, filed on Sep. 5, 1997.
(60) Provisional application No. 60/057,762, filed on Sep. 5, 1997.
(60) Provisional application No. 60/057,775, filed on Sep. 5, 1997.
(60) Provisional application No. 60/057,648, filed on Sep. 5, 1997.
(60) Provisional application No. 60/057,774, filed on Sep. 5, 1997.
(60) Provisional application No. 60/057,649, filed on Sep. 5, 1997.
(60) Provisional application No. 60/057,770, filed on Sep. 5, 1997.
(60) Provisional application No. 60/057,771, filed on Sep. 5, 1997.
(60) Provisional application No. 60/057,761, filed on Sep. 5, 1997.
(60) Provisional application No. 60/057,760, filed on Sep. 5, 1997.
(60) Provisional application No. 60/057,776, filed on Sep. 5, 1997.
(60) Provisional application No. 60/057,778, filed on Sep. 5, 1997.
(60) Provisional application No. 60/057,629, filed on Sep. 5, 1997.
(60) Provisional application No. 60/057,628, filed on Sep. 5, 1997.
(60) Provisional application No. 60/057,777, filed on Sep. 5, 1997.
(60) Provisional application No. 60/057,634, filed on Sep. 5, 1997.

(51) Int. Cl. C12Q 1/68; C07H 21/04; C12P 21/06; C12N 9/00; C07K 14/47; C07K 16/18

(52) U.S. Cl. 435/6; 435/69.1; 435/183; 435/320.1; 435/325; 530/350; 530/388.1; 536/23.2

(57) ABSTRACT

The present invention relates to human secreted polypeptides, and isolated nucleic acid molecules encoding said polypeptides, useful for diagnosing and treating cardiovascular diseases, disorders, and/or conditions related thereto. Antibodies that bind these polypeptides are also encompassed by the present invention. Also encompassed by the invention are vectors, host cells, and recombinant and synthetic methods for producing said polynucleotides, polypeptides, and/or antibodies. The invention further encompasses screening methods for identifying agonists and antagonists of polynucleotides and polypeptides of the invention. The present invention further encompasses methods and compositions for inhibiting or enhancing the production and function of the polypeptides of the present invention.

### RELATED APPLICATIONS

[0001] This application is a continuation-in-part of Ser. No. 10/664,358, filed Sep. 20, 2003, which in turn claims benefit of the following:

| Application:: | Continuity Type:: | Parent Application:: | Parent Filing Date:: |
|---|---|---|---|
| 10/664,358 | Continuation-in-part of | PCT/US02/0978 | Sep. 20, 2003 |
| PCT/US02/09785 | Continuation-in-part of | 10/100,683 | Mar. 19, 2002 |
| 10/100,683 | Non-provisional of | 60/277,340 | Mar. 21, 2001 |
| 10/100,683 | Non-provisional of | 60/306,171 | Jul. 19, 2001 |
| 10/100,683 | Non-provisional of | 60/331,287 | Nov. 13, 2001 |
| 10/100,683 | Continuation-in-part of | 09/981,876 | Oct. 19, 2001 |
| 09/981,876 | Divisional of | 09/621,011 | Jul. 20, 2000 |
| 09/621,011 | Continuation of | 09/148,545 | Sep. 04, 1998 |
| 09/148,545 | Continuation-in-part of | PCT/US98/04482 | Mar. 06, 1998 |
| 10/100,683 | Continuation-in-part of | 09/621,011 | Jul. 20, 2000 |
| 09/621,011 | Continuation of | 09/148,545 | Sep. 04, 1998 |
| 09/148,545 | Continuation-in-part of | PCT/US98/04482 | Mar. 06, 1998 |
| 10/100,683 | Continuation-in-part of | 09/148,545 | Sep. 04, 1998 |
| 09/148,545 | Continuation-in-part of | PCT/US98/04482 | Mar. 06, 1998 |
| 10/100,683 | Continuation-in-part of | PCT/US98/04482 | Mar. 06, 1998 |
| PCT/US98/04482 | Non-provisional of | 60/040,162 | Mar. 07, 1997 |
| PCT/US98/04482 | Non-provisional of | 60/040,333 | Mar. 07, 1997 |
| PCT/US98/04482 | Non-provisional of | 60/038,621 | Mar. 07, 1997 |
| PCT/US98/04482 | Non-provisional of | 60/040,161 | Mar. 07, 1997 |
| PCT/US98/04482 | Non-provisional of | 60/040,626 | Mar. 07, 1997 |
| PCT/US98/04482 | Non-provisional of | 60/040,334 | Mar. 07, 1997 |
| PCT/US98/04482 | Non-provisional of | 60/040,336 | Mar. 07, 1997 |
| PCT/US98/04482 | Non-provisional of | 60/040,163 | Mar. 07, 1997 |
| PCT/US98/04482 | Non-provisional of | 60/047,615 | May 23, 1997 |
| PCT/US98/04482 | Non-provisional of | 60/047,600 | May 23, 1997 |
| PCT/US98/04482 | Non-provisional of | 60/047,597 | May 23, 1997 |
| PCT/US98/04482 | Non-provisional of | 60/047,502 | May 23, 1997 |
| PCT/US98/04482 | Non-provisional of | 60/047,633 | May 23, 1997 |
| PCT/US98/04482 | Non-provisional of | 60/047,583 | May 23, 1997 |
| PCT/US98/04482 | Non-provisional of | 60/047,617 | May 23, 1997 |
| PCT/US98/04482 | Non-provisional of | 60/047,618 | May 23, 1997 |
| PCT/US98/04482 | Non-provisional of | 60/047,503 | May 23, 1997 |
| PCT/US98/04482 | Non-provisional of | 60/047,592 | May 23, 1997 |
| PCT/US98/04482 | Non-provisional of | 60/047,581 | May 23, 1997 |
| PCT/US98/04482 | Non-provisional of | 60/047,584 | May 23, 1997 |
| PCT/US98/04482 | Non-provisional of | 60/047,500 | May 23, 1997 |
| PCT/US98/04482 | Non-provisional of | 60/047,587 | May 23, 1997 |
| PCT/US98/04482 | Non-provisional of | 60/047,492 | May 23, 1997 |
| PCT/US98/04482 | Non-provisional of | 60/047,598 | May 23, 1997 |
| PCT/US98/04482 | Non-provisional of | 60/047,613 | May 23, 1997 |
| PCT/US98/04482 | Non-provisional of | 60/047,582 | May 23, 1997 |
| PCT/US98/04482 | Non-provisional of | 60/047,596 | May 23, 1997 |
| PCT/US98/04482 | Non-provisional of | 60/047,612 | May 23, 1997 |
| PCT/US98/04482 | Non-provisional of | 60/047,632 | May 23, 1997 |
| PCT/US98/04482 | Non-provisional of | 60/047,601 | May 23, 1997 |
| PCT/US98/04482 | Non-provisional of | 60/043,580 | Apr. 11, 1997 |
| PCT/US98/04482 | Non-provisional of | 60/043,568 | Apr. 11, 1997 |
| PCT/US98/04482 | Non-provisional of | 60/043,314 | Apr. 11, 1997 |
| PCT/US98/04482 | Non-provisional of | 60/043,569 | Apr. 11, 1997 |
| PCT/US98/04482 | Non-provisional of | 60/043,311 | Apr. 11, 1997 |
| PCT/US98/04482 | Non-provisional of | 60/043,671 | Apr. 11, 1997 |
| PCT/US98/04482 | Non-provisional of | 60/043,674 | Apr. 11, 1997 |
| PCT/US98/04482 | Non-provisional of | 60/043,669 | Apr. 11, 1997 |
| PCT/US98/04482 | Non-provisional of | 60/043,312 | Apr. 11, 1997 |
| PCT/US98/04482 | Non-provisional of | 60/043,313 | Apr. 11, 1997 |
| PCT/US98/04482 | Non-provisional of | 60/043,672 | Apr. 11, 1997 |
| PCT/US98/04482 | Non-provisional of | 60/043,315 | Apr. 11, 1997 |
| PCT/US98/04482 | Non-provisional of | 60/048,974 | Jun. 06, 1997 |
| PCT/US98/04482 | Non-provisional of | 60/056,886 | Aug. 22, 1997 |
| PCT/US98/04482 | Non-provisional of | 60/056,877 | Aug. 22, 1997 |
| PCT/US98/04482 | Non-provisional of | 60/056,889 | Aug. 22, 1997 |
| PCT/US98/04482 | Non-provisional of | 60/056,893 | Aug. 22, 1997 |
| PCT/US98/04482 | Non-provisional of | 60/056,630 | Aug. 22, 1997 |
| PCT/US98/04482 | Non-provisional of | 60/056,878 | Aug. 22, 1997 |
| PCT/US98/04482 | Non-provisional of | 60/056,662 | Aug. 22, 1997 |
| PCT/US98/04482 | Non-provisional of | 60/056,872 | Aug. 22, 1997 |
| PCT/US98/04482 | Non-provisional of | 60/056,882 | Aug. 22, 1997 |
| PCT/US98/04482 | Non-provisional of | 60/056,637 | Aug. 22, 1997 |
| PCT/US98/04482 | Non-provisional of | 60/056,903 | Aug. 22, 1997 |
| PCT/US98/04482 | Non-provisional of | 60/056,888 | Aug. 22, 1997 |
| PCT/US98/04482 | Non-provisional of | 60/056,879 | Aug. 22, 1997 |
| PCT/US98/04482 | Non-provisional of | 60/056,880 | Aug. 22, 1997 |
| PCT/US98/04482 | Non-provisional of | 60/056,894 | Aug. 22, 1997 |
| PCT/US98/04482 | Non-provisional of | 60/056,911 | Aug. 22, 1997 |
| PCT/US98/04482 | Non-provisional of | 60/056,636 | Aug. 22, 1997 |
| PCT/US98/04482 | Non-provisional of | 60/056,874 | Aug. 22, 1997 |
| PCT/US98/04482 | Non-provisional of | 60/056,910 | Aug. 22, 1997 |
| PCT/US98/04482 | Non-provisional of | 60/056,864 | Aug. 22, 1997 |
| PCT/US98/04482 | Non-provisional of | 60/056,631 | Aug. 22, 1997 |
| PCT/US98/04482 | Non-provisional of | 60/056,845 | Aug. 22, 1997 |
| PCT/US98/04482 | Non-provisional of | 60/056,892 | Aug. 22, 1997 |
| PCT/US98/04482 | Non-provisional of | 60/047,595 | May 23, 1997 |
| PCT/US98/04482 | Non-provisional of | 60/057,761 | Sep. 05, 1997 |
| PCT/US98/04482 | Non-provisional of | 60/047,599 | May 23, 1997 |
| PCT/US98/04482 | Non-provisional of | 60/047,588 | May 23, 1997 |
| PCT/US98/04482 | Non-provisional of | 60/047,585 | May 23, 1997 |
| PCT/US98/04482 | Non-provisional of | 60/047,586 | May 23, 1997 |
| PCT/US98/04482 | Non-provisional of | 60/047,590 | May 23, 1997 |
| PCT/US98/04482 | Non-provisional of | 60/047,594 | May 23, 1997 |
| PCT/US98/04482 | Non-provisional of | 60/047,589 | May 23, 1997 |
| PCT/US98/04482 | Non-provisional of | 60/047,593 | May 23, 1997 |
| PCT/US98/04482 | Non-provisional of | 60/047,614 | May 23, 1997 |
| PCT/US98/04482 | Non-provisional of | 60/043,578 | Apr. 11, 1997 |
| PCT/US98/04482 | Non-provisional of | 60/043,576 | Apr. 11, 1997 |
| PCT/US98/04482 | Non-provisional of | 60/047,501 | May 23, 1997 |
| PCT/US98/04482 | Non-provisional of | 60/043,670 | Apr. 11, 1997 |
| PCT/US98/04482 | Non-provisional of | 60/056,632 | Aug. 22, 1997 |
| PCT/US98/04482 | Non-provisional of | 60/056,664 | Aug. 22, 1997 |
| PCT/US98/04482 | Non-provisional of | 60/056,876 | Aug. 22, 1997 |
| PCT/US98/04482 | Non-provisional of | 60/056,881 | Aug. 22, 1997 |
| PCT/US98/04482 | Non-provisional of | 60/056,909 | Aug. 22, 1997 |
| PCT/US98/04482 | Non-provisional of | 60/056,875 | Aug. 22, 1997 |
| PCT/US98/04482 | Non-provisional of | 60/056,862 | Aug. 22, 1997 |
| PCT/US98/04482 | Non-provisional of | 60/056,887 | Aug. 22, 1997 |
| PCT/US98/04482 | Non-provisional of | 60/056,908 | Aug. 22, 1997 |
| PCT/US98/04482 | Non-provisional of | 60/048,964 | Jun. 06, 1997 |
| PCT/US98/04482 | Non-provisional of | 60/057,650 | Sep. 05, 1997 |
| PCT/US98/04482 | Non-provisional of | 60/056,884 | Aug. 22, 1997 |
| 10/100,683 | Continuation-in-part of | 09/882,171 | Jun. 18, 2001 |
| 09/882,171 | Non-provisional of | 60/190,068 | Mar. 17, 2000 |
| 09/882,171 | Continuation of | 09/809,391 | Mar. 16, 2001 |
| 09/809,391 | Continuation-in-part of | 09/149,476 | Sep. 08, 1998 |
| 09/149,476 | Continuation-in-part of | PCT/US98/04493 | Mar. 06, 1998 |
| 10/100,683 | Continuation-in-part of | 09/809,391 | Mar. 16, 2001 |
| 09/809,391 | Non-provisional of | 60/190,068 | Mar. 17, 2000 |
| 09/809,391 | Continuation-in-part of | 09/149,476 | Sep. 08, 1998 |
| 09/149,476 | Continuation-in-part of | PCT/US98/04493 | Mar. 06, 1998 |
| 10/100,683 | Continuation-in-part of | 09/149,476 | Sep. 08, 1998 |
| 09/149,476 | Continuation-in-part of | PCT/US98/04493 | Mar. 06, 1998 |
| 10/100,683 | Continuation-in-part of | PCT/US98/04493 | Mar. 06, 1998 |
| PCT/US98/04493 | Non-provisional of | 60/040,161 | Mar. 07, 1997 |
| PCT/US98/04493 | Non-provisional of | 60/040,162 | Mar. 07, 1997 |
| PCT/US98/04493 | Non-provisional of | 60/040,333 | Mar. 07, 1997 |
| PCT/US98/04493 | Non-provisional of | 60/038,621 | Mar. 07, 1997 |
| PCT/US98/04493 | Non-provisional of | 60/040,626 | Mar. 07, 1997 |
| PCT/US98/04493 | Non-provisional of | 60/040,334 | Mar. 07, 1997 |
| PCT/US98/04493 | Non-provisional of | 60/040,336 | Mar. 07, 1997 |
| PCT/US98/04493 | Non-provisional of | 60/040,163 | Mar. 07, 1997 |
| PCT/US98/04493 | Non-provisional of | 60/047,600 | May 23, 1997 |
| PCT/US98/04493 | Non-provisional of | 60/047,615 | May 23, 1997 |
| PCT/US98/04493 | Non-provisional of | 60/047,597 | May 23, 1997 |
| PCT/US98/04493 | Non-provisional of | 60/047,502 | May 23, 1997 |
| PCT/US98/04493 | Non-provisional of | 60/047,633 | May 23, 1997 |
| PCT/US98/04493 | Non-provisional of | 60/047,583 | May 23, 1997 |
| PCT/US98/04493 | Non-provisional of | 60/047,617 | May 23, 1997 |
| PCT/US98/04493 | Non-provisional of | 60/047,618 | May 23, 1997 |
| PCT/US98/04493 | Non-provisional of | 60/047,503 | May 23, 1997 |
| PCT/US98/04493 | Non-provisional of | 60/047,592 | May 23, 1997 |
| PCT/US98/04493 | Non-provisional of | 60/047,581 | May 23, 1997 |
| PCT/US98/04493 | Non-provisional of | 60/047,584 | May 23, 1997 |
| PCT/US98/04493 | Non-provisional of | 60/047,500 | May 23, 1997 |
| PCT/US98/04493 | Non-provisional of | 60/047,587 | May 23, 1997 |
| PCT/US98/04493 | Non-provisional of | 60/047,492 | May 23, 1997 |
| PCT/US98/04493 | Non-provisional of | 60/047,598 | May 23, 1997 |
| PCT/US98/04493 | Non-provisional of | 60/047,613 | May 23, 1997 |
| PCT/US98/04493 | Non-provisional of | 60/047,582 | May 23, 1997 |
| PCT/US98/04493 | Non-provisional of | 60/047,596 | May 23, 1997 |
| PCT/US98/04493 | Non-provisional of | 60/047,612 | May 23, 1997 |
| PCT/US98/04493 | Non-provisional of | 60/047,632 | May 23, 1997 |
| PCT/US98/04493 | Non-provisional of | 60/047,601 | May 23, 1997 |
| PCT/US98/04493 | Non-provisional of | 60/043,580 | Apr. 11, 1997 |
| PCT/US98/04493 | Non-provisional of | 60/043,568 | Apr. 11, 1997 |
| PCT/US98/04493 | Non-provisional of | 60/043,314 | Apr. 11, 1997 |
| PCT/US98/04493 | Non-provisional of | 60/043,569 | Apr. 11, 1997 |
| PCT/US98/04493 | Non-provisional of | 60/043,311 | Apr. 11, 1997 |
| PCT/US98/04493 | Non-provisional of | 60/043,671 | Apr. 11, 1997 |
| PCT/US98/04493 | Non-provisional of | 60/043,674 | Apr. 11, 1997 |
| PCT/US98/04493 | Non-provisional of | 60/043,669 | Apr. 11, 1997 |
| PCT/US98/04493 | Non-provisional of | 60/043,312 | Apr. 11, 1997 |
| PCT/US98/04493 | Non-provisional of | 60/043,313 | Apr. 11, 1997 |
| PCT/US98/04493 | Non-provisional of | 60/043,672 | Apr. 11, 1997 |
| PCT/US98/04493 | Non-provisional of | 60/043,315 | Apr. 11, 1997 |
| PCT/US98/04493 | Non-provisional of | 60/048,974 | Jun. 06, 1997 |
| PCT/US98/04493 | Non-provisional of | 60/056,886 | Aug. 22, 1997 |
| PCT/US98/04493 | Non-provisional of | 60/056,877 | Aug. 22, 1997 |
| PCT/US98/04493 | Non-provisional of | 60/056,889 | Aug. 22, 1997 |
| PCT/US98/04493 | Non-provisional of | 60/056,893 | Aug. 22, 1997 |
| PCT/US98/04493 | Non-provisional of | 60/056,630 | Aug. 22, 1997 |
| PCT/US98/04493 | Non-provisional of | 60/056,878 | Aug. 22, 1997 |
| PCT/US98/04493 | Non-provisional of | 60/056,662 | Aug. 22, 1997 |
| PCT/US98/04493 | Non-provisional of | 60/056,872 | Aug. 22, 1997 |
| PCT/US98/04493 | Non-provisional of | 60/056,882 | Aug. 22, 1997 |
| PCT/US98/04493 | Non-provisional of | 60/056,637 | Aug. 22, 1997 |
| PCT/US98/04493 | Non-provisional of | 60/056,903 | Aug. 22, 1997 |
| PCT/US98/04493 | Non-provisional of | 60/056,888 | Aug. 22, 1997 |
| PCT/US98/04493 | Non-provisional of | 60/056,879 | Aug. 22, 1997 |
| PCT/US98/04493 | Non-provisional of | 60/056,880 | Aug. 22, 1997 |
| PCT/US98/04493 | Non-provisional of | 60/056,894 | Aug. 22, 1997 |
| PCT/US98/04493 | Non-provisional of | 60/056,911 | Aug. 22, 1997 |
| PCT/US98/04493 | Non-provisional of | 60/056,636 | Aug. 22, 1997 |
| PCT/US98/04493 | Non-provisional of | 60/056,874 | Aug. 22, 1997 |
| PCT/US98/04493 | Non-provisional of | 60/056,910 | Aug. 22, 1997 |
| PCT/US98/04493 | Non-provisional of | 60/056,864 | Aug. 22, 1997 |
| PCT/US98/04493 | Non-provisional of | 60/056,631 | Aug. 22, 1997 |
| PCT/US98/04493 | Non-provisional of | 60/056,845 | Aug. 22, 1997 |
| PCT/US98/04493 | Non-provisional of | 60/056,892 | Aug. 22, 1997 |
| PCT/US98/04493 | Non-provisional of | 60/057,761 | Sep. 05, 1997 |
| PCT/US98/04493 | Non-provisional of | 60/047,595 | May 23, 1997 |
| PCT/US98/04493 | Non-provisional of | 60/047,599 | May 23, 1997 |
| PCT/US98/04493 | Non-provisional of | 60/047,588 | May 23, 1997 |
| PCT/US98/04493 | Non-provisional of | 60/047,585 | May 23, 1997 |
| PCT/US98/04493 | Non-provisional of | 60/047,586 | May 23, 1997 |
| PCT/US98/04493 | Non-provisional of | 60/047,590 | May 23, 1997 |
| PCT/US98/04493 | Non-provisional of | 60/047,594 | May 23, 1997 |
| PCT/US98/04493 | Non-provisional of | 60/047,589 | May 23, 1997 |
| PCT/US98/04493 | Non-provisional of | 60/047,593 | May 23, 1997 |
| PCT/US98/04493 | Non-provisional of | 60/047,614 | May 23, 1997 |
| PCT/US98/04493 | Non-provisional of | 60/043,578 | Apr. 11, 1997 |
| PCT/US98/04493 | Non-provisional of | 60/043,576 | Apr. 11, 1997 |
| PCT/US98/04493 | Non-provisional of | 60/047,501 | May 23, 1997 |
| PCT/US98/04493 | Non-provisional of | 60/043,670 | Apr. 11, 1997 |
| PCT/US98/04493 | Non-provisional of | 60/056,632 | Aug. 22, 1997 |
| PCT/US98/04493 | Non-provisional of | 60/056,664 | Aug. 22, 1997 |
| PCT/US98/04493 | Non-provisional of | 60/056,876 | Aug. 22, 1997 |
| PCT/US98/04493 | Non-provisional of | 60/056,881 | Aug. 22, 1997 |
| PCT/US98/04493 | Non-provisional of | 60/056,909 | Aug. 22, 1997 |
| PCT/US98/04493 | Non-provisional of | 60/056,875 | Aug. 22, 1997 |
| PCT/US98/04493 | Non-provisional of | 60/056,862 | Aug. 22, 1997 |
| PCT/US98/04493 | Non-provisional of | 60/056,887 | Aug. 22, 1997 |
| PCT/US98/04493 | Non-provisional of | 60/056,908 | Aug. 22, 1997 |
| PCT/US98/04493 | Non-provisional of | 60/048,964 | Jun. 06, 1997 |
| PCT/US98/04493 | Non-provisional of | 60/057,650 | Sep. 05, 1997 |
| PCT/US98/04493 | Non-provisional of | 60/056,884 | Aug. 22, 1997 |
| PCT/US98/04493 | Non-provisional of | 60/057,669 | Sep. 05, 1997 |
| PCT/US98/04493 | Non-provisional of | 60/049,610 | Jun. 13, 1997 |
| PCT/US98/04493 | Non-provisional of | 60/061,060 | Oct. 02, 1997 |
| PCT/US98/04493 | Non-provisional of | 60/051,926 | Jul. 08, 1997 |
| PCT/US98/04493 | Non-provisional of | 60/052,874 | Jul. 16, 1997 |
| PCT/US98/04493 | Non-provisional of | 60/058,785 | Sep. 12, 1997 |
| PCT/US98/04493 | Non-provisional of | 60/055,724 | Aug. 18, 1997 |
| 10/100,683 | Continuation-in-part of | 10/058,993 | Jan. 30, 2002 |
| 10/058,993 | Non-provisional of | 60/265,583 | Feb. 02, 2001 |
| 10/058,993 | Continuation-in-part of | 09/852,659 | May 11, 2001 |
| 09/852,659 | Continuation-in-part of | 09/152,060 | Sep. 11, 1998 |
| 09/152,060 | Continuation-in-part of | PCT/US98/04858 | Mar. 12, 1998 |
| 10/058,993 | Continuation-in-part of | 09/853,161 | May 11, 2001 |
| 09/853,161 | Continuation-in-part of | 09/152,060 | Sep. 11, 1998 |
| 09/152,060 | Continuation-in-part of | PCT/US98/04858 | Mar. 12, 1998 |
| 10/058,993 | Continuation-in-part of | 09/852,797 | May 11, 2001 |
| 09/852,797 | Continuation-in-part of | 09/152,060 | Sep. 11, 1998 |
| 09/152,060 | Continuation-in-part of | PCT/US98/04858 | Mar. 12, 1998 |
| 10/100,683 | Continuation-in-part of | 09/852,659 | May 11, 2001 |
| 09/852,659 | Non-provisional of | 60/265,583 | Feb. 02, 2001 |
| 09/852,659 | Continuation-in-part of | 09/152,060 | Sep. 11, 1998 |
| 09/152,060 | Continuation-in-part of | PCT/US98/04858 | Mar. 12, 1998 |
| 10/100,683 | Continuation-in-part of | 09/853,161 | May 11, 2001 |
| 09/853,161 | Non-provisional of | 60/265,583 | Feb. 02, 2001 |
| 09/853,161 | Continuation-in-part of | 09/152,060 | Sep. 11, 1998 |
| 09/152,060 | Continuation-in-part of | PCT/US98/04858 | Mar. 12, 1998 |
| 10/100,683 | Continuation-in-part of | 09/852,797 | May 11, 2001 |
| 09/852,797 | Non-provisional of | 60/265,583 | Feb. 02, 2001 |
| 09/852,797 | Continuation-in-part of | 09/152,060 | Sep. 11, 1998 |
| 09/152,060 | Continuation-in-part of | PCT/US98/04858 | Mar. 12, 1998 |
| 10/100,683 | Continuation-in-part of | 09/152,060 | Sep. 11, 1998 |
| 09/152,060 | Continuation-in-part of | PCT/US98/04858 | Mar. 12, 1998 |
| 10/100,683 | Continuation-in-part of | PCT/US98/04858 | Mar. 12, 1998 |
| PCT/US98/04858 | Non-provisional of | 60/040,762 | Mar. 14, 1997 |
| PCT/US98/04858 | Non-provisional of | 60/040,710 | Mar. 14, 1997 |
| PCT/US98/04858 | Non-provisional of | 60/050,934 | May 30, 1997 |
| PCT/US98/04858 | Non-provisional of | 60/048,100 | May 30, 1997 |
| PCT/US98/04858 | Non-provisional of | 60/048,357 | May 30, 1997 |
| PCT/US98/04858 | Non-provisional of | 60/048,189 | May 30, 1997 |
| PCT/US98/04858 | Non-provisional of | 60/057,765 | Sep. 05, 1997 |
| PCT/US98/04858 | Non-provisional of | 60/048,970 | Jun. 06, 1997 |
| PCT/US98/04858 | Non-provisional of | 60/068,368 | Dec. 19, 1997 |
| 10/100,683 | Continuation-in-part of | 10/059,395 | Jan. 31, 2002 |
| 10/059,395 | Divisional of | 09/966,262 | Oct. 01, 2001 |
| 09/966,262 | Continuation of | 09/154,707 | Sep. 17, 1998 |
| 09/154,707 | Continuation-in-part of | PCT/US98/05311 | Mar. 19, 1998 |
| 10/100,683 | Continuation-in-part of | 09/984,245 | Oct. 29, 2001 |
| 09/984,245 | Divisional of | 09/154,707 | Sep. 17, 1998 |
| 09/154,707 | Continuation-in-part of | PCT/US98/05311 | Mar. 19, 1998 |
| 10/100,683 | Continuation-in-part of | 09/983,966 | Oct. 26, 2001 |
| 09/983,966 | Divisional of | 09/154,707 | Sep. 17, 1998 |
| 09/154,707 | Continuation-in-part of | PCT/US98/05311 | Mar. 19, 1998 |
| 10/100,683 | Continuation-in-part of | 09/966,262 | Oct. 01, 2001 |
| 09/966,262 | Continuation of of | 09/154,707 | Sep. 17, 1998 |
| 09/154,707 | Continuation-in-part of | PCT/US98/05311 | Mar. 19, 1998 |
| 10/100,683 | Continuation-in-part of | 09/154,707 | Sep. 17, 1998 |
| 09/154,707 | Continuation-in-part of | PCT/US98/05311 | Mar. 19, 1998 |
| 10/100,683 | Continuation-in-part of | PCT/US98/05311 | Mar. 03, 1998 |
| PCT/US98/05311 | Non-provisional of | 60/041,277 | Mar. 21, 1997 |
| PCT/US98/05311 | Non-provisional of | 60/042,344 | Mar. 21, 1997 |
| PCT/US98/05311 | Non-provisional of | 60/041,276 | Mar. 21, 1997 |
| PCT/US98/05311 | Non-provisional of | 60/041,281 | Mar. 21, 1997 |
| PCT/US98/05311 | Non-provisional of | 60/048,094 | May 30, 1997 |
| PCT/US98/05311 | Non-provisional of | 60/048,350 | May 30, 1997 |
| PCT/US98/05311 | Non-provisional of | 60/048,188 | May 30, 1997 |
| PCT/US98/05311 | Non-provisional of | 60/048,135 | May 30, 1997 |
| PCT/US98/05311 | Non-provisional of | 60/050,937 | May 30, 1997 |
| PCT/US98/05311 | Non-provisional of | 60/048,187 | May 30, 1997 |
| PCT/US98/05311 | Non-provisional of | 60/048,099 | May 30, 1997 |
| PCT/US98/05311 | Non-provisional of | 60/048,352 | May 30, 1997 |
| PCT/US98/05311 | Non-provisional of | 60/048,186 | May 30, 1997 |
| PCT/US98/05311 | Non-provisional of | 60/048,069 | May 30, 1997 |
| PCT/US98/05311 | Non-provisional of | 60/048,095 | May 30, 1997 |
| PCT/US98/05311 | Non-provisional of | 60/048,131 | May 30, 1997 |
| PCT/US98/05311 | Non-provisional of | 60/048,096 | May 30, 1997 |
| PCT/US98/05311 | Non-provisional of | 60/048,355 | May 30, 1997 |
| PCT/US98/05311 | Non-provisional of | 60/048,160 | May 30, 1997 |
| PCT/US98/05311 | Non-provisional of | 60/048,351 | May 30, 1997 |
| PCT/US98/05311 | Non-provisional of | 60/048,154 | May 30, 1997 |
| PCT/US98/05311 | Non-provisional of | 60/054,804 | Aug. 05, 1997 |
| PCT/US98/05311 | Non-provisional of | 60/056,370 | Aug. 19, 1997 |
| PCT/US98/05311 | Non-provisional of | 60/060,862 | Oct. 02, 1997 |
| 10/100,683 | Continuation-in-part of | 09/814,122 | Mar. 22, 2001 |
| 09/814,122 | Continuation of | 09/577,145 | May 24, 2000 |
| 09/577,145 | Continuation of | 09/166,780 | Oct. 06, 1998 |
| 09/166,780 | Continuation-in-part of | PCT/US98/06801 | Apr. 07, 1998 |
| 10/100,683 | Continuation-in-part of | PCT/US98/06801 | Apr. 07, 1998 |
| PCT/US98/06801 | Non-provisional of | 60/042,726 | Apr. 08, 1997 |
| PCT/US98/06801 | Non-provisional of | 60/042,727 | Apr. 08, 1997 |
| PCT/US98/06801 | Non-provisional of | 60/042,728 | Apr. 08, 1997 |
| PCT/US98/06801 | Non-provisional of | 60/042,754 | Apr. 08, 1997 |
| PCT/US98/06801 | Non-provisional of | 60/042,825 | Apr. 08, 1997 |
| PCT/US98/06801 | Non-provisional of | 60/048,068 | May 30, 1997 |
| PCT/US98/06801 | Non-provisional of | 60/048,070 | May 30, 1997 |
| PCT/US98/06801 | Non-provisional of | 60/048,184 | May 30, 1997 |
| 10/100,683 | Continuation-in-part of | PCT/US98/06801 | Apr. 07, 1997 |
| PCT/US98/06801 | Non-provisional of | 60/042,726 | Apr. 08, 1997 |
| PCT/US98/06801 | Non-provisional of | 60/042,727 | Apr. 08, 1997 |
| PCT/US98/06801 | Non-provisional of | 60/042,728 | Apr. 08, 1997 |
| PCT/US98/06801 | Non-provisional of | 60/042,754 | Apr. 08, 1997 |
| PCT/US98/06801 | Non-provisional of | 60/042,825 | Apr. 08, 1997 |
| PCT/US98/06801 | Non-provisional of | 60/048,068 | May 30, 1997 |
| PCT/US98/06801 | Non-provisional of | 60/048,070 | May 30, 1997 |
| PCT/US98/06801 | Non-provisional of | 60/048,184 | May 30, 1997 |
| 10/100,683 | Continuation-in-part of | PCT/US98/10868 | May 28, 1998 |
| PCT/US98/10868 | Non-provisional of | 60/044,039 | May 30, 1997 |
| PCT/US98/10868 | Non-provisional of | 60/048,093 | May 30, 1997 |
| PCT/US98/10868 | Non-provisional of | 60/048,190 | May 30, 1997 |
| PCT/US98/10868 | Non-provisional of | 60/050,935 | May 30, 1997 |
| PCT/US98/10868 | Non-provisional of | 60/048,101 | May 30, 1997 |
| PCT/US98/10868 | Non-provisional of | 60/048,356 | May 30, 1997 |
| PCT/US98/10868 | Non-provisional of | 60/056,250 | Aug. 29, 1997 |
| PCT/US98/10868 | Non-provisional of | 60/056,296 | Aug. 29, 1997 |
| PCT/US98/10868 | Non-provisional of | 60/056,293 | Aug. 29, 1997 |
| 10/100,683 | Continuation-in-part of | PCT/US98/11422 | Jun. 04, 1998 |
| PCT/US98/11422 | Non-provisional of | 60/048,885 | Jun. 06, 1997 |
| PCT/US98/11422 | Non-provisional of | 60/049,375 | Jun. 06, 1997 |
| PCT/US98/11422 | Non-provisional of | 60/048,881 | Jun. 06, 1997 |
| PCT/US98/11422 | Non-provisional of | 60/048,880 | Jun. 06, 1997 |
| PCT/US98/11422 | Non-provisional of | 60/048,896 | Jun. 06, 1997 |
| PCT/US98/11422 | Non-provisional of | 60/049,020 | Jun. 06, 1997 |
| PCT/US98/11422 | Non-provisional of | 60/048,876 | Jun. 06, 1997 |
| PCT/US98/11422 | Non-provisional of | 60/048,895 | Jun. 06, 1997 |
| PCT/US98/11422 | Non-provisional of | 60/048,884 | Jun. 06, 1997 |
| PCT/US98/11422 | Non-provisional of | 60/048,894 | Jun. 06, 1997 |
| PCT/US98/11422 | Non-provisional of | 60/048,971 | Jun. 06, 1997 |
| PCT/US98/11422 | Non-provisional of | 60/048,964 | Jun. 06, 1997 |
| PCT/US98/11422 | Non-provisional of | 60/048,882 | Jun. 06, 1997 |
| PCT/US98/11422 | Non-provisional of | 60/048,899 | Jun. 06, 1997 |
| PCT/US98/11422 | Non-provisional of | 60/048,893 | Jun. 06, 1997 |
| PCT/US98/11422 | Non-provisional of | 60/048,900 | Jun. 06, 1997 |
| PCT/US98/11422 | Non-provisional of | 60/048,901 | Jun. 06, 1997 |
| PCT/US98/11422 | Non-provisional of | 60/048,892 | Jun. 06, 1997 |
| PCT/US98/11422 | Non-provisional of | 60/048,915 | Jun. 06, 1997 |
| PCT/US98/11422 | Non-provisional of | 60/049,019 | Jun. 06, 1997 |
| PCT/US98/11422 | Non-provisional of | 60/048,970 | Jun. 06, 1997 |
| PCT/US98/11422 | Non-provisional of | 60/048,972 | Jun. 06, 1997 |
| PCT/US98/11422 | Non-provisional of | 60/048,916 | Jun. 06, 1997 |
| PCT/US98/11422 | Non-provisional of | 60/049,373 | Jun. 06, 1997 |
| PCT/US98/11422 | Non-provisional of | 60/048,875 | Jun. 06, 1997 |
| PCT/US98/11422 | Non-provisional of | 60/049,374 | Jun. 06, 1997 |
| PCT/US98/11422 | Non-provisional of | 60/048,917 | Jun. 06, 1997 |
| PCT/US98/11422 | Non-provisional of | 60/048,949 | Jun. 06, 1997 |
| PCT/US98/11422 | Non-provisional of | 60/048,974 | Jun. 06, 1997 |
| PCT/US98/11422 | Non-provisional of | 60/048,883 | Jun. 06, 1997 |
| PCT/US98/11422 | Non-provisional of | 60/048,897 | Jun. 06, 1997 |
| PCT/US98/11422 | Non-provisional of | 60/048,898 | Jun. 06, 1997 |
| PCT/US98/11422 | Non-provisional of | 60/048,962 | Jun. 06, 1997 |
| PCT/US98/11422 | Non-provisional of | 60/048,963 | Jun. 06, 1997 |
| PCT/US98/11422 | Non-provisional of | 60/048,877 | Jun. 06, 1997 |
| PCT/US98/11422 | Non-provisional of | 60/048,878 | Jun. 06, 1997 |
| PCT/US98/11422 | Non-provisional of | 60/057,645 | Sep. 05, 1997 |
| PCT/US98/11422 | Non-provisional of | 60/057,642 | Sep. 05, 1997 |
| PCT/US98/11422 | Non-provisional of | 60/057,668 | Sep. 05, 1997 |
| PCT/US98/11422 | Non-provisional of | 60/057,635 | Sep. 05, 1997 |
| PCT/US98/11422 | Non-provisional of | 60/057,627 | Sep. 05, 1997 |
| PCT/US98/11422 | Non-provisional of | 60/057,667 | Sep. 05, 1997 |
| PCT/US98/11422 | Non-provisional of | 60/057,666 | Sep. 05, 1997 |
| PCT/US98/11422 | Non-provisional of | 60/057,764 | Sep. 05, 1997 |
| PCT/US98/11422 | Non-provisional of | 60/057,643 | Sep. 05, 1997 |
| PCT/US98/11422 | Non-provisional of | 60/057,769 | Sep. 05, 1997 |
| PCT/US98/11422 | Non-provisional of | 60/057,763 | Sep. 05, 1997 |
| PCT/US98/11422 | Non-provisional of | 60/057,650 | Sep. 05, 1997 |
| PCT/US98/11422 | Non-provisional of | 60/057,584 | Sep. 05, 1997 |
| PCT/US98/11422 | Non-provisional of | 60/057,647 | Sep. 05, 1997 |
| PCT/US98/11422 | Non-provisional of | 60/057,661 | Sep. 05, 1997 |
| PCT/US98/11422 | Non-provisional of | 60/057,662 | Sep. 05, 1997 |
| PCT/US98/11422 | Non-provisional of | 60/057,646 | Sep. 05, 1997 |
| PCT/US98/11422 | Non-provisional of | 60/057,654 | Sep. 05, 1997 |
| PCT/US98/11422 | Non-provisional of | 60/057,651 | Sep. 05, 1997 |
| PCT/US98/11422 | Non-provisional of | 60/057,644 | Sep. 05, 1997 |
| PCT/US98/11422 | Non-provisional of | 60/057,765 | Sep. 05, 1997 |
| PCT/US98/11422 | Non-provisional of | 60/057,762 | Sep. 05, 1997 |
| PCT/US98/11422 | Non-provisional of | 60/057,775 | Sep. 05, 1997 |
| PCT/US98/11422 | Non-provisional of | 60/057,648 | Sep. 05, 1997 |
| PCT/US98/11422 | Non-provisional of | 60/057,774 | Sep. 05, 1997 |
| PCT/US98/11422 | Non-provisional of | 60/057,649 | Sep. 05, 1997 |
| PCT/US98/11422 | Non-provisional of | 60/057,770 | Sep. 05, 1997 |
| PCT/US98/11422 | Non-provisional of | 60/057,771 | Sep. 05, 1997 |
| PCT/US98/11422 | Non-provisional of | 60/057,761 | Sep. 05, 1997 |
| PCT/US98/11422 | Non-provisional of | 60/057,760 | Sep. 05, 1997 |
| PCT/US98/11422 | Non-provisional of | 60/057,776 | Sep. 05, 1997 |
| PCT/US98/11422 | Non-provisional of | 60/057,778 | Sep. 05, 1997 |
| PCT/US98/11422 | Non-provisional of | 60/057,629 | Sep. 05, 1997 |
| PCT/US98/11422 | Non-provisional of | 60/057,628 | Sep. 05, 1997 |
| PCT/US98/11422 | Non-provisional of | 60/057,777 | Sep. 05, 1997 |
| PCT/US98/11422 | Non-provisional of | 60/057,634 | Sep. 05, 1997 |
| PCT/US98/11422 | Non-provisional of | 60/070,923 | Dec. 18, 1997 |
| 10/100,683 | Continuation-in-part of | PCT/US01/05614 | Feb. 21, 2001 |
| PCT/US01/05614 | Non-provisional of | 60/184,836 | Feb. 24, 2000 |
| PCT/US01/05614 | Non-provisional of | 60/193,170 | Mar. 29, 2000 |
| 10/100,683 | Continuation-in-part of | PCT/US98/12125 | Jun. 11, 1998 |
| PCT/US98/12125 | Non-provisional of | 60/049,547 | Jun. 13, 1997 |
| PCT/US98/12125 | Non-provisional of | 60/049,548 | Jun. 13, 1997 |
| PCT/US98/12125 | Non-provisional of | 60/049,549 | Jun. 13, 1997 |
| PCT/US98/12125 | Non-provisional of | 60/049,550 | Jun. 13, 1997 |
| PCT/US98/12125 | Non-provisional of | 60/049,566 | Jun. 13, 1997 |
| PCT/US98/12125 | Non-provisional of | 60/049,606 | Jun. 13, 1997 |
| PCT/US98/12125 | Non-provisional of | 60/049,607 | Jun. 13, 1997 |
| PCT/US98/12125 | Non-provisional of | 60/049,608 | Jun. 13, 1997 |
| PCT/US98/12125 | Non-provisional of | 60/049,609 | Jun. 13, 1997 |
| PCT/US98/12125 | Non-provisional of | 60/049,610 | Jun. 13, 1997 |
| PCT/US98/12125 | Non-provisional of | 60/049,611 | Jun. 13, 1997 |
| PCT/US98/12125 | Non-provisional of | 60/050,901 | Jun. 13, 1997 |
| PCT/US98/12125 | Non-provisional of | 60/052,989 | Jun. 13, 1997 |
| PCT/US98/12125 | Non-provisional of | 60/051,919 | Jul. 08, 1997 |
| PCT/US98/12125 | Non-provisional of | 60/055,984 | Aug. 18, 1997 |
| PCT/US98/12125 | Non-provisional of | 60/058,665 | Sep. 12, 1997 |
| PCT/US98/12125 | Non-provisional of | 60/058,668 | Sep. 12, 1997 |
| PCT/US98/12125 | Non-provisional of | 60/058,669 | Sep. 12, 1997 |
| PCT/US98/12125 | Non-provisional of | 60/058,750 | Sep. 12, 1997 |
| PCT/US98/12125 | Non-provisional of | 60/058,971 | Sep. 12, 1997 |
| PCT/US98/12125 | Non-provisional of | 60/058,972 | Sep. 12, 1997 |
| PCT/US98/12125 | Non-provisional of | 60/058,975 | Sep. 12, 1997 |
| PCT/US98/12125 | Non-provisional of | 60/060,834 | Oct. 02, 1997 |
| PCT/US98/12125 | Non-provisional of | 60/060,841 | Oct. 02, 1997 |
| PCT/US98/12125 | Non-provisional of | 60/060,844 | Oct. 02, 1997 |
| PCT/US98/12125 | Non-provisional of | 60/060,865 | Oct. 02, 1997 |
| PCT/US98/12125 | Non-provisional of | 60/061,059 | Oct. 02, 1997 |
| PCT/US98/12125 | Non-provisional of | 60/061,060 | Oct. 02, 1997 |
| 10/100,683 | Continuation-in-part of | 09/627,081 | Jul. 27, 2000 |
| 09/627,081 | Continuation of | 09/213,365 | Dec. 17, 1998 |
| 09/213,365 | Continuation-in-part of | PCT/US98/13608 | Jun. 30, 1998 |
| 10/100,683 | Continuation-in-part of | PCT/US98/13608 | Jun. 30, 1998 |
| PCT/US98/13608 | Non-provisional of | 60/051,480 | Jul. 01, 1997 |
| PCT/US98/13608 | Non-provisional of | 60/051,381 | Jul. 01, 1997 |
| PCT/US98/13608 | Non-provisional of | 60/058,663 | Sep. 12, 1997 |
| PCT/US98/13608 | Non-provisional of | 60/058,598 | Sep. 12, 1997 |
| 10/100,683 | Continuation-in-part of | 09/984,490 | Oct. 30, 2001 |
| 09/984,490 | Divisional of | 09/227,357 | Jan. 08, 1999 |
| 09/227,357 | Continuation-in-part of | PCT/US98/13684 | Jul. 07, 1998 |
| 10/100,683 | Continuation-in-part of | 09/983,802 | Oct. 25, 2001 |
| 09/983,802 | Continuation of | 09/227,357 | Oct. 10, 2001 |
| 09/227,357 | Continuation-in-part of | PCT/US98/13684 | Jul. 07, 1998 |
| 10/100,683 | Continuation-in-part of | 09/973,278 | Oct. 10, 2001 |
| 09/973,278 | Non-provisional of | 60/239,899 | Oct. 13, 2000 |
| 09/973,278 | Continuation-in-part of | 09/227,357 | Jan. 08, 19999 |
| 09/227,357 | Continuation-in-part of | PCT/US98/13684 | Jul. 07, 1998 |
| 10/100,683 | Continuation-in-part of | PCT/US98/13684 | Jul. 07, 1998 |
| PCT/US98/13684 | Non-provisional of | 60/051,926 | Jul. 08, 1997 |
| PCT/US98/13684 | Non-provisional of | 60/052,793 | Jul. 08, 1997 |
| PCT/US98/13684 | Non-provisional of | 60/051,925 | Jul. 08, 1997 |
| PCT/US98/13684 | Non-provisional of | 60/051,929 | Jul. 08, 1997 |
| PCT/US98/13684 | Non-provisional of | 60/052,803 | Jul. 08, 1997 |
| PCT/US98/13684 | Non-provisional of | 60/052,732 | Jul. 08, 1997 |
| PCT/US98/13684 | Non-provisional of | 60/051,931 | Jul. 08, 1997 |
| PCT/US98/13684 | Non-provisional of | 60/051,932 | Jul. 08, 1997 |
| PCT/US98/13684 | Non-provisional of | 60/051,916 | Jul. 08, 1997 |
| PCT/US98/13684 | Non-provisional of | 60/051,930 | Jul. 08, 1997 |
| PCT/US98/13684 | Non-provisional of | 60/051,918 | Jul. 08, 1997 |
| PCT/US98/13684 | Non-provisional of | 60/051,920 | Jul. 08, 1997 |
| PCT/US98/13684 | Non-provisional of | 60/052,733 | Jul. 08, 1997 |
| PCT/US98/13684 | Non-provisional of | 60/052,795 | Jul. 08, 1997 |
| PCT/US98/13684 | Non-provisional of | 60/051,919 | Jul. 08, 1997 |
| PCT/US98/13684 | Non-provisional of | 60/051,928 | Jul. 08, 1997 |
| PCT/US98/13684 | Non-provisional of | 60/055,722 | Aug. 18, 1997 |
| PCT/US98/13684 | Non-provisional of | 60/055,723 | Aug. 18, 1997 |
| PCT/US98/13684 | Non-provisional of | 60/055,948 | Aug. 18, 1997 |
| PCT/US98/13684 | Non-provisional of | 60/055,949 | Aug. 18, 1997 |
| PCT/US98/13684 | Non-provisional of | 60/055,953 | Aug. 18, 1997 |
| PCT/US98/13684 | Non-provisional of | 60/055,950 | Aug. 18, 1997 |
| PCT/US98/13684 | Non-provisional of | 60/055,947 | Aug. 18, 1997 |
| PCT/US98/13684 | Non-provisional of | 60/055,964 | Aug. 18, 1997 |
| PCT/US98/13684 | Non-provisional of | 60/056,360 | Aug. 18, 1997 |
| PCT/US98/13684 | Non-provisional of | 60/055,684 | Aug. 18, 1997 |
| PCT/US98/13684 | Non-provisional of | 60/055,984 | Aug. 18, 1997 |
| PCT/US98/13684 | Non-provisional of | 60/055,954 | Aug. 18, 1997 |
| PCT/US98/13684 | Non-provisional of | 60/058,785 | Sep. 12, 1997 |
| PCT/US98/13684 | Non-provisional of | 60/058,664 | Sep. 12, 1997 |
| PCT/US98/13684 | Non-provisional of | 60/058,660 | Sep. 12, 1997 |
| PCT/US98/13684 | Non-provisional of | 60/058,661 | Sep. 12, 1997 |
| 10/100,683 | Continuation-in-part of | 09/776,724 | Feb. 06, 2001 |
| 09/776,724 | Non-provisional of | 60/180,909 | Feb. 08, 2000 |
| 09/776,724 | Continuation-in-part of | 09/669,688 | Sep. 26, 2000 |
| 09/669,688 | Continuation of | 09/229,982 | Jan. 14, 1999 |
| 09/229,982 | Continuation-in-part of | PCT/US98/14613 | Jul. 15, 1998 |
| 10/100,683 | Continuation-in-part of | 09/669,688 | Sep. 26, 2000 |
| 09/669,688 | Continuation of | 09/229,982 | Jan. 14, 1999 |
| 09/229,982 | Continuation-in-part of | PCT/US98/14613 | Jul. 15, 1998 |
| 10/100,683 | Continuation-in-part of | 09/229,982 | Jan. 14, 1999 |
| 09/229,982 | Continuation-in-part of | PCT/US98/14613 | Jul. 15, 1998 |
| 10/100,683 | Continuation-in-part of | PCT/US98/14613 | Jul. 15, 1998 |
| PCT/US98/14613 | Non-provisional of | 60/052,661 | Jul. 16, 1997 |
| PCT/US98/14613 | Non-provisional of | 60/052,872 | Jul. 16, 1997 |
| PCT/US98/14613 | Non-provisional of | 60/052,871 | Jul. 16, 1997 |
| PCT/US98/14613 | Non-provisional of | 60/052,874 | Jul. 16, 1997 |
| PCT/US98/14613 | Non-provisional of | 60/052,873 | Jul. 16, 1997 |
| PCT/US98/14613 | Non-provisional of | 60/052,870 | Jul. 16, 1997 |
| PCT/US98/14613 | Non-provisional of | 60/052,875 | Jul. 16, 1997 |
| PCT/US98/14613 | Non-provisional of | 60/053,440 | Jul. 22, 1997 |
| PCT/US98/14613 | Non-provisional of | 60/053,441 | Jul. 22, 1997 |
| PCT/US98/14613 | Non-provisional of | 60/053,442 | Jul. 22, 1997 |
| PCT/US98/14613 | Non-provisional of | 60/056,359 | Aug. 18, 1997 |
| PCT/US98/14613 | Non-provisional of | 60/055,725 | Aug. 18, 1997 |
| PCT/US98/14613 | Non-provisional of | 60/055,985 | Aug. 18, 1997 |
| PCT/US98/14613 | Non-provisional of | 60/055,952 | Aug. 18, 1997 |
| PCT/US98/14613 | Non-provisional of | 60/055,989 | Aug. 18, 1997 |
| PCT/US98/14613 | Non-provisional of | 60/056,361 | Aug. 18, 1997 |
| PCT/US98/14613 | Non-provisional of | 60/055,726 | Aug. 18, 1997 |
| PCT/US98/14613 | Non-provisional of | 60/055,724 | Aug. 18, 1997 |
| PCT/US98/14613 | Non-provisional of | 60/055,946 | Aug. 18, 1997 |
| PCT/US98/14613 | Non-provisional of | 60/055,683 | Aug. 18, 1997 |
| 10/100,683 | Non-provisional of | 60/295,558 | Jun. 05, 2001 |
| 10/100,683 | Continuation-in-part of | 09/820,649 | Mar. 30, 2001 |
| 09/820,649 | Continuation of | 09/666,984 | Sep. 21, 2000 |
| 09/666,984 | Continuation of | 09/236,557 | Jan. 26, 1999 |
| 09/236,557 | Continuation-in-part of | PCT/US98/15949 | Jul. 29, 1998 |
| 10/100,683 | Continuation-in-part of | PCT/US98/15949 | Jul. 29, 1998 |
| PCT/US98/15949 | Non-provisional of | 60/054,212 | Jul. 30, 1997 |
| PCT/US98/15949 | Non-provisional of | 60/054,209 | Jul. 30, 1997 |
| PCT/US98/15949 | Non-provisional of | 60/054,234 | Jul. 30, 1997 |
| PCT/US98/15949 | Non-provisional of | 60/054,218 | Jul. 30, 1997 |
| PCT/US98/15949 | Non-provisional of | 60/054,214 | Jul. 30, 1997 |
| PCT/US98/15949 | Non-provisional of | 60/054,236 | Jul. 30, 1997 |
| PCT/US98/15949 | Non-provisional of | 60/054,215 | Jul. 30, 1997 |
| PCT/US98/15949 | Non-provisional of | 60/054,211 | Jul. 30, 1997 |
| PCT/US98/15949 | Non-provisional of | 60/054,217 | Jul. 30, 1997 |
| PCT/US98/15949 | Non-provisional of | 60/054,213 | Jul. 30, 1997 |
| PCT/US98/15949 | Non-provisional of | 60/055,968 | Aug. 18, 1997 |
| PCT/US98/15949 | Non-provisional of | 60/055,969 | Aug. 18, 1997 |
| PCT/US98/15949 | Non-provisional of | 60/055,972 | Aug. 18, 1997 |
| PCT/US98/15949 | Non-provisional of | 60/056,561 | Aug. 19, 1997 |
| PCT/US98/15949 | Non-provisional of | 60/056,534 | Aug. 19, 1997 |
| PCT/US98/15949 | Non-provisional of | 60/056,729 | Aug. 19, 1997 |
| PCT/US98/15949 | Non-provisional of | 60/056,543 | Aug. 19, 1997 |
| PCT/US98/15949 | Non-provisional of | 60/056,727 | Aug. 19, 1997 |
| PCT/US98/15949 | Non-provisional of | 60/056,554 | Aug. 19, 1997 |
| PCT/US98/15949 | Non-provisional of | 60/056,730 | Aug. 19, 1997 |
| 10/100,683 | Continuation-in-part of | 09/969,730 | Oct. 04, 2001 |
| 09/969,730 | Continuation-in-part of | 09/774,639 | Feb. 01, 2001 |
| 09/774,639 | Continuation of | 09/244,112 | Feb. 04, 1999 |
| 09/244,112 | Continuation-in-part of | PCT/US98/16235 | Aug. 04, 1998 |
| 10/100,683 | Continuation-in-part of | 09/774,639 | Feb. 01, 2001 |
| 09/774,639 | Continuation of | 09/244,112 | Feb. 04, 1999 |
| 09/244,112 | Continuation-in-part of | PCT/US98/16235 | Aug. 04, 1998 |
| 10/100,683 | Continuation-in-part of | 09/969,730 | Oct. 04, 2001 |
| 09/969,730 | Non-provisional of | 60/238,291 | Oct. 06, 2000 |
| 10/100,683 | Continuation-in-part of | PCT/US98/16235 | Aug. 04, 1998 |
| PCT/US98/16235 | Non-provisional of | 60/055,386 | Aug. 05, 1997 |
| PCT/US98/16235 | Non-provisional of | 60/054,807 | Aug. 05, 1997 |
| PCT/US98/16235 | Non-provisional of | 60/055,312 | Aug. 05, 1997 |
| PCT/US98/16235 | Non-provisional of | 60/055,309 | Aug. 05, 1997 |
| PCT/US98/16235 | Non-provisional of | 60/054,798 | Aug. 05, 1997 |
| PCT/US98/16235 | Non-provisional of | 60/055,310 | Aug. 05, 1997 |
| PCT/US98/16235 | Non-provisional of | 60/054,806 | Aug. 05, 1997 |
| PCT/US98/16235 | Non-provisional of | 60/054,809 | Aug. 05, 1997 |
| PCT/US98/16235 | Non-provisional of | 60/054,804 | Aug. 05, 1997 |
| PCT/US98/16235 | Non-provisional of | 60/054,803 | Aug. 05, 1997 |
| PCT/US98/16235 | Non-provisional of | 60/054,808 | Aug. 05, 1997 |
| PCT/US98/16235 | Non-provisional of | 60/055,311 | Aug. 05, 1997 |
| PCT/US98/16235 | Non-provisional of | 60/055,986 | Aug. 18, 1997 |
| PCT/US98/16235 | Non-provisional of | 60/055,970 | Aug. 18, 1997 |
| PCT/US98/16235 | Non-provisional of | 60/056,563 | Aug. 19, 1997 |
| PCT/US98/16235 | Non-provisional of | 60/056,557 | Aug. 19, 1997 |
| PCT/US98/16235 | Non-provisional of | 60/056,731 | Aug. 19, 1997 |
| PCT/US98/16235 | Non-provisional of | 60/056,365 | Aug. 19, 1997 |
| PCT/US98/16235 | Non-provisional of | 60/056,367 | Aug. 19, 1997 |
| PCT/US98/16235 | Non-provisional of | 60/056,370 | Aug. 19, 1997 |
| PCT/US98/16235 | Non-provisional of | 60/056,364 | Aug. 19, 1997 |
| PCT/US98/16235 | Non-provisional of | 60/056,366 | Aug. 19, 1997 |
| PCT/US98/16235 | Non-provisional of | 60/056,732 | Aug. 19, 1997 |
| PCT/US98/16235 | Non-provisional of | 60/056,371 | Aug. 19, 1997 |
| 10/100,683 | Continuation-in-part of | 09/716,128 | Nov. 17, 2000 |
| 09/716,128 | Continuation of | 09/251,329 | Feb. 17, 1999 |
| 09/251,329 | Continuation-in-part of | PCT/US98/17044 | Aug. 18, 1998 |
| 10/100,683 | Continuation-in-part of | PCT/US98/17044 | Aug. 18, 1998 |
| PCT/US98/17044 | Non-provisional of | 60/056,555 | Aug. 19, 1997 |
| PCT/US98/17044 | Non-provisional of | 60/056,556 | Aug. 19, 1997 |
| PCT/US98/17044 | Non-provisional of | 60/056,535 | Aug. 19, 1997 |
| PCT/US98/17044 | Non-provisional of | 60/056,629 | Aug. 19, 1997 |
| PCT/US98/17044 | Non-provisional of | 60/056,369 | Aug. 19, 1997 |
| PCT/US98/17044 | Non-provisional of | 60/056,628 | Aug. 19, 1997 |
| PCT/US98/17044 | Non-provisional of | 60/056,728 | Aug. 19, 1997 |
| PCT/US98/17044 | Non-provisional of | 60/056,368 | Aug. 19, 1997 |
| PCT/US98/17044 | Non-provisional of | 60/056,726 | Aug. 19, 1997 |
| PCT/US98/17044 | Non-provisional of | 60/089,510 | Jun. 16, 1998 |
| PCT/US98/17044 | Non-provisional of | 60/092,956 | Jul. 15, 1998 |
| 10/100,683 | Continuation-in-part of | 09/729,835 | Dec. 06, 2000 |
| 09/729,835 | Divisional of | 09/257,179 | Feb. 25, 1999 |
| 09/257,179 | Continuation-in-part of | PCT/US98/17709 | Aug. 27, 1998 |
| 10/100,683 | Continuation-in-part of | 09/257,179 | Feb. 25, 1999 |
| 09/257,179 | Continuation-in-part of | PCT/US98/17709 | Aug. 27, 1998 |
| 10/100,683 | Continuation-in-part of | PCT/US98/17709 | Aug. 27, 1998 |
| PCT/US98/17709 | Non-provisional of | 60/056,270 | Aug. 29, 1997 |
| PCT/US98/17709 | Non-provisional of | 60/056,271 | Aug. 29, 1997 |
| PCT/US98/17709 | Non-provisional of | 60/056,247 | Aug. 29, 1997 |
| PCT/US98/17709 | Non-provisional of | 60/056,073 | Aug. 29, 1997 |
| 10/100,683 | Continuation-in-part of | 10/047,021 | Jan. 17, 2002 |
| 10/047,021 | Continuation-in-part of | 09/722,329 | Nov. 28, 2000 |
| 09/722,329 | Continuation of | 09/262,109 | Mar. 04, 1999 |
| 09/262,109 | Continuation-in-part of | PCT/US98/18360 | Sep. 03, 1998 |
| 10/100,683 | Continuation-in-part of | 09/722,329 | Nov. 28, 2000 |
| 09/722,329 | Continuation of | 09/262,109 | Mar. 04, 1999 |
| 09/262,109 | Continuation-in-part of | PCT/US98/18360 | Sep. 03, 1998 |
| 10/100,683 | Continuation-in-part of | PZ016pct2 | Jan. 17, 2002 |
| PZ016pct2 | Non-provisional of | 60/262,066 | Jan. 18, 2001 |
| 10/100,683 | Continuation-in-part of | PCT/US98/18360 | Sep. 03, 1998 |
| PCT/US98/18360 | Non-provisional of | 60/057,626 | Sep. 05, 1997 |
| PCT/US98/18360 | Non-provisional of | 60/057,663 | Sep. 05, 1997 |
| PCT/US98/18360 | Non-provisional of | 60/057,669 | Sep. 05, 1997 |
| PCT/US98/18360 | Non-provisional of | 60/058,667 | Sep. 12, 1997 |
| PCT/US98/18360 | Non-provisional of | 60/058,974 | Sep. 12, 1997 |
| PCT/US98/18360 | Non-provisional of | 60/058,973 | Sep. 12, 1997 |
| PCT/US98/18360 | Non-provisional of | 60/058,666 | Sep. 12, 1997 |
| PCT/US98/18360 | Non-provisional of | 60/090,112 | Jun. 22, 1998 |
| 10/100,683 | Continuation-in-part of | 09/281,976 | Mar. 31, 1999 |
| 09/281,976 | Continuation-in-part of | PCT/US98/20775 | Oct. 01, 1998 |
| 10/100,683 | Continuation-in-part of | PCT/US98/20775 | Oct. 01, 1998 |
| PCT/US98/20775 | Non-provisional of | 60/060,837 | Oct. 02, 1997 |
| PCT/US98/20775 | Non-provisional of | 60/060,862 | Oct. 02, 1997 |
| PCT/US98/20775 | Non-provisional of | 60/060,839 | Oct. 02, 1997 |
| PCT/US98/20775 | Non-provisional of | 60/060,866 | Oct. 02, 1997 |
| PCT/US98/20775 | Non-provisional of | 60/060,843 | Oct. 02, 1997 |
| PCT/US98/20775 | Non-provisional of | 60/060,836 | Oct. 02, 1997 |
| PCT/US98/20775 | Non-provisional of | 60/060,838 | Oct. 02, 1997 |
| PCT/US98/20775 | Non-provisional of | 60/060,874 | Oct. 02, 1997 |
| PCT/US98/20775 | Non-provisional of | 60/060,833 | Oct. 02, 1997 |
| PCT/US98/20775 | Non-provisional of | 60/060,884 | Oct. 02, 1997 |
| PCT/US98/20775 | Non-provisional of | 60/060,880 | Oct. 02, 1997 |
| 10/100,683 | Continuation-in-part of | 09/984,429 | Oct. 30, 2001 |
| 09/984,429 | Non-provisional of | 60/244,591 | Nov. 01, 2000 |
| 09/984,429 | Continuation-in-part of | 09/288,143 | Apr. 08, 1999 |
| 09/288,143 | Continuation-in-part of | PCT/US98/21142 | Oct. 08, 1998 |
| 10/100,683 | Non-provisional of | 60/244,591 | Nov. 01, 2000 |
| 10/100,683 | Continuation-in-part of | 09/288,143 | Apr. 08, 1999 |
| 09/288,143 | Continuation-in-part of | PCT/US98/21142 | Oct. 08, 1998 |
| 10/100,683 | Continuation-in-part of | PCT/US98/21142 | Oct. 08, 1998 |
| PCT/US98/21142 | Non-provisional of | 60/061,463 | Oct. 09, 1997 |
| PCT/US98/21142 | Non-provisional of | 60/061,529 | Oct. 09, 1997 |
| PCT/US98/21142 | Non-provisional of | 60/071,498 | Oct. 09, 1997 |
| PCT/US98/21142 | Non-provisional of | 60/061,527 | Oct. 09, 1997 |
| PCT/US98/21142 | Non-provisional of | 60/061,536 | Oct. 09, 1997 |
| PCT/US98/21142 | Non-provisional of | 60/061,532 | Oct. 09, 1997 |
| 10/100,683 | Continuation-in-part of | 09/296,622 | Apr. 23, 1999 |
| 09/296,622 | Continuation-in-part of | PCT/US98/22376 | Oct. 23, 1998 |
| 10/100,683 | Continuation-in-part of | PCT/US98/22376 | Oct. 23, 1998 |
| PCT/US98/22376 | Non-provisional of | 60/063,099 | Oct. 24, 1997 |
| PCT/US98/22376 | Non-provisional of | 60/063,088 | Oct. 24, 1997 |
| PCT/US98/22376 | Non-provisional of | 60/063,100 | Oct. 24, 1997 |
| PCT/US98/22376 | Non-provisional of | 60/063,387 | Oct. 24, 1997 |
| PCT/US98/22376 | Non-provisional of | 60/063,148 | Oct. 24, 1997 |
| PCT/US98/22376 | Non-provisional of | 60/063,386 | Oct. 24, 1997 |
| PCT/US98/22376 | Non-provisional of | 60/062,784 | Oct. 24, 1997 |
| PCT/US98/22376 | Non-provisional of | 60/063,091 | Oct. 24, 1997 |
| PCT/US98/22376 | Non-provisional of | 60/063,090 | Oct. 24, 1997 |
| PCT/US98/22376 | Non-provisional of | 60/063,089 | Oct. 24, 1997 |
| PCT/US98/22376 | Non-provisional of | 60/063,092 | Oct. 24, 1997 |
| PCT/US98/22376 | Non-provisional of | 60/063,111 | Oct. 24, 1997 |
| PCT/US98/22376 | Non-provisional of | 60/063,101 | Oct. 24, 1997 |
| PCT/US98/22376 | Non-provisional of | 60/063,109 | Oct. 24, 1997 |
| PCT/US98/22376 | Non-provisional of | 60/063,110 | Oct. 24, 1997 |
| PCT/US98/22376 | Non-provisional of | 60/063,098 | Oct. 24, 1997 |
| PCT/US98/22376 | Non-provisional of | 60/063,097 | Oct. 24, 1997 |
| 10/100,683 | Continuation-in-part of | 09/974,879 | Oct. 12, 2001 |
| 09/974,879 | Non-provisional of | 60/239,893 | Oct. 13, 2000 |
| 09/974,879 | Continuation-in-part of | 09/818,683 | Mar. 28, 2001 |
| 09/818,683 | Continuation of | 09/305,736 | May 05, 1999 |
| 09/305,736 | Continuation-in-part of | PCT/US98/23435 | Nov. 04, 1998 |
| 10/100,683 | Continuation-in-part of | 09/818,683 | Mar. 28, 2001 |
| 09/818,683 | Continuation of | 09/305,736 | May 05, 1999 |
| 09/305,736 | Continuation-in-part of | PCT/US98/23435 | Nov. 04, 1998 |
| 10/100,683 | Continuation-in-part of | 09/305,736 | May 05, 1999 |
| 09/305,736 | Continuation-in-part of | PCT/US98/23435 | Nov. 04, 1998 |
| 10/100,683 | Continuation-in-part of | PCT/US98/23435 | Nov. 04, 1998 |
| PCT/US98/23435 | Non-provisional of | 60/064,911 | Nov. 07, 1997 |
| PCT/US98/23435 | Non-provisional of | 60/064,912 | Nov. 07, 1997 |
| PCT/US98/23435 | Non-provisional of | 60/064,983 | Nov. 07, 1997 |
| PCT/US98/23435 | Non-provisional of | 60/064,900 | Nov. 07, 1997 |
| PCT/US98/23435 | Non-provisional of | 60/064,988 | Nov. 07, 1997 |
| PCT/US98/23435 | Non-provisional of | 60/064,987 | Nov. 07, 1997 |
| PCT/US98/23435 | Non-provisional of | 60/064,908 | Nov. 07, 1997 |
| PCT/US98/23435 | Non-provisional of | 60/064,984 | Nov. 07, 1997 |
| PCT/US98/23435 | Non-provisional of | 60/064,985 | Nov. 07, 1997 |
| PCT/US98/23435 | Non-provisional of | 60/066,094 | Nov. 17, 1997 |
| PCT/US98/23435 | Non-provisional of | 60/066,100 | Nov. 17, 1997 |
| PCT/US98/23435 | Non-provisional of | 60/066,089 | Nov. 17, 1997 |
| PCT/US98/23435 | Non-provisional of | 60/066,095 | Nov. 17, 1997 |
| PCT/US98/23435 | Non-provisional of | 60/066,090 | Nov. 17, 1997 |
| 10/100,683 | Continuation-in-part of | 09/334,595 | Jun. 17, 1999 |
| 09/334,595 | Continuation-in-part of | PCT/US98/27059 | Dec. 17, 1998 |
| 10/100,683 | Continuation-in-part of | PCT/US98/27059 | Dec. 17, 1998 |
| PCT/US98/27059 | Non-provisional of | 60/070,923 | Dec. 18, 1997 |
| PCT/US98/27059 | Non-provisional of | 60/068,007 | Dec. 18, 1997 |
| PCT/US98/27059 | Non-provisional of | 60/068,057 | Dec. 18, 1997 |
| PCT/US98/27059 | Non-provisional of | 60/068,006 | Dec. 18, 1997 |
| PCT/US98/27059 | Non-provisional of | 60/068,369 | Dec. 19, 1997 |
| PCT/US98/27059 | Non-provisional of | 60/068,367 | Dec. 19, 1997 |
| PCT/US98/27059 | Non-provisional of | 60/068,368 | Dec. 19, 1997 |
| PCT/US98/27059 | Non-provisional of | 60/068,169 | Dec. 19, 1997 |
| PCT/US98/27059 | Non-provisional of | 60/068,053 | Dec. 18, 1997 |
| PCT/US98/27059 | Non-provisional of | 60/068,064 | Dec. 18, 1997 |
| PCT/US98/27059 | Non-provisional of | 60/068,054 | Dec. 18, 1997 |
| PCT/US98/27059 | Non-provisional of | 60/068,008 | Dec. 18, 1997 |
| PCT/US98/27059 | Non-provisional of | 60/068,365 | Dec. 19, 1997 |
| 10/100,683 | Continuation-in-part of | 09/938,671 | Aug. 27, 2001 |
| 09/938,671 | Continuation of | 09/739,907 | Dec. 20, 2000 |
| 09/739,907 | Continuation of | 09/348,457 | Jul. 07, 1999 |
| 09/348,457 | Continuation-in-part of | PCT/US99/00108 | Jan. 06, 1999 |
| 10/100,683 | Continuation-in-part of | 09/739,907 | Dec. 20, 2000 |
| 09/739,907 | Continuation of | 09/348,457 | Jul. 07, 1999 |
| 09/348,457 | Continuation-in-part of | PCT/US99/00108 | Jan. 06, 1999 |
| 10/100,683 | Continuation-in-part of | 09/348,457 | Jul. 07, 1999 |
| 09/348,457 | Continuation-in-part of | PCT/US99/00108 | Jan. 06, 1999 |
| 10/100,683 | Continuation-in-part of | PCT/US99/00108 | Jan. 06, 1999 |
| PCT/US99/00108 | Non-provisional of | 60/070,704 | Jan. 07, 1998 |
| PCT/US99/00108 | Non-provisional of | 60/070,658 | Jan. 07, 1998 |
| PCT/US99/00108 | Non-provisional of | 60/070,692 | Jan. 07, 1998 |
| PCT/US99/00108 | Non-provisional of | 60/070,657 | Jan. 07, 1998 |
| 10/100,683 | Continuation-in-part of | 09/949,925 | Sep. 21, 2001 |
| 09/949,925 | Non-provisional of | 60/232,150 | Sep. 12, 2000 |
| 09/949,925 | Continuation-in-part of | PCT/US99/01621 | Jan. 27, 1999 |
| 09/949,925 | Continuation-in-part of | 09/363,044 | Jul. 29, 1999 |
| 09/363,044 | Continuation-in-part of | PCT/US99/01621 | Jan. 27, 1999 |
| 10/100,683 | Continuation-in-part of | 09/813,153 | Mar. 21, 2001 |
| 09/813,153 | Continuation of | 09/363,044 | Jul. 29, 1999 |
| 09/363,044 | Continuation-in-part of | PCT/US99/01621 | Jan. 27, 1999 |
| 10/100,683 | Continuation-in-part of | 09/363,044 | Jul. 29, 1999 |
| 09/363,044 | Continuation-in-part of | PCT/US99/01621 | Jan. 27, 1999 |
| 10/100,683 | Continuation-in-part of | PCT/US99/01621 | Jan. 27, 1999 |
| PCT/US99/01621 | Non-provisional of | 60/073,170 | Jan. 30, 1998 |
| PCT/US99/01621 | Non-provisional of | 60/073,167 | Jan. 30, 1998 |
| PCT/US99/01621 | Non-provisional of | 60/073,165 | Jan. 30, 1998 |
| PCT/US99/01621 | Non-provisional of | 60/073,164 | Jan. 30, 1998 |
| PCT/US99/01621 | Non-provisional of | 60/073,162 | Jan. 30, 1998 |
| PCT/US99/01621 | Non-provisional of | 60/073,161 | Jan. 30, 1998 |
| PCT/US99/01621 | Non-provisional of | 60/073,160 | Jan. 30, 1998 |
| PCT/US99/01621 | Non-provisional of | 60/073,159 | Jan. 30, 1998 |
| 10/100,683 | Continuation-in-part of | 10/062,548 | Feb. 05, 2002 |
| 10/062,548 | Continuation of | 09/369,247 | Aug. 05, 1999 |
| 09/369,247 | Continuation-in-part of | PCT/US99/02293 | Feb. 04, 1999 |
| 10/100,683 | Continuation-in-part of | 09/369,247 | Aug. 05, 1999 |
| 09/369,247 | Continuation-in-part of | PCT/US99/02293 | Feb. 04, 1999 |
| 10/100,683 | Continuation-in-part of | PCT/US99/02293 | Feb. 04, 1999 |
| PCT/US99/02293 | Non-provisional of | 60/074,118 | Feb. 09, 1998 |
| PCT/US99/02293 | Non-provisional of | 60/074,157 | Feb. 09, 1998 |
| PCT/US99/02293 | Non-provisional of | 60/074,037 | Feb. 09, 1998 |
| PCT/US99/02293 | Non-provisional of | 60/074,141 | Feb. 09, 1998 |
| PCT/US99/02293 | Non-provisional of | 60/074,341 | Feb. 09, 1998 |
| 10/100,683 | Continuation-in-part of | 09/716,129 | Nov. 17, 2000 |
| 09/716,129 | Continuation-in-part of | PCT/US99/03939 | Feb. 24, 1999 |
| 09/716,129 | CON | 09/382,572 | Aug. 25, 1999 |
| 09/382,572 | Continuation-in-part of | PCT/US99/03939 | Feb. 24, 1999 |
| 10/100,683 | Continuation-in-part of | PCT/US99/03939 | Feb. 24, 1999 |
| PCT/US99/03939 | Non-provisional of | 60/076,053 | Feb. 26, 1998 |
| PCT/US99/03939 | Non-provisional of | 60/076,051 | Feb. 26, 1998 |
| PCT/US99/03939 | Non-provisional of | 60/076,054 | Feb. 26, 1998 |
| PCT/US99/03939 | Non-provisional of | 60/076,052 | Feb. 26, 1998 |
| PCT/US99/03939 | Non-provisional of | 60/076,057 | Feb. 26, 1998 |
| 10/100,683 | Continuation-in-part of | 09/798,889 | Mar. 06, 2001 |
| 09/798,889 | CON | 09/393,022 | Sep. 09, 1999 |
| 09/393,022 | Continuation-in-part of | PCT/US99/05721 | Mar. 11, 1999 |
| 10/100,683 | Continuation-in-part of | PCT/US99/05721 | Mar. 11, 1999 |
| PCT/US99/05721 | Non-provisional of | 60/077,714 | Mar. 12, 1998 |
| PCT/US99/05721 | Non-provisional of | 60/077,686 | Mar. 12, 1998 |
| PCT/US99/05721 | Non-provisional of | 60/077,687 | Mar. 12, 1998 |
| PCT/US99/05721 | Non-provisional of | 60/077,696 | Mar. 12, 1998 |
| 10/100,683 | Continuation-in-part of | 09/397,945 | Sep. 17, 1999 |
| 09/397,945 | Continuation-in-part of | PCT/US99/05804 | Mar. 18, 1999 |
| 10/100,683 | Continuation-in-part of | PCT/US99/05804 | Mar. 18, 1999 |
| PCT/US99/05804 | Non-provisional of | 60/078,566 | Mar. 19, 1998 |
| PCT/US99/05804 | Non-provisional of | 60/078,576 | Mar. 19, 1998 |
| PCT/US99/05804 | Non-provisional of | 60/078,573 | Mar. 19, 1998 |
| PCT/US99/05804 | Non-provisional of | 60/078,574 | Mar. 19, 1998 |
| PCT/US99/05804 | Non-provisional of | 60/078,579 | Mar. 19, 1998 |
| PCT/US99/05804 | Non-provisional of | 60/080,314 | Apr. 01, 1998 |
| PCT/US99/05804 | Non-provisional of | 60/080,312 | Apr. 01, 1998 |
| PCT/US99/05804 | Non-provisional of | 60/078,578 | Mar. 19, 1998 |
| PCT/US99/05804 | Non-provisional of | 60/078,581 | Mar. 19, 1998 |
| PCT/US99/05804 | Non-provisional of | 60/078,577 | Mar. 19, 1998 |
| PCT/US99/05804 | Non-provisional of | 60/078,563 | Mar. 19, 1998 |
| PCT/US99/05804 | Non-provisional of | 60/080,313 | Apr. 01, 1998 |
| 10/100,683 | Continuation-in-part of | 09/948,783 | Sep. 10, 2001 |
| 09/948,783 | Non-provisional of | 60/231,846 | Sep. 11, 2000 |
| 09/948,783 | Continuation-in-part of | 09/892,877 | Jun. 28, 2001 |
| 09/892,877 | Continuation of | 09/437,658 | Nov. 10, 1999 |
| 09/437,658 | Continuation-in-part of | PCT/US99/09847 | May 06, 1999 |
| 10/100,683 | Continuation-in-part of | 09/892,877 | Jun. 28, 2001 |
| 09/892,877 | Continuation of | 09/437,658 | Nov. 10, 1999 |
| 09/437,658 | Continuation-in-part of | PCT/US99/09847 | May 06, 1999 |
| 10/100,683 | Continuation-in-part of | PCT/US99/09847 | May 06, 1999 |
| PCT/US99/09847 | Non-provisional of | 60/085,093 | May 12, 1998 |
| PCT/US99/09847 | Non-provisional of | 60/085,094 | May 12, 1998 |
| PCT/US99/09847 | Non-provisional of | 60/085,105 | May 12, 1998 |
| PCT/US99/09847 | Non-provisional of | 60/085,180 | May 12, 1998 |
| PCT/US99/09847 | Non-provisional of | 60/085,927 | May 18, 1998 |
| PCT/US99/09847 | Non-provisional of | 60/085,906 | May 18, 1998 |
| PCT/US99/09847 | Non-provisional of | 60/085,920 | May 18, 1998 |
| PCT/US99/09847 | Non-provisional of | 60/085,924 | May 18, 1998 |
| PCT/US99/09847 | Non-provisional of | 60/085,922 | May 18, 1998 |
| PCT/US99/09847 | Non-provisional of | 60/085,923 | May 18, 1998 |
| PCT/US99/09847 | Non-provisional of | 60/085,921 | May 18, 1998 |
| PCT/US99/09847 | Non-provisional of | 60/085,925 | May 18, 1998 |
| PCT/US99/09847 | Non-provisional of | 60/085,928 | May 18, 1998 |
| 10/100,683 | Continuation-in-part of | 10/050,873 | Jan. 18, 2002 |
| 10/050,873 | Non-provisional of | 60/263,681 | Jan. 24, 2001 |
| 10/050,873 | Non-provisional of | 60/263,230 | Jan. 23, 2001 |
| 10/050,873 | Continuation-in-part of | 09/461,325 | Dec. 14, 1999 |
| 09/461,325 | Continuation-in-part of | PCT/US99/13418 | Jun. 15, 1999 |
| 10/100,683 | Continuation-in-part of | 10/012,542 | Dec. 12, 2001 |
| 10/012,542 | Divisional of | 09/461,325 | Dec. 14, 1999 |
| 09/461,325 | Continuation-in-part of | PCT/US99/13418 | Jun. 15, 1999 |
| 10/100,683 | Continuation-in-part of | 09/461,325 | Dec. 14, 1999 |
| 09/461,325 | Continuation-in-part of | PCT/US99/13418 | Jun. 15, 1999 |
| 10/100,683 | Continuation-in-part of | PCT/US99/13418 | Jun. 15, 1999 |
| PCT/US99/13418 | Non-provisional of | 60/089,507 | Jun. 16, 1998 |
| PCT/US99/13418 | Non-provisional of | 60/089,508 | Jun. 16, 1998 |
| PCT/US99/13418 | Non-provisional of | 60/089,509 | Jun. 16, 1998 |
| PCT/US99/13418 | Non-provisional of | 60/089,510 | Jun. 16, 1998 |
| PCT/US99/13418 | Non-provisional of | 60/090,112 | Jun. 22, 1998 |
| PCT/US99/13418 | Non-provisional of | 60/090,113 | Jun. 22, 1998 |
| 10/100,683 | Continuation-in-part of | 09/984,271 | Oct. 29, 2001 |
| 09/984,271 | Divisional of | 09/482,273 | Jan. 13, 2000 |
| 09/482,273 | Continuation-in-part of | PCT/US99/15849 | Jul. 14, 1999 |
| 10/100,683 | Continuation-in-part of | 09/984,276 | Oct. 29, 2001 |
| 09/984,276 | Divisional of | 09/482,273 | Jan. 13, 2000 |
| 09/482,273 | Continuation-in-part of | PCT/US99/15849 | Jul. 14, 1999 |
| 10/100,683 | Continuation-in-part of | 09/482,273 | Jan. 13, 2000 |
| 09/482,273 | Continuation-in-part of | PCT/US99/15849 | Jul. 14, 1999 |
| 10/100,683 | Continuation-in-part of | PCT/US99/15849 | Jul. 14, 1999 |
| PCT/US99/15849 | Non-provisional of | 60/092,921 | Jul. 15, 1998 |
| PCT/US99/15849 | Non-provisional of | 60/092,922 | Jul. 15, 1998 |
| PCT/US99/15849 | Non-provisional of | 60/092,956 | Jul. 15, 1998 |
| 10/100,683 | Continuation-in-part of | PCT/US01/29871 | Sep. 24, 2001 |
| PCT/US01/29871 | Non-provisional of | 60/234,925 | Sep. 25, 2000 |
| PCT/US01/29871 | Continuation-in-part of | PCT/US01/00911 | Jan. 12, 2001 |
| 10/100,683 | Continuation-in-part of | PCT/US01/00911 | Jan. 12, 2001 |
| PCT/US01/00911 | Continuation-in-part of | 09/482,273 | Jan. 13, 2000 |
| 10/100,683 | Non-provisional of | 60/350,898 | Jan. 25, 2002 |
| 10/100,683 | Continuation-in-part of | 09/489,847 | Jan. 24, 2000 |
| 09/489,847 | Continuation-in-part of | PCT/US99/17130 | Jul. 29, 1999 |
| 10/100,683 | Continuation-in-part of | PCT/US99/17130 | Jul. 29, 1999 |
| PCT/US99/17130 | Non-provisional of | 60/094,657 | Jul. 30, 1998 |
| PCT/US99/17130 | Non-provisional of | 60/095,486 | Aug. 05, 1998 |
| PCT/US99/17130 | Non-provisional of | 60/096,319 | Aug. 12, 1998 |
| PCT/US99/17130 | Non-provisional of | 60/095,454 | Aug. 06, 1998 |
| PCT/US99/17130 | Non-provisional of | 60/095,455 | Aug. 06, 1998 |
| 10/100,683 | Continuation-in-part of | 10/054,988 | Jan. 25, 2002 |
| 10/054,988 | Continuation of | 09/904,615 | Jul. 16, 2001 |
| 09/904,615 | Continuation of | 09/739,254 | Dec. 19, 2000 |
| 09/739,254 | Continuation of | 09/511,554 | Feb. 23, 2000 |
| 09/511,554 | Continuation-in-part of | PCT/US99/19330 | Aug. 24, 1999 |
| 10/100,683 | Continuation-in-part of | 09/904,615 | Jul. 16, 2001 |
| 09/904,615 | Continuation of | 09/739,254 | Dec. 19, 2000 |
| 09/739,254 | Continuation of | 09/511,554 | Feb. 23, 2000 |
| 09/511,554 | Continuation-in-part of | PCT/US99/19330 | Aug. 24, 1999 |
| 10/100,683 | Continuation-in-part of | PCT/US99/19330 | Aug. 24, 1999 |
| PCT/US99/19330 | Non-provisional of | 60/097,917 | Aug. 25, 1998 |
| PCT/US99/19330 | Non-provisional of | 60/098,634 | Aug. 31, 1998 |
| 10/100,683 | Continuation-in-part of | 09/820,893 | Mar. 30, 2001 |
| 09/820,893 | Continuation of | 09/531,119 | Mar. 20, 2000 |
| 09/531,119 | Continuation-in-part of | PCT/US99/22012 | Sep. 22, 1999 |
| 10/100,683 | Continuation-in-part of | PCT/US99/22012 | Sep. 22, 1999 |
| PCT/US99/22012 | Non-provisional of | 60/101,546 | Sep. 23, 1998 |
| PCT/US99/22012 | Non-provisional of | 60/102,895 | Oct. 02, 1998 |
| 10/100,683 | Continuation-in-part of | 09/948,820 | Sep. 10, 2001 |
| 09/948,820 | Continuation of | 09/565,391 | May 05, 2000 |
| 09/565,391 | Continuation-in-part of | PCT/US99/26409 | Nov. 09, 1999 |
| 10/100,683 | Continuation-in-part of | 09/565,391 | May 05, 2000 |
| 09/565,391 | Continuation-in-part of | PCT/US99/26409 | Nov. 09, 1999 |
| 10/100,683 | Continuation-in-part of | PCT/US99/26409 | Nov. 09, 1999 |
| PCT/US99/26409 | Non-provisional of | 60/108,207 | Nov. 12, 1998 |
| 10/100,683 | Continuation-in-part of | 09/895,298 | Jul. 02, 2001 |
| 09/895,298 | Continuation of | 09/591,316 | Jun. 09, 2000 |
| 09/591,316 | Continuation-in-part of | PCT/US99/29950 | Dec. 16, 1999 |
| 10/100,683 | Continuation-in-part of | PCT/US99/29950 | Dec. 16, 1999 |
| PCT/US99/29950 | Non-provisional of | 60/113,006 | Dec. 18, 1998 |
| PCT/US99/29950 | Non-provisional of | 60/112,809 | Dec. 17, 1998 |
| 10/100,683 | Continuation-in-part of | 09/985,153 | Nov. 01, 2001 |
| 09/985,153 | Continuation of | 09/618,150 | Jul. 17, 2000 |
| 09/618,150 | Continuation-in-part of | PCT/US00/00903 | Jan. 18, 2000 |
| 10/100,683 | Continuation-in-part of | PCT/US00/00903 | Jan. 18, 2000 |
| PCT/US00/00903 | Non-provisional of | 60/116,330 | Jan. 19, 1999 |
| 10/100,683 | Continuation-in-part of | 09/997,131 | Nov. 30, 2001 |
| 09/997,131 | Continuation of | 09/628,508 | Jul. 28, 2000 |
| 09/628,508 | Continuation-in-part of | PCT/US00/03062 | Feb. 08, 2000 |
| 10/100,683 | Continuation-in-part of | PCT/US00/03062 | Feb. 08, 2000 |
| PCT/US00/03062 | Non-provisional of | 60/119,468 | Feb. 10, 1999 |
| 10/100,683 | Continuation-in-part of | 10/050,882 | Jan. 18, 2002 |
| 10/050,882 | Continuation of | 09/661,453 | Sep. 13, 2000 |
| 09/661,453 | Continuation-in-part of | PCT/US00/06783 | Mar. 16, 2000 |
| 10/100,683 | Continuation-in-part of | 09/661,453 | Sep. 13, 2000 |
| 09/661,453 | Continuation-in-part of | PCT/US00/06783 | Mar. 16, 2000 |
| 10/100,683 | Continuation-in-part of | PCT/US00/06783 | Mar. 16, 2000 |
| PCT/US00/06783 | Non-provisional of | 60/125,055 | Mar. 18, 1999 |
| 10/100,683 | Continuation-in-part of | 10/050,704 | Jan. 18, 2002 |
| 10/050,704 | Continuation of | 09/684,524 | Oct. 10, 2000 |
| 09/684,524 | Continuation-in-part of | PCT/US00/08979 | Apr. 06, 2000 |
| 10/100,683 | Continuation-in-part of | 09/684,524 | Oct. 10, 2000 |
| 09/684,524 | Continuation-in-part of | PCT/US00/08979 | Apr. 06, 2000 |
| 10/100,683 | Continuation-in-part of | PCT/US00/08979 | Apr. 06, 2000 |
| PCT/US00/08979 | Non-provisional of | 60/128,693 | Apr. 09, 1999 |
| PCT/US00/08979 | Non-provisional of | 60/130,991 | Apr. 26, 1999 |
| 10/100,683 | Continuation-in-part of | 10/042,141 | Jan. 11, 2002 |
| 10/042,141 | Continuation of | 09/726,643 | Dec. 01, 2000 |
| 09/726,643 | Continuation-in-part of | PCT/US00/15187 | Jun. 02, 2000 |
| 10/100,683 | Continuation-in-part of | 09/726,643 | Dec. 01, 2000 |
| 09/726,643 | Continuation-in-part of | PCT/US00/15187 | Jun. 02, 2000 |
| 10/100,683 | Continuation-in-part of | PCT/US00/15187 | Jun. 02, 2000 |
| PCT/US00/15187 | Non-provisional of | 60/137,725 | Jun. 07, 1999 |
| 10/100,683 | Continuation-in-part of | 09/756,168 | Jan. 09, 2001 |
| 09/756,168 | Continuation-in-part of | PCT/US00/19735 | Jul. 23, 1999 |
| 10/100,683 | Continuation-in-part of | PCT/US00/19735 | Jul. 20, 2000 |
| PCT/US00/19735 | Non-provisional of | 60/145,220 | Jul. 23, 1999 |
| 10/100,683 | Continuation-in-part of | PZ042P1C1 | Feb. 01, 2002 |
| PZ042P1C1 | Continuation of | 09/781,417 | Feb. 13, 2001 |
| 09/781,417 | Continuation-in-part of | PCT/US00/22325 | Aug. 16, 2000 |
| 10/100,683 | Continuation-in-part of | 09/781,417 | Feb. 13, 2001 |
| 09/781,417 | Continuation-in-part of | PCT/US00/22325 | Aug. 16, 2000 |
| 10/100,683 | Continuation-in-part of | PCT/US00/22325 | Aug. 16, 2000 |
| PCT/US00/22325 | Non-provisional of | 60/149,182 | Aug. 17, 1999 |
| 10/100,683 | Continuation-in-part of | 09/789,561 | Feb. 22, 2001 |
| 09/789,561 | Continuation-in-part of | PCT/US00/24008 | Aug. 31, 2000 |
| 10/100,683 | Continuation-in-part of | PCT/US00/24008 | Aug. 31, 2000 |
| PCT/US00/24008 | Non-provisional of | 60/152,315 | Sep. 03, 1999 |
| PCT/US00/24008 | Non-provisional of | 60/152,317 | Sep. 03, 1999 |
| 10/100,683 | Continuation-in-part of | 09/800,729 | Mar. 08, 2001 |
| 09/800,729 | Continuation-in-part of | PCT/US00/26013 | Sep. 22, 2000 |
| 10/100,683 | Continuation-in-part of | PCT/US00/26013 | Sep. 22, 2000 |
| PCT/US00/26013 | Non-provisional of | 60/155,709 | Sep. 24, 1999 |
| 10/100,683 | Continuation-in-part of | 09/832,129 | Apr. 11, 2001 |
| 09/832,129 | Continuation-in-part of | PCT/US00/28664 | Oct. 17, 2000 |
| 10/100,683 | Continuation-in-part of | PCT/US00/28664 | Oct. 17, 2000 |
| PCT/US00/28664 | Non-provisional of | 60/163,085 | Nov. 02, 1999 |
| PCT/US00/28664 | Non-provisional of | 60/172,411 | Dec. 17, 1999 |
| 10/100,683 | Continuation-in-part of | PCT/US00/29363 | Oct. 25, 2000 |
| PCT/US00/29363 | Non-provisional of | 60/215,139 | Jun. 30, 2000 |
| PCT/US00/29363 | Non-provisional of | 60/162,239 | Oct. 29, 1999 |
| 10/100,683 | Continuation-in-part of | PCT/US00/29360 | Oct. 25, 2000 |
| PCT/US00/29360 | Non-provisional of | 60/215,138 | Jun. 30, 2000 |
| PCT/US00/29360 | Non-provisional of | 60/162,211 | Oct. 29, 1999 |
| 10/100,683 | Continuation-in-part of | PCT/US00/29362 | Oct. 25, 2000 |
| PCT/US00/29362 | Non-provisional of | 60/215,131 | Jun. 30, 2000 |
| PCT/US00/29362 | Non-provisional of | 60/162,240 | Oct. 29, 1999 |
| 10/100,683 | Continuation-in-part of | PCT/US00/29365 | Oct. 25, 2000 |
| PCT/US00/29365 | Non-provisional of | 60/219,666 | Jul. 21, 2000 |
| PCT/US00/29365 | Non-provisional of | 60/162,237 | Oct. 29, 1999 |
| 10/100,683 | Continuation-in-part of | PCT/US00/29364 | Oct. 25, 2000 |
| PCT/US00/29364 | Non-provisional of | 60/215,134 | Jun. 30, 2000 |
| PCT/US00/29364 | Non-provisional of | 60/162,238 | Oct. 29, 1999 |
| 10/100,683 | Continuation-in-part of | PCT/US00/30040 | Nov. 01, 2000 |
| PCT/US00/30040 | Non-provisional of | 60/215,130 | Jun. 30, 2000 |
| PCT/US00/30040 | Non-provisional of | 60/163,580 | Nov. 05, 1999 |
| 10/100,683 | Continuation-in-part of | PCT/US00/30037 | Nov. 01, 2000 |
| PCT/US00/30037 | Non-provisional of | 60/215,137 | Jun. 30, 2000 |
| PCT/US00/30037 | Non-provisional of | 60/163,577 | Nov. 05, 1999 |
| 10/100,683 | Continuation-in-part of | PCT/US00/30045 | Nov. 01, 2000 |
| PCT/US00/30045 | Non-provisional of | 60/215,133 | Jun. 30, 2000 |
| PCT/US00/30045 | Non-provisional of | 60/163,581 | Nov. 05, 1999 |
| 10/100,683 | Continuation-in-part of | PCT/US00/30036 | Nov. 01, 2000 |
| PCT/US00/30036 | Non-provisional of | 60/221,366 | Jul. 27, 2000 |
| PCT/US00/30036 | Non-provisional of | 60/163,576 | Nov. 05, 1999 |
| 10/100,683 | Continuation-in-part of | PCT/US00/30039 | Nov. 01, 2000 |
| PCT/US00/30039 | Non-provisional of | 60/221,367 | Jul. 27, 2000 |
| PCT/US00/30039 | Non-provisional of | 60/195,296 | Apr. 07, 2000 |
| PCT/US00/30039 | Non-provisional of | 60/164,344 | Nov. 09, 1999 |
| 10/100,683 | Continuation-in-part of | PCT/US00/30654 | Nov. 08, 2000 |
| PCT/US00/30654 | Non-provisional of | 60/221,142 | Jul. 27, 2000 |
| PCT/US00/30654 | Non-provisional of | 60/164,835 | Nov. 12, 1999 |
| 10/100,683 | Continuation-in-part of | PCT/US00/30628 | Nov. 08, 2000 |
| PCT/US00/30628 | Non-provisional of | 60/215,140 | Jun. 30, 2000 |
| PCT/US00/30628 | Non-provisional of | 60/164,744 | Nov. 12, 1999 |
| 10/100,683 | Continuation-in-part of | PCT/US00/30653 | Nov. 08, 2000 |
| PCT/US00/30653 | Non-provisional of | 60/221,193 | Jul. 27, 2000 |
| PCT/US00/30653 | Non-provisional of | 60/164,735 | Nov. 12, 1999 |
| 10/100,683 | Continuation-in-part of | PCT/US00/30629 | Nov. 08, 2000 |
| PCT/US00/30629 | Non-provisional of | 60/222,904 | Aug. 03, 2000 |
| PCT/US00/30629 | Non-provisional of | 60/164,825 | Nov. 12, 1999 |
| 10/100,683 | Continuation-in-part of | PCT/US00/30679 | Nov. 08, 2000 |
| PCT/US00/30679 | Non-provisional of | 60/224,007 | Aug. 04, 2000 |
| PCT/US00/30679 | Non-provisional of | 60/164,834 | Nov. 12, 1999 |
| 10/100,683 | Continuation-in-part of | PCT/US00/30674 | Nov. 08, 2000 |
| PCT/US00/30674 | Non-provisional of | 60/215,128 | Jun. 30, 2000 |
| PCT/US00/30674 | Non-provisional of | 60/164,750 | Nov. 12, 1999 |
| 10/100,683 | Continuation-in-part of | PCT/US00/31162 | Nov. 15, 2000 |
| 60/215,136 | Non-provisional of | 60/215,136 | Jun. 30, 2000 |
| 60/215,136 | Non-provisional of | 60/166,415 | Nov. 19, 1999 |
| 10/100,683 | Continuation-in-part of | PCT/US00/31282 | Nov. 15, 2000 |
| PCT/US00/31282 | Non-provisional of | 60/219,665 | Jul. 21, 2000 |
| PCT/US00/31282 | Non-provisional of | 60/166,414 | Nov. 19, 1999 |
| 10/100,683 | Continuation-in-part of | PCT/US00/30657 | Nov. 08, 2000 |
| PCT/US00/30657 | Non-provisional of | 60/215,132 | Jun. 30, 2000 |
| PCT/US00/30657 | Non-provisional of | 60/164,731 | Nov. 12, 1999 |
| 10/100,683 | Continuation-in-part of | PCT/US01/01396 | Jan. 17, 2001 |
| 60/256,968 | Non-provisional of | 60/256,968 | Dec. 21, 2000 |
| 60/256,968 | Non-provisional of | 60/226,280 | Aug. 18, 2000 |
| 10/100,683 | Continuation-in-part of | PCT/US01/01387 | Jan. 17, 2001 |
| 60/259,803 | Non-provisional of | 60/259,803 | Jan. 05, 2001 |
| 60/259,803 | Non-provisional of | 60/226,380 | Aug. 18, 2000 |
| 10/100,683 | Continuation-in-part of | PCT/US01/01567 | Jan. 17, 2001 |
| PCT/US01/01567 | Non-provisional of | 60/228,084 | Aug. 28, 2000 |
| 10/100,683 | Continuation-in-part of | PCT/US01/01431 | Jan. 17, 2001 |
| PCT/US01/01431 | Non-provisional of | 60/231,968 | Sep. 12, 2000 |
| PCT/US01/01431 | Continuation-in-part of | 09/915,582 | Jul. 27, 2001 |
| 10/100,683 | Continuation-in-part of | PCT/US01/01432 | Jan. 17, 2001 |
| PCT/US01/01432 | Non-provisional of | 60/236,326 | Sep. 29, 2000 |
| 10/100,683 | Continuation-in-part of | PCT/US01/00544 | Jan. 09, 2001 |
| PCT/US01/00544 | Non-provisional of | 60/234,211 | Sep. 20, 2000 |
| 10/100,683 | Continuation-in-part of | PCT/US01/01435 | Jan. 17, 2001 |
| PCT/US01/01435 | Non-provisional of | 60/226,282 | Aug. 18, 2000 |
| 10/100,683 | Continuation-in-part of | PCT/US01/01386 | Jan. 17, 2001 |
| PCT/US01/01386 | Non-provisional of | 60/232,104 | Sep. 12, 2000 |
| 10/100,683 | Continuation-in-part of | PCT/US01/01565 | Jan. 17, 2001 |
| PCT/US01/01565 | Non-provisional of | 60/234,210 | Sep. 20, 2000 |
| 10/100,683 | Continuation-in-part of | PCT/US01/01394 | Jan. 17, 2001 |
| PCT/US01/01394 | Non-provisional of | 60/259,805 | Jan. 05, 2001 |
| PCT/US01/01394 | Non-provisional of | 60/226,278 | Aug. 18, 2000 |
| 10/100,683 | Continuation-in-part of | PCT/US01/01434 | Jan. 17, 2001 |
| PCT/US01/01434 | Non-provisional of | 60/259,678 | Jan. 05, 2001 |
| PCT/US01/01434 | Non-provisional of | 60/226,279 | Aug. 18, 2000 |
| 10/100,683 | Continuation-in-part of | PCT/US01/01397 | Jan. 17, 2001 |
| PCT/US01/01397 | Non-provisional of | 60/226,281 | Aug. 18, 2000 |
| 10/100,683 | Continuation-in-part of | PCT/US01/01385 | Jan. 17, 2001 |
| PCT/US01/01385 | Non-provisional of | 60/231,969 | Sep. 12, 2000 |
| 10/100,683 | Continuation-in-part of | PCT/US01/01384 | Jan. 17, 2001 |
| PCT/US01/01384 | Non-provisional of | 60/259,516 | Jan. 04, 2001 |
| PCT/US01/01384 | Non-provisional of | 60/228,086 | Aug. 28, 2000 |
| 10/100,683 | Continuation-in-part of | PCT/US01/01383 | Jan. 17, 2001 |
| PCT/US01/01383 | Non-provisional of | 60/259,804 | Jan. 05, 2001 |
| PCT/US01/01383 | Non-provisional of | 60/228,083 | Aug. 28, 2000 |
| 10/100,683 | Continuation-in-part of | PCT/US02/05064 | Feb. 21, 2002 |
| PCT/US02/05064 | Non-provisional of | 60/304,444 | Jul. 12, 2001 |
| PCT/US02/05064 | Non-provisional of | 60/270,658 | Feb. 23, 2001 |
| 10/100,683 | Continuation-in-part of | PCT/US02/05301 | Feb. 21, 2002 |
| PCT/US02/05301 | Non-provisional of | 60/304,417 | Jul. 12, 2001 |
| PCT/US02/05301 | Non-provisional of | 60/270,625 | Feb. 23, 2001 |
| 10/100,683 | Non-provisional of | 60/304,121 | Jul. 11, 2001 |
| 10/100,683 | Non-provisional of | 60/295,869 | Jun. 06, 2001 |
| 10/100,683 | Non-provisional of | 60/325,209 | Sep. 28, 2001 |
| 10/100,683 | Non-provisional of | 60/311,085 | Aug. 10, 2001 |
| 10/100,683 | Non-provisional of | 60/330,629 | Oct. 26, 2001 |
| 10/100,683 | Non-provisional of | 60/331,046 | Nov. 07, 2001 |
| 10/100,683 | Non-provisional of | 60/358,554 | Feb. 22, 2002 |
| 10/100,683 | Non-provisional of | 60/358,714 | Feb. 25, 2002 |

; wherein each of the above applications are all herein incorporated by reference in their entirety.

### STATEMENT UNDER 37 C.F.R. § 1.77(b)(4)

[0002] This application refers to a “Sequence Listing” listed below, which is provided as an electronic document on two identical compact discs (CD-R), labeled “Copy 1” and “Copy 2.” These compact discs each contain the file “PS905P1 Seq. List.txt” (2,149,999 bytes, created Jan. 31, 2006), which is hereby incorporated by reference in its entirety herein. The Sequence Listing may be viewed on an IBM-PC machine running the MS-Windows operating system.

### FIELD OF THE INVENTION

[0003] The present invention relates to human secreted proteins/polypeptides, and isolated nucleic acid molecules encoding said proteins/polypeptides, useful for detecting, preventing, diagnosing, prognosticating, treating, and/or ameliorating cardiovascular diseases, disorders, and/or conditions related thereto. Antibodies that bind these polypeptides are also encompassed by the present invention. Also encompassed by the invention are vectors, host cells, and recombinant and synthetic methods for producing said polynucleotides, polypeptides, and/or antibodies. The invention further encompasses screening methods for identifying agonists and antagonists of polynucleotides and polypeptides of the invention. The present invention further encompasses methods and compositions for inhibiting or enhancing the production and function of the polypeptides of the present invention.

### BACKGROUND OF THE INVENTION

[0004] The cardiovascular system is a component of a complex physiological network involved in maintaining the oxygen and nutrient supply to tissues of the body. The heart is the anatomical and functional centerpiece of the cardiovascular system. Weighing only 250-350 grams (less than a pound), the heart is one of our strongest and hardest working organs. It is composed of innervated muscle tissue with unique properties; e.g., it can pace itself in contraction. The main center of rhythm regulation is the sinoatrial (SA) node. Certain cardiac cells repeatedly fire impulses that trigger heart contractions. These autorhythmic cells have two important functions. One is to act as a pacemaker (set the pace for the entire heart), and the other is to form a conduction system, the route for conducting impulses throughout the heart muscle. This conduction system controls the pattern of blood flow through the heart.

[0005] The heart pumps at least five quarts of blood through a full circuit of the body every minute. The heart consists of two pumps, side by side. The pump on the right side moves blood to the lungs, where waste gases, such as carbon dioxide, are removed and oxygen is added. Freshly oxygenated blood returns to the pump on the left side, which moves it out into the rest of the body. Blood flows away from the heart to the lungs or to the rest of your body, though blood vessels called arteries. Arteries branch extensively, each branch become smaller, forming blood vessels called arterioles. Arterioles also become repeatedly smaller and smaller until they are tiny vessels called capillaries. Throughout the arteries and smaller vessels that stem from them, the blood delivers nutrients and oxygen to the tissues and picks up waste. This task is completed in the capillaries. As the blood moves on through the capillaries the blood vessels gradually become larger, eventually becoming veins. Veins ultimately carry blood back to the heart. The cycle then begins again.

[0006] Disorders of the cardiovascular system are many and varied, killing more Americans each year than any other category of disorders. For example, damage to the conduction system leads to arrhythmia, an irregular beating of the heart. If left untreated, the heart becomes unable to effectively pump blood, frequently leading to permanent heart damage and/or cardiac arrest.

[0007] One of the most prevalent conditions in industrialized countries today is atherosclerosis. Atherosclerosis is the buildup of fatty deposits in the intima of large and medium-sized arteries. The buildup of deposits narrowing of the arteries, reducing or potentially blocking the ability of blood to flow through the arteries. Untreated, atherosclerosis typically results in cardiac arrest and, frequently, death.

[0008] Clearly, the discovery of new human cardiovascular-associated polynucleotides, the polypeptides encoded by them, and antibodies that immunospecifically bind these polypeptides, satisfies a need in the art by providing new compositions which are useful in the diagnosis, treatment, prevention and/or prognosis of caridovascular disorders.

[0009] Cardiovascular disorders include, but are not limited to, stroke, cardiovascular abnormalities, such as arterio-arterial fistula, arteriovenous fistula, cerebral arteriovenous malformations, congenital heart defects, pulmonary atresia, and Scimitar Syndrome. Congenital heart defects include, but are not limited to, aortic coarctation, cor triatriatum, coronary vessel anomalies, crisscross heart, dextrocardia, patent ductus arteriosus, Ebstein's anomaly, Eisenmenger complex, hypoplastic left heart syndrome, levocardia, tetralogy of fallot, transposition of great vessels, double outlet right ventricle, tricuspid atresia, persistent truncus arteriosus, and heart septal defects, such as aortopulmonary septal defect, endocardial cushion defects, Lutembacher's Syndrome, trilogy of Fallot, ventricular heart septal defects.

[0010] Cardiovascular disorders also include, but are not limited to, heart disease, such as arrhythmias, carcinoid heart disease, high cardiac output, low cardiac output, cardiac tamponade, endocarditis (including bacterial), heart aneurysm, cardiac arrest, congestive heart failure, congestive cardiomyopathy, paroxysmal dyspnea, cardiac edema, heart hypertrophy, congestive cardiomyopathy, left ventricular hypertrophy, right ventricular hypertrophy, post-infarction heart rupture, ventricular septal rupture, heart valve diseases, myocardial diseases, myocardial ischemia, pericardial effusion, pericarditis (including constrictive and tuberculous), pneumopericardium, postpericardiotomy syndrome, pulmonary heart disease, rheumatic heart disease, ventricular dysfunction, hyperemia, cardiovascular pregnancy complications, Scimitar Syndrome, cardiovascular syphilis, and cardiovascular tuberculosis.

[0011] Arrhythmias include, but are not limited to, sinus arrhythmia, atrial fibrillation, atrial flutter, bradycardia, extrasystole, Adams-Stokes Syndrome, bundle-branch block, sinoatrial block, long QT syndrome, parasystole, Lown-Ganong-Levine Syndrome, Mahaim-type pre-excitation syndrome, Wolff-Parkinson-White syndrome, sick sinus syndrome, tachycardias, and ventricular fibrillation. Tachycardias include paroxysmal tachycardia, supraventricular tachycardia, accelerated idioventricular rhythm, atrioventricular nodal reentry tachycardia, ectopic atrial tachycardia, ectopic junctional tachycardia, sinoatrial nodal reentry tachycardia, sinus tachycardia, Torsades de Pointes, and ventricular tachycardia

[0012] Heart valve diseases include, but are not limited to, aortic valve insufficiency, aortic valve stenosis, hear murmurs, aortic valve prolapse, mitral valve prolapse, tricuspid valve prolapse, mitral valve insufficiency, mitral valve stenosis, pulmonary atresia, pulmonary valve insufficiency, pulmonary valve stenosis, tricuspid atresia, tricuspid valve insufficiency, and tricuspid valve stenosis.

[0013] Myocardial diseases include, but are not limited to, alcoholic cardiomyopathy, congestive cardiomyopathy, hypertrophic cardiomyopathy, aortic subvalvular stenosis, pulmonary subvalvular stenosis, restrictive cardiomyopathy, Chagas cardiomyopathy, endocardial fibroelastosis, endomyocardial fibrosis, Kearns Syndrome, myocardial reperfusion injury, and myocarditis.

[0014] Myocardial ischemias include, but are not limited to, coronary disease, such as angina pectoris, coronary aneurysm, coronary arteriosclerosis, coronary thrombosis, coronary vasospasm, myocardial infarction and myocardial stunning.

[0015] Cardiovascular diseases also include vascular diseases such as aneurysms, angiodysplasia, angiomatosis, bacillary angiomatosis, Hippel-Lindau Disease, Klippel-Trenaunay-Weber Syndrome, Sturge-Weber Syndrome, angioneurotic edema, aortic diseases, Takayasu's Arteritis, aortitis, Leriche's Syndrome, arterial occlusive diseases, arteritis, enarteritis, polyarteritis nodosa, cerebrovascular disorders, diabetic angiopathies, diabetic retinopathy, embolisms, thrombosis, erythromelalgia, hemorrhoids, hepatic veno-occlusive disease, hypertension, hypotension, ischemia, peripheral vascular diseases, phlebitis, pulmonary veno-occlusive disease, Raynaud's disease, CREST syndrome, retinal vein occlusion, Scimitar syndrome, superior vena cava syndrome, telangiectasia, atacia telangiectasia, hereditary hemorrhagic telangiectasia, varicocele, varicose veins, varicose ulcer, vasculitis, and venous insufficiency.

[0016] Aneurysms include, but are not limited to, dissecting aneurysms, false aneurysms, infected aneurysms, ruptured aneurysms, aortic aneurysms, cerebral aneurysms, coronary aneurysms, heart aneurysms, and iliac aneurysms.

[0017] Arterial occlusive diseases include, but are not limited to, arteriosclerosis, intermittent claudication, carotid stenosis, fibromuscular dysplasias, mesenteric vascular occlusion, Moyamoya disease, renal artery obstruction, retinal artery occlusion, and thromboangiitis obliterans.

[0018] Cerebrovascular disorders include, but are not limited to, carotid artery diseases, cerebral amyloid angiopathy, cerebral aneurysm, cerebral anoxia, cerebral arteriosclerosis, cerebral arteriovenous malformation, cerebral artery diseases, cerebral embolism and thrombosis, carotid artery thrombosis, sinus thrombosis, Wallenberg's syndrome, cerebral hemorrhage, epidural hematoma, subdural hematoma, subaraxhnoid hemorrhage, cerebral infarction, cerebral ischemia (including transient), subclavian steal syndrome, periventricular leukomalacia, vascular headache, cluster headache, migraine, and vertebrobasilar insufficiency.

[0019] Embolisms include, but are not limited to, air embolisms, amniotic fluid embolisms, cholesterol embolisms, blue toe syndrome, fat embolisms, pulmonary embolisms, and thromoboembolisms. Thrombosis include, but are not limited to, coronary thrombosis, hepatic vein thrombosis, retinal vein occlusion, carotid artery thrombosis, sinus thrombosis, Wallenberg's syndrome, and thrombophlebitis.

[0020] Ischemic disorders include, but are not limited to, cerebral ischemia, ischemic colitis, compartment syndromes, anterior compartment syndrome, myocardial ischemia, reperfusion injuries, and peripheral limb ischemia Vasculitis includes, but is not limited to, aortitis, arteritis, Behcet's Syndrome, Churg-Strauss Syndrome, mucocutaneous lymph node syndrome, thromboangiitis obliterans, hypersensitivity vasculitis, Schoenlein-Henoch purpura, allergic cutaneous vasculitis, and Wegener's granulomatosis.

### SUMMARY OF THE INVENTION

[0021] The present invention encompasses human secreted proteins/polypeptides, and isolated nucleic acid molecules encoding said proteins/polypeptides, useful for detecting, preventing, diagnosing, prognosticating, treating, and/or ameliorating cardiovascular diseases and disorders. Antibodies that bind these polypeptides are also encompassed by the present invention; as are vectors, host cells, and recombinant and synthetic methods for producing said polynucleotides, polypeptides, and/or antibodies. The invention further encompasses screening methods for identifying agonists and antagonists of polynucleotides and polypeptides of the invention. The present invention also encompasses methods and compositions for inhibiting or enhancing the production and function of the polypeptides of the present invention.

### DETAILED DESCRIPTION

Polynucleotides and Polypeptides of the Invention

Description of Table 1A

[0022] Table b 1A summarizes information concerning certain polypnucleotides and polypeptides of the invention. The first column provides the gene number in the application for each clone identifier. The second column provides a unique clone identifier, “Clone ID:”, for a cDNA clone related to each contig sequence disclosed in Table 1A. Third column, the cDNA Clones identified in the second column were deposited as indicated in the third column (i.e. by ATCC Deposit No:Z and deposit date). Some of the deposits contain multiple different clones corresponding to the same gene. In the fourth column, “Vector” refers to the type of vector contained in the corresponding cDNA Clone identified in the second column. In the fifth column, the nucleotide sequence identified as “NT SEQ ID NO:X” was assembled from partially homologous (“overlapping”) sequences obtained from the corresponding cDNA clone identified in the second column and, in some cases, from additional related cDNA clones. The overlapping sequences were assembled into a single contiguous sequence of high redundancy (usually three to five overlapping sequences at each nucleotide position), resulting in a final sequence identified as SEQ ID NO:X. In the sixth column, “Total NT Seq.” refers to the total number of nucleotides in the contig sequence identified as SEQ ID NO:X.” The deposited clone may contain all or most of these sequences, reflected by the nucleotide position indicated as “5′ NT of Clone Seq.” (seventh column) and the “3′ NT of Clone Seq.” (eighth column) of SEQ ID NO:X. In the ninth column, the nucleotide position of SEQ ID NO:X of the putative start codon (methionine) is identified as “5′ NT of Start Codon.” Similarly, in column ten, the nucleotide position of SEQ ID NO:X of the predicted signal sequence is identified as “5′ NT of First AA of Signal Pep.” In the eleventh column, the translated amino acid sequence, beginning with the methionine, is identified as “AA SEQ ID NO:Y,” although other reading frames can also be routinely translated using known molecular biology techniques. The polypeptides produced by these alternative open reading frames are specifically contemplated by the present invention.

[0023] In the twelfth and thirteenth columns of Table 1A, the first and last amino acid position of SEQ ID NO:Y of the predicted signal peptide is identified as “First AA of Sig Pep” and “Last AA of Sig Pep.” In the fourteenth column, the predicted first amino acid position of SEQ ID NO:Y of the secreted portion is identified as “Predicted First AA of Secreted Portion”. The amino acid position of SEQ ID NO:Y of the last amino acid encoded by the open reading frame is identified in the fifteenth column as “Last AA of ORF”.

[0024] SEQ ID NO:X (where X may be any of the polynucleotide sequences disclosed in the sequence listing) and the translated SEQ ID NO:Y (where Y may be any of the polypeptide sequences disclosed in the sequence listing) are sufficiently accurate and otherwise suitable for a variety of uses well known in the art and described further below. For instance, SEQ ID NO:X is useful for designing nucleic acid hybridization probes that will detect nucleic acid sequences contained in SEQ ID NO:X or the cDNA contained in the deposited clone. These probes will also hybridize to nucleic acid molecules in biological samples, thereby enabling a variety of forensic and diagnostic methods of the invention. Similarly, polypeptides identified from SEQ ID NO:Y may be used, for example, to generate antibodies which bind specifically to proteins containing the polypeptides and the secreted proteins encoded by the cDNA clones identified in Table 1A and/or elsewhere herein

[0025] Nevertheless, DNA sequences generated by sequencing reactions can contain sequencing errors. The errors exist as misidentified nucleotides, or as insertions or deletions of nucleotides in the generated DNA sequence. The erroneously inserted or deleted nucleotides cause frame shifts in the reading frames of the predicted amino acid sequence. In these cases, the predicted amino acid sequence diverges from the actual amino acid sequence, even though the generated DNA sequence may be greater than 99.9% identical to the actual DNA sequence (for example, one base insertion or deletion in an open reading frame of over 1000 bases).

[0026] Accordingly, for those applications requiring precision in the nucleotide sequence or the amino acid sequence, the present invention provides not only the generated nucleotide sequence identified as SEQ ID NO:X, and the predicted translated amino acid sequence identified as SEQ I) NO:Y, but also a sample of plasmid DNA containing a human cDNA of the invention deposited with the ATCC, as set forth in Table 1A. The nucleotide sequence of each deposited plasmid can readily be determined by sequencing the deposited plasmid in accordance with known methods

[0027] The predicted amino acid sequence can then be verified from such deposits. Moreover, the amino acid sequence of the protein encoded by a particular plasmid can also be directly determined by peptide sequencing or by expressing the protein in a suitable host cell containing the deposited human cDNA, collecting the protein, and determining its sequence.

[0028] Also provided in Table 1A is the name of the vector which contains the cDNA plasmid. Each vector is routinely used in the art. The following additional information is provided for convenience.

[0029] Vectors Lambda Zap (U.S. Pat. Nos. 5,128,256 and 5,286,636); Uni-Zap XR (U.S. Pat. Nos. 5,128,256 and 5,286,636), Zap Express (U.S. Pat. Nos. 5,128,256 and 5,286,636), pBluescript (pBS) (Short, J. M. et al., Nucleic Acids Res. 16:7583-7600 (1988); Alting-Mees, M. A. and Short, J. M., Nucleic Acids Res. 17:9494 (1989)) and pBK (Alting-Mees, M. A. et al., Strategies 5:58-61 (1992)) are commercially available from Stratagene Cloning Systems, Inc., 11011 N. Torrey Pines Road, La Jolla, Calif., 92037. pBS contains an ampicillin resistance gene and pBK contains a neomycin resistance gene. Phagemid pBS may be excised from the Lambda Zap and Uni-Zap XR vectors, and phagemid pBK may be excised from the Zap Express vector. Both phagemids may be transformed into E. coli strain XL-1 Blue, also available from Stratagene

[0030] Vectors pSport1, pCMVSport 1.0, pCMVSport 2.0 and pCMVSport 3.0, were obtained from Life Technologies, Inc., P. O. Box 6009, Gaithersburg, Md. 20897. All Sport vectors contain an ampicillin resistance gene and may be transformed into E. coli strain DH10B, also available from Life Technologies. See, for instance, Gruber, C. E., et al., Focus 15:59 (1993). Vector lafmid BA (Bento Soares, Columbia University, New York, N.Y.) contains an ampicillin resistance gene and can be transformed into E. coli strain XL-1 Blue. Vector pCR®2.1, which is available from Invitrogen, 1600 Faraday Avenue, Carlsbad, Calif. 92008, contains an ampicillin resistance gene and may be transformed into E. coli strain DH10B, available from Life Technologies. See, for instance, Clark, J. M., Nuc. Acids Res. 16:9677-9686 (1988) and Mead, D. et al., Bio/Technology 9: (1991).

[0031] The present invention also relates to the genes corresponding to SEQ ID NO:X, SEQ ID NO:Y, and/or a deposited cDNA (cDNA Clone ID). The corresponding gene can be isolated in accordance with known methods using the sequence information disclosed herein. Such methods include, but are not limited to, preparing probes or primers from the disclosed sequence and identifying or amplifying the corresponding gene from appropriate sources of genomic material.

[0032] Also provided in the present invention are allelic variants, orthologs, and/or species homologs. Procedures known in the art can be used to obtain full-length genes, allelic variants, splice variants, full-length coding portions, orthologs, and/or species homologs of genes corresponding to SEQ ID NO:X and SEQ ID NO:Y using information from the sequences disclosed herein or the clones deposited with the ATCC. For example, allelic variants and/or species homologs may be isolated and identified by making suitable probes or primers from the sequences provided herein and screening a suitable nucleic acid source for allelic variants and/or the desired homologue.

[0033] The present invention provides a polynucleotide comprising, or alternatively consisting of, the nucleic acid sequence of SEQ ID NO:X and/or a cDNA contained in ATCC Deposit No.Z. The present invention also provides a polypeptide comprising, or alternatively, consisting of, the polypeptide sequence of SEQ ID NO:Y, a polypeptide encoded by SEQ ID NO:X, and/or a polypeptide encoded by a cDNA contained in ATCC deposit No.Z. Polynucleotides encoding a polypeptide comprising, or alternatively consisting of the polypeptide sequence of SEQ ID NO:Y, a polypeptide encoded by SEQ ID NO:X and/or a polypeptide encoded by the cDNA contained in ATCC Deposit No.Z, are also encompassed by the invention. The present invention further encompasses a polynucleotide comprising, or alternatively consisting of the complement of the nucleic acid sequence of SEQ ID NO:X, and/or the complement of the coding strand of the cDNA contained in ATCC Deposit No.Z.

Description of Table 1B (Comprised of Tables 1B.1 and 1B.2)

[0034] Table 1B.1 and Table 1B.2 summarize some of the polynucleotides encompassed by the invention (including cDNA clones related to the sequences (Clone ID:), contig sequences (contig identifier (Contig ID:) and contig nucleotide sequence identifiers (SEQ ID NO:X)) and further summarizes certain characteristics of these polynucleotides and the polypeptides encoded thereby. The first column of Tables 1B.1 and 1B.2 provide the gene numbers in the application for each clone identifier. The second column of Tables 1B.1 and 1B.2 provide unique clone identifiers, “Clone ID:”, for cDNA clones related to each contig sequence disclosed in Table 1A and/or Table 1B. The third column of Tables 1B.1 and 1B.2 provide unique contig identifiers, “Contig ID:” for each of the contig sequences disclosed in these tables. The fourth column of Tables 1B.1 and 1B.2 provide the sequence identifiers, “SEQ ID NO:X”, for each of the contig sequences disclosed in Table 1A and/or 1B.

[0035] Table 1B.1

[0036] The fifth column of Table 1B.1, “ORF (From-To)”, provides the location (i.e., nucleotide position numbers) within the polynucleotide sequence of SEQ ID NO:X that delineates the preferred open reading frame (ORF) that encodes the amino acid sequence shown in the sequence listing and referenced in Table 1B.1 as SEQ ID NO:Y (column 6). Column 7 of Table 1B.1 lists residues comprising predicted epitopes contained in the polypeptides encoded by each of the preferred ORFs (SEQ ID NO:Y). Identification of potential immunogenic regions was performed according to the method of Jameson and Wolf (CABIOS, 4; 181-186 (1988)); specifically, the Genetics Computer Group (GCG) implementation of this algorithm, embodied in the program PEPTIDESTRUCTURE (Wisconsin Package v10.0, Genetics Computer Group (GCG), Madison, Wis.). This method returns a measure of the probability that a given residue is found on the surface of the protein. Regions where the antigenic index score is greater than 0.9 over at least 6 amino acids are indicated in Table 1B.1 as “Predicted Epitopes”. In particular embodiments, polypeptides of the invention comprise, or alternatively consist of, one, two, three, four, five or more of the predicted epitopes described in Table 1B.1. It will be appreciated that depending on the analytical criteria used to predict antigenic determinants, the exact address of the determinant may vary slightly. Column 8 of Table 1B.1(“Cytologic Band”) provides the chromosomal location of polynucleotides corresponding to SEQ ID NO:X. Chromosomal location was determined by finding exact matches to EST and cDNA sequences contained in the NCBI (National Center for Biotechnology Information) UniGene database. Given a presumptive chromosomal location, disease locus association was determined by comparison with the Morbid Map, derived from Online Mendelian Inheritance in Man (Online Mendelian Inheritance in Man, OMIM™. McKusick-Nathans Institute for Genetic Medicine, Johns Hopkins University (Baltimore, Md.) and National Center for Biotechnology Information, National Library of Medicine (Bethesda, Md.) 2000. World Wide Web URL: www.ncbi.nlm.nih.gov/omim/). If the putative chromosomal location of the Query overlaps with the chromosomal location of a Morbid Map entry, an OMIM identification number is disclosed in Table 1B.1, column 9 labeled “OMIM Disease Reference(s)”. A key to the OMIM reference identification numbers is provided in Table 5.

[0037] Table 1B.2

[0038] Column 5 of Table 1B.2, “Tissue Distribution” shows the expression profile of tissue, cells, and/or cell line libraries which express the polynucleotides of the invention. The first code number shown in Table 1B.2 column 5 (preceding the colon), represents the tissue/cell source identifier code corresponding to the key provided in Table 4. Expression of these polynucleotides was not observed in the other tissues and/or cell libraries tested. The second number in column 5 (following the colon), represents the number of times a sequence corresponding to the reference polynucleotide sequence (e.g., SEQ ID NO:X) was identified in the corresponding tissue/cell source. Those tissue/cell source identifier codes in which the first two letters are “AR” designate information generated using DNA array technology. Utilizing this technology, cDNAs were amplified by PCR and then transferred, in duplicate, onto the array. Gene expression was assayed through hybridization of first strand cDNA probes to the DNA array. cDNA probes were generated from total RNA extracted from a variety of different tissues and cell lines. Probe synthesis was performed in the presence of ³³P dCTP, using oligo(dT) to prime reverse transcription. After hybridization, high stringency washing conditions were employed to remove non-specific hybrids from the array. The remaining signal, emanating from each gene target, was measured using a Phosphorimager. Gene expression was reported as Phosphor Stimulating Luminescence (PSL) which reflects the level of phosphor signal generated from the probe hybridized to each of the gene targets represented on the array. A local background signal subtraction was performed before the total signal generated from each array was used to normalize gene expression between the different hybridizations. The value presented after “[array code]:” represents the mean of the duplicate values, following background subtraction and probe normalization. One of skill in the art could routinely use this information to identify normal and/or diseased tissue(s) which show a predominant expression pattern of the corresponding polynucleotide of the invention or to identify polynucleotides which show predominant and/or specific tissue and/or cell expression.

Description of Table 1C

[0039] Table 1C summarizes additional polynucleotides encompassed by the invention (including cDNA clones related to the sequences (Clone ID:), contig sequences (contig identifier (Contig ID:) contig nucleotide sequence identifiers (SEQ ID NO:X)), and genomic sequences (SEQ ID NO:B). Table 1C is found in priority Application No. PCT/US02/09785, filed Mar. 19, 2002, which corresponds to Publication No. WO02/95010, published Nov. 28, 2002. Table 1C, found on pages 227 to 235 of Publication No. WO02/95010, is incorporated by reference herein in its entirety. The first column provides a unique clone identifier, “Clone ID:”, for a cDNA clone related to each contig sequence. The second column provides the sequence identifier, “SEQ ID NO:X”, for each contig sequence. The third column provides a unique contig identifier, “Contig ID:” for each contig sequence. The fourth column, provides a BAC identifier “BAC ID NO:A” for the BAC clone referenced in the corresponding row of the table. The fifth column provides the nucleotide sequence identifier, “SEQ ID NO:B” for a fragment of the BAC clone identified in column four of the corresponding row of the table. The sixth column, “Exon From-To”, provides the location (i.e., nucleotide position numbers) within the polynucleotide sequence of SEQ ID NO:B which delineate certain polynucleotides of the invention that are also exemplary members of polynucleotide sequences that encode polypeptides of the invention (e.g., polypeptides containing amino acid sequences encoded by the polynucleotide sequences delineated in column six, and fragments and variants thereof).

Description of Table 1D (Comprised of Tables 1D.1 and 1D.2)

[0040] Table 1D: In preferred embodiments, the present invention encompasses a method of detecting, preventing, diagnosing, prognosticating, treating, and/or ameliorating cardiovascular diseases or disorders; comprising administering to a patient in which such treatment, prevention, or amelioration is desired a protein, nucleic acid, or antibody of the invention (or fragment or variant thereof) represented by Table 1A, Table 1B, and Table 1C, in an amount effective to detect, prevent, diagnose, prognosticate, treat, and/or ameliorate the disease or disorder.

[0041] As indicated in Table 1D, the polynucleotides, polypeptides, agonists, or antagonists of the present invention (including antibodies) can be used in assays to test for one or more biological activities. If these polynucleotides and polypeptides do exhibit activity in a particular assay, it is likely that these molecules may be involved in the diseases associated with the biological activity. Thus, the polynucleotides or polypeptides, or agonists or antagonists thereof (including antibodies) could be used to treat the associated disease.

[0042] Tables 1D.1 and 1D.2 provide information related to biological activities for polynucleotides and polypeptides of the invention (including antibodies, agonists, and/or antagonists thereof). In Table 1D.1, the first and second columns show the “Gene No.” and “cDNA Clone ID No.”, respectively, indicating certain nucleic acids and proteins (or antibodies against the same) of the invention (including polynucleotide, polypeptide, and antibody fragments or variants thereof). The third column (“AA SEQ ID NO:Y”) indicates the Sequence Listing SEQ ID Number for polypeptide sequences encoded by the corresponding cDNA clones (also as indicated in Tables 1A, Table 1B, and Table 2), and the fourth column (“Biological Activity”) indicates a biological activity corresponding to the indicated polypeptides (or polynucleotides encoding said polypeptides).

[0043] In Table 1D.2, each of the biological activities of Table 1D.1 is listed followed by an “Exemplary Activity Assay” row and a “Preferred Indication” row; however, for some biological activities no “Exemplary Activity Assay” or “Preferred Indication” is given. The “Exemplary Activity Assay” row describes the biological activity listed in the row that precedes it and also provides information pertaining to the various types of assays which may be performed to test, demonstrate, or quantify the corresponding biological activity. The “Preferred Indication” row also refers to the biological activity listed in the preceding row and describes disease(s) or disorder(s) that may be detected, diagnosed, prevented, treated, or ameliorated by the nucleic acids and proteins (or antibodies against the same) of the invention (including polynucleotide, polypeptide, and antibody fragments or variants thereof).

[0044] Table 1D.2 describes the use of, inter alia, FMAT technology for testing or demonstrating various biological activities. Fluorometric microvolume assay technology (FMAT) is a fluorescence-based system which provides a means to perform nonradioactive cell- and bead-based assays to detect activation of cell signal transduction pathways. This technology was designed specifically for ligand binding and immunological assays. Using this technology, fluorescent cells or beads at the bottom of the well are detected as localized areas of concentrated fluorescence using a data processing system. Unbound flurophore comprising the background signal is ignored, allowing for a wide variety of homogeneous assays. FMAT technology may be used for peptide ligand binding assays, immunofluorescence, apoptosis, cytotoxicity, and bead-based immunocapture assays. See, Miraglia S et. al., “Homogeneous cell and bead based assays for highthroughput screening using flourometric microvolume assay technology,” Journal of Biomolecular Screening; 4:193-204 (1999). In particular, FMAT technology may be used to test, confirm, and/or identify the ability of polypeptides (including polypeptide fragments and variants) to activate signal transduction pathways. For example, FMAT technology may be used to test, confirm, and/or identify the ability of polypeptides to upregulate production of immunomodulatory proteins (such as, for example, interleukins, GM-CSF, Rantes, and Tumor Necrosis factors, as well as other cellular regulators (e.g. insulin)).

[0045] Table 1D.2 also describes the use of kinase assays for testing, demonstrating, or quantifying biological activity. In this regard, the phosphorylation and de-phosphorylation of specific amino acid residues (e.g. Tyrosine, Serine, Threonine) on cell-signal transduction proteins provides a fast, reversible means for activation and de-activation of cellular signal transduction pathways. Moreover, cell signal transduction via phosphorylation/de-phosphorylation is crucial to the regulation of a wide variety of cellular processes (e.g. proliferation, differentiation, migration, apoptosis, etc.). Accordingly, kinase assays provide a powerful tool useful for testing, confirming, and/or identifying polypeptides (including polypeptide fragments and variants) that mediate cell signal transduction events via protein phosphorylation. See e.g., Forrer, P., Tamaskovic R., and Jaussi, R. “Enzyme-Linked Immunosorbent Assay for Measurement of JNK, ERK, and p38 Kinase Activities” Biol. Chem. 379(8-9): 1101-1110 (1998).

Description of Table 1E

[0046] Table 1E: Polynucleotides encoding polypeptides of the present invention can be used in assays to test for one or more biological activities. One such biological activity which may be tested includes the ability of polynucleotides and polypeptides of the invention to stimulate up-regulation or down-regulation of expression of particular genes and proteins. Hence, if polynucleotides and polypeptides of the present invention exhibit activity in altering particular gene and protein expression patterns, it is likely that these polynucleotides and polypeptides of the present invention may be involved in, or capable of effecting changes in, diseases associated with the altered gene and protein expression profiles. Hence, polynucleotides, polypeptides, or antibodies of the present invention could be used to treat said associated diseases.

[0047] TaqMan® assays may be performed to assess the ability of polynucleotides (and polypeptides they encode) to alter the expression pattern of particular “target” genes. TaqMan® reactions are performed to evaluate the ability of a test agent to induce or repress expression of specific genes in different cell types. TaqMan® gene expression quantification assays (“TaqMan® assays”) are well known to, and routinely performed by, those of ordinary skill in the art. TaqMan® assays are performed in a two step reverse transcription/polymerase chain reaction (RT-PCR). In the first (RT) step, cDNA is reverse transcribed from total RNA samples using random hexamer primers. In the second (PCR) step, PCR products are synthesized from the cDNA using gene specific primers.

[0048] To quantify gene expression the Taqman® PCR reaction exploits the 5′ nuclease activity of AmpliTaq Gold® DNA Polymerase to cleave a Taqman® probe (distinct from the primers) during PCR. The Taqman® probe contains a reporter dye at the 5′-end of the probe and a quencher dye at the 3′ end of the probe. When the probe is intact, the proximity of the reporter dye to the quencher dye results in suppression of the reporter fluorescence. During PCR, if the target of interest is present, the probe specifically anneals between the forward and reverse primer sites. AmpliTaq Fold DNA Polymerase then cleaves the probe between the reporter and quencher when the probe hybridizes to the target, resulting in increased fluorescence of the reporter (see FIG. 2). Accumulation of PCR products is detected directly by monitoring the increase in fluorescence of the reporter dye.

[0049] After the probe fragments are displaced from the target, polymerization of the strand continues. The 3′-end of the probe is blocked to prevent extension of the probe during PCR. This process occurs in every cycle and does not interfere with the exponential accumulation of product. The increase in fluorescence signal is detected only if the target sequence is complementary to the probe and is amplified during PCR. Because of these requirements, any nonspecific amplification is not detected.

[0050] For test sample preparation, vector controls or constructs containing the coding sequence for the gene of interest are transfected into cells, such as for example 293T cells, and supernatants collected after 48 hours. For cell treatment and RNA isolation, multiple primary human cells or human cell lines are used; such cells may include but are not limited to, Normal Human Dermal Fibroblasts, Aortic Smooth Muscle, Human Umbilical Vein Endothelial Cells, HepG2, Daudi, Jurkat, U937, Caco, and THP-1 cell lines. Cells are plated in growth media and growth is arrested by culturing without media change for 3 days, or by switching cells to low serum media and incubating overnight. Cells are treated for 1, 6, or 24 hours with either vector control supernatant or sample supernatant (or purified/partially purified protein preparations in buffer). Total RNA is isolated; for example, by using Trizol extraction or by using the Ambion RNAqueous(TM)-4PCR RNA isolation system. Expression levels of multiple genes are analyzed using TAQMAN, and expression in the test sample is compared to control vector samples to identify genes induced or repressed. Each of the above described techniques are well known to, and routinely performed by, those of ordinary skill in the art.

[0051] Table 1E indicates particular disease classes for which polynucleotides, polypeptides, or antibodies of the present invention may be used in detecting, diagnosing, preventing, treating and/or ameliorating said diseases and disorders based on “target” gene expression patterns which may be up- or down-regulated by polynucleotides (and the encoded polypeptides) corresponding to each indicated cDNA Clone ID (shown in Table 1E, Column 2).

[0052] Thus, in preferred embodiments, the present invention encompasses a method of detecting, diagnosing, preventing, treating, and/or ameliorating a disease or disorder listed in the “Disease Class” column of Table 1E; comprising administering to a patient in which such detection, diagnosis, prevention, or treatment is desired a protein, nucleic acid, or antibody of the invention (or fragment or variant thereof) in an amount effective to detect, diagnose, prevent, treat, or ameliorate the disease or disorder. The first and second columns of Table 1D show the “Gene No.” and “cDNA Clone ID No.”, respectively, indicating certain nucleic acids and proteins (or antibodies against the same) of the invention (including polynucleotide, polypeptide, and antibody fragments or variants thereof) that may be used in detecting, diagnosing, preventing, treating, or ameliorating the disease(s) or disorder(s) indicated in the corresponding row in the “Disease Class” Column of Table 1E.

[0053] In another embodiment, the present invention also encompasses methods of detecting, diagnosing, preventing, treating, or ameliorating a disease or disorder listed in the “Disease Class” Column of Table 1E; comprising administering to a patient combinations of the proteins, nucleic acids, or antibodies of the invention (or fragments or variants thereof), sharing similar indications as shown in the corresponding rows in the “Disease Class” Column of Table 1E.

[0054] The “Disease Class” Column of Table 1E provides a categorized descriptive heading for diseases, disorders, and/or conditions (more fully described below) that may be detected, diagnosed, prevented, treated, or ameliorated by a protein, nucleic acid, or antibody of the invention (or fragment or variant thereof).

[0055] The “Cell Line” and “Exemplary Targets” Columns of Table 1E indicate particular cell lines and target genes, respectively, which may show altered gene expression patterns (i.e., up- or down-regulation of the indicated target gene) in Taqman assays, performed as described above, utilizing polynucleotides of the cDNA Clone ID shown in the corresponding row. Alteration of expression patterns of the indicated “Exemplary Target” genes is correlated with a particular “Disease Class” as shown in the corresponding row. The Column of Table 1E

[0056] The “Exemplary Accessions” Column indicates GenBank Accessions (available online through the National Center for Biotechnology Information (NCBI) at www.ncbi.nlm.nih.gov) which correspond to the “Exemplary Targets” shown in the adjacent row.

[0057] The recitation of “Cancer” in the “Disease Class” Column indicates that the corresponding nucleic acid and protein, or antibody against the same, of the invention (or fragment or variant thereof) may be used for example, to detect, diagnose, prevent, treat, and/or ameliorate neoplastic diseases and/or disorders (e.g., leukemias, cancers, etc., as described below under “Hyperproliferative Disorders”).

[0058] The recitation of “Immune” in the “Disease Class” column indicates that the corresponding nucleic acid and protein, or antibody against the same, of the invention (or fragment or variant thereof), may be used for example, to detect, diagnose, prevent, treat, and/or ameliorate diseases and/or disorders relating to neoplastic diseases (e.g., as described below under “Hyperproliferative Disorders”), blood disorders (e.g., as described below under “Immune Activity” “Cardiovascular Disorders” and/or “Blood-Related Disorders”), and infections (e.g., as described below under “Infectious Disease”).

[0059] The recitation of “Angiogenesis” in the “Disease Class” column indicates that the corresponding nucleic acid and protein, or antibody against the same, of the invention (or fragment or variant thereof), may be used for example, to detect, diagnose, treat, prevent, and/or ameliorate diseases and/or disorders relating to neoplastic diseases (e.g., as described below under “Hyperproliferative Disorders”), diseases and/or disorders of the cardiovascular system (e.g., as described below under “Cardiovascular Disorders”), diseases and/or disorders involving cellular and genetic abnormalities (e.g., as described below under “Diseases at the Cellular Level”), diseases and/or disorders involving angiogenesis (e.g., as described below under “Anti-Angiogenesis Activity”), to promote or inhibit cell or tissue regeneration (e.g., as described below under “Regeneration”), or to promote wound healing (e.g., as described below under “Wound Healing and Epithelial Cell Proliferation”).

[0060] Moreover, highly preferred indications include diagnosis, prevention, treatment, and/or amelioration of diseases and disorders involving angiogenesis, wound healing, neoplasia (particularly including, but not limited to, tumor metastases), and cardiovascular diseases and disorders; as described herein under the headings “Hyperproliferative Disorders,” “Regeneration,” “Anti-Angiogenesis Activity,” “Diseases at the Cellular Level,” and “Wound Healing and Epithelial Cell Proliferation.”

[0061] The recitation of “Diabetes” in the “Disease Class” column indicates that the corresponding nucleic acid and protein, or antibody against the same, of the invention (or fragment or variant thereof), may be used for example, to detect, diagnose, treat, prevent, and/or ameliorate diabetes (including diabetes mellitus types I and II), as well as diseases and/or disorders associated with, or consequential to, diabetes (e.g. as described below under “Endocrine Disorders,” “Renal Disorders,” and “Gastrointestinal Disorders”).

Description of Table 2

[0062] Table 2 summarizes homology and features of some of the polypeptides of the invention. The first column provides a unique clone identifier, “Clone ID:”, corresponding to a cDNA clone disclosed in Table 1A or Table 1B. The second column provides the unique contig identifier, “Contig ID:” corresponding to contigs in Table 1B and allowing for correlation with the information in Table 1B. The third column provides the sequence identifier, “SEQ ID NO:X”, for the contig polynucleotide sequence. The fourth column provides the analysis method by which the homology/identity disclosed in the Table was determined. Comparisons were made between polypeptides encoded by the polynucleotides of the invention and either a non-redundant protein database (herein referred to as “NR”), or a database of protein families (herein referred to as “PFAM”) as further described below. The fifth column provides a description of the PFAM/NR hit having a significant match to a polypeptide of the invention. Column six provides the accession number of the PFAM/NR hit disclosed in the fifth column. Column seven, “Score/Percent Identity”, provides a quality score or the percent identity, of the hit disclosed in columns five and six. Columns 8 and 9, “NT From” and “NT To” respectively, delineate the polynucleotides in “SEQ ID NO:X” that encode a polypeptide having a significant match to the PFAM/NR database as disclosed in the fifth and sixth columns. In specific embodiments polypeptides of the invention comprise, or alternatively consist of, an amino acid sequence encoded by a polynucleotide in SEQ ID NO:X as delineated in columns 8 and 9, or fragments or variants thereof.

Description of Table 3

[0063] Table 3 provides polynucleotide sequences that may be disclaimed according to certain embodiments of the invention. The first column provides a unique clone identifier, “Clone ID”, for a cDNA clone related to contig sequences disclosed in Table 1B. The second column provides the sequence identifier, “SEQ ID NO:X”, for contig sequences disclosed in Table 1A and/or Table 1B. The third column provides the unique contig identifier, “Contig ID:”, for contigs disclosed in Table 1B. The fourth column provides a unique integer ‘a’ where ‘a’ is any integer between 1 and the final nucleotide minus 15 of SEQ ID NO:X, and the fifth column provides a unique integer ‘b’ where ‘b’ is any integer between 15 and the final nucleotide of SEQ ID NO:X where both a and b correspond to the positions of nucleotide residues shown in SEQ ID NO:X and where b is greater than or equal to a+14. For each of the polynucleotides shown as SEQ ID NO:X, the uniquely defined integers can be substituted into the general formula of a-b, and used to describe polynucleotides which may be preferably excluded from the invention. In certain embodiments, preferably excluded from the invention are at least one, two, three, four, five, ten, or more of the polynucleotide sequence(s) having the accession number(s) disclosed in the sixth column of this Table (including for example, published sequence in connection with a particular BAC clone). In further embodiments, preferably excluded from the invention are the specific polynucleotide sequence(s) contained in the clones corresponding to at least one, two, three, four, five, ten, or more of the available material having the accession numbers identified in the sixth column of this Table (including for example, the actual sequence contained in an identified BAC clone).

Description of Table 4

[0064] Table 4 provides a key to the tissue/cell source identifier code disclosed in Table 1B.2, column 5. Column 1 provides the tissue/cell source identifier code disclosed in Table 1B.2, Column 5. Columns 2-5 provide a description of the tissue or cell source. Note that “Description” and “Tissue” sources (i.e. columns 2 and 3) having the prefix “a_” indicates organs, tissues, or cells derived from “adult” sources. Codes corresponding to diseased tissues are indicated in column 6 with the word “disease.” The use of the word “disease” in column 6 is non-limiting. The tissue or cell source may be specific (e.g. a neoplasm), or may be disease-associated (e.g., a tissue sample from a normal portion of a diseased organ). Furthermore, tissues and/or cells lacking the “disease” designation may still be derived from sources directly or indirectly involved in a disease state or disorder, and therefore may have a further utility in that disease state or disorder. In numerous cases where the tissue/cell source is a library, column 7 identifies the vector used to generate the library.

Description of Table 5

[0065] Table 5 provides a key to the OMIM reference identification numbers disclosed in Table 1B.1. OMIM reference identification numbers (Column 1) were derived from Online Mendelian Inheritance in Man (Online Mendelian Inheritance in Man, OMIM. McKusick-Nathans Institute for Genetic Medicine, Johns Hopkins University (Baltimore, Md.) and National Center for Biotechnology Information, National Library of Medicine, (Bethesda, Md.) 2000. World Wide Web URL: www.ncbi.nlm.nih.gov/omim/). Column 2 provides diseases associated with the cytologic band disclosed in Table 1B.1, as determined using the Morbid Map database.

Description of Table 6

[0066] Table 6 summarizes some of the ATCC Deposits, Deposit dates, and ATCC designation numbers of deposits made with the ATCC in connection with the present application. These deposits were made in addition to those described in the Table 1A.

Description of Table 7

[0067] Table 7 shows the cDNA libraries sequenced, and ATCC designation numbers and vector information relating to these cDNA libraries.

[0068] The first column shows the first four letters indicating the Library from which each library clone was derived. The second column indicates the catalogued tissue description for the corresponding libraries. The third column indicates the vector containing the corresponding clones. The fourth column shows the ATCC deposit designation for each libray clone as indicated by the deposit information in Table 6.

### DEFINITIONS

[0069] The following definitions are provided to facilitate understanding of certain terms used throughout this specification.

[0070] In the present invention, “isolated” refers to material removed from its original environment (e.g., the natural environment if it is naturally occurring), and thus is altered “by the hand of man” from its natural state. For example, an isolated polynucleotide could be part of a vector or a composition of matter, or could be contained within a cell, and still be “isolated” because that vector, composition of matter, or particular cell is not the original environment of the polynucleotide. The term “isolated” does not refer to genomic or cDNA libraries, whole cell total or mRNA preparations, genomic DNA preparations (including those separated by electrophoresis and transferred onto blots), sheared whole cell genomic DNA preparations or other compositions where the art demonstrates no distinguishing features of the polynucleotide/sequences of the present invention.

[0071] In the present invention, a “secreted” protein refers to those proteins capable of being directed to the ER, secretory vesicles, or the extracellular space as a result of a signal sequence, as well as those proteins released into the extracellular space without necessarily containing a signal sequence. If the secreted protein is released into the extracellular space, the secreted protein can undergo extracellular processing to produce a “mature” protein. Release into the extracellular space can occur by many mechanisms, including exocytosis and proteolytic cleavage.

[0072] As used herein, a “polynucleotide” refers to a molecule having a nucleic acid sequence encoding SEQ ID NO:Y or a fragment or variant thereof (e.g., the polypeptide delinated in columns fourteen and fifteen of Table 1A); a nucleic acid sequence contained in SEQ ID NO:X (as described in column 5 of Table 1A and/or Table 1B) or the complement thereof; a cDNA sequence contained in Clone ID: (as described in column 2 of Table 1A and/or Table 1B and contained within a library deposited with the ATCC); a nucleotide sequence encoding the polypeptide encoded by a nucleotide sequence in SEQ ID NO:B as defined in column 6 (EXON From-To) of Table 1C or a fragment or variant thereof; or a nucleotide coding sequence in SEQ ID NO:B as defined in column 6 of Table 1C or the complement thereof. For example, the polynucleotide can contain the nucleotide sequence of the full length cDNA sequence, including the 5′ and 3′ untranslated sequences, the coding region, as well as fragments, epitopes, domains, and variants of the nucleic acid sequence. Moreover, as used herein, a “polypeptide” refers to a molecule having an amino acid sequence encoded by a polynucleotide of the invention as broadly defined (obviously excluding poly-Phenylalanine or poly-Lysine peptide sequences which result from translation of a polyA tail of a sequence corresponding to a cDNA).

[0073] In the present invention, “SEQ ID NO:X” was often generated by overlapping sequences contained in multiple clones (contig analysis). A representative clone containing all or most of the sequence for SEQ ID NO:X is deposited at Human Genome Sciences, Inc. (HGS) in a catalogued and archived library. As shown, for example, in Table 1B, each clone is identified by a cDNA Clone ID (identifier generally referred to herein as Clone ID:). Each Clone ID is unique to an individual clone and the Clone ID is all the information needed to retrieve a given clone from the HGS library. Table 7 provides a list of the deposited cDNA libraries. One can use the Clone ID: to determine the library source by reference to Tables 6 and 7. Table 7 lists the deposited cDNA libraries by name by name and links each library to an ATCC Deposit Library names contain four characters, for example, “HTWE.” The name of a cDNA clone (Clone ID) isolated from that library begins with the same four characters, for example “HTWEP07”. As mentioned below, Table 1A and/or Table 1B correlates the Clone ID names with SEQ ID NO:X. Thus, starting with an SEQ ID NO:X, one can use Tables 1A, 1B, 6, 7, and 9 to determine the corresponding Clone ID, which library it came from and which ATCC deposit the library is contained in. Furthermore, it is possible to retrieve a given cDNA clone from the source library by techniques known in the art and described elsewhere herein. The ATCC is located at 10801 University Boulevard, Manassas, Va. 20110-2209, USA. The ATCC deposits were made pursuant to the terms of the Budapest Treaty on the international recognition of the deposit of microorganisms for the purposes of patent procedure.

[0074] In specific embodiments, the polynucleotides of the invention are at least 15, at least 30, at least 50, at least 100, at least 125, at least 500, or at least 1000 continuous nucleotides but are less than or equal to 300 kb, 200 kb, 100 kb, 50 kb, 15 kb, 10 kb, 7.5 kb, 5 kb, 2.5 kb, 2.0 kb, or 1 kb, in length. In a further embodiment, polynucleotides of the invention comprise a portion of the coding sequences, as disclosed herein, but do not comprise all or a portion of any intron. In another embodiment, the polynucleotides comprising coding sequences do not contain coding sequences of a genomic flanking gene (i.e., 5′ or 3′ to the gene of interest in the genome). In other embodiments, the polynucleotides of the invention do not contain the coding sequence of more than 1000, 500, 250, 100, 50, 25, 20, 15, 10, 5, 4, 3, 2, or 1 genomic flanking gene(s).

[0075] A “polynucleotide” of the present invention also includes those polynucleotides capable of hybridizing, under stringent hybridization conditions, to sequences contained in SEQ ID NO:X, or the complement thereof (e.g., the complement of any one, two, three, four, or more of the polynucleotide fragments described herein), the polynucleotide sequence delineated in columns 7 and 8 of Table 1A or the complement thereof, the polynucleotide sequence delineated in columns 8 and 9 of Table 2 or the complement thereof, and/or cDNA sequences contained in Clone ID: (e.g., the complement of any one, two, three, four, or more of the polynucleotide fragments, or the cDNA clone within the pool of cDNA clones deposited with the ATCC, described herein), and/or the polynucleotide sequence delineated in column 6 of Table 1C or the complement thereof “Stringent hybridization conditions” refers to an overnight incubation at 42 degree C. in a solution comprising 50% fornamide, 5×SSC (750 mM NaCl, 75 mM trisodium citrate), 50 mM sodium phosphate (pH 7.6), 5× Denhardt's solution, 10% dextran sulfate, and 20 μg/ml denatured, sheared salmon sperm DNA, followed by washing the filters in 0.1×SSC at about 65 degree C.

[0076] Also contemplated are nucleic acid molecules that hybridize to the polynucleotides of the present invention at lower stringency hybridization conditions. Changes in the stringency of hybridization and signal detection are primarily accomplished through the manipulation of formamide concentration (lower percentages of formamide result in lowered stringency); salt conditions, or temperature. For example, lower stringency conditions include an overnight incubation at 37 degree C. in a solution comprising 6×SSPE (20×SSPE=3M NaCl; 0.2M NaH₂PO₄; 0.02M EDTA, pH 7.4), 0.5% SDS, 30% formamide, 100 ug/ml salmon sperm blocking DNA; followed by washes at 50 degree C. with 1×SSPE, 0.1% SDS. In addition, to achieve even lower stringency, washes performed following stringent hybridization can be done at higher salt concentrations (e.g. 5×SSC).

[0077] Note that variations in the above conditions may be accomplished through the inclusion and/or substitution of alternate blocking reagents used to suppress background in hybridization experiments. Typical blocking reagents include Denhardt's reagent, BLOTTO, heparin, denatured salmon sperm DNA, and commercially available proprietary formulations. The inclusion of specific blocking reagents may require modification of the hybridization conditions described above, due to problems with compatibility.

[0078] Of course, a polynucleotide which hybridizes only to polyA+ sequences (such as any 3′ terminal polyA+ tract of a cDNA shown in the sequence listing), or to a complementary stretch of T (or U) residues, would not be included in the definition of “polynucleotide,” since such a polynucleotide would hybridize to any nucleic acid molecule containing a poly (A) stretch or the complement thereof (e.g., practically any double-stranded cDNA clone generated using oligo dT as a primer).

[0079] The polynucleotide of the present invention can be composed of any polyribonucleotide or polydeoxribonucleotide, which may be unmodified RNA or DNA or modified RNA or DNA. For example, polynucleotides can be composed of single- and double-stranded DNA, DNA that is a mixture of single- and double-stranded regions, single- and double-stranded RNA, and RNA that is mixture of single- and double-stranded regions, hybrid molecules comprising DNA and RNA that may be single-stranded or, more typically, double-stranded or a mixture of single- and double-stranded regions. In addition, the polynucleotide can be composed of triple-stranded regions comprising RNA or DNA or both RNA and DNA. A polynucleotide may also contain one or more modified bases or DNA or RNA backbones modified for stability or for other reasons. “Modified” bases include, for example, tritylated bases and unusual bases such as inosine. A variety of modifications can be made to DNA and RNA; thus, “polynucleotide” embraces chemically, enzymatically, or metabolically modified forms.

[0080] In specific embodiments, the polynucleotides of the invention are at least 15, at least 30, at least 50, at least 100, at least 125, at least 500, or at least 1000 continuous nucleotides but are less than or equal to 300 kb, 200 kb, 100 kb, 50 kb, 15 kb, 10 kb, 7.5 kb, 5 kb, 2.5 kb, 2.0 kb, or 1 kb, in length. In a further embodiment, polynucleotides of the invention comprise a portion of the coding sequences, as disclosed herein, but do not comprise all or a portion of any intron. In another embodiment, the polynucleotides comprising coding sequences do not contain coding sequences of a genomic flanking gene (i.e., 5′ or 3′ to the gene of interest in the genome). In other embodiments, the polynucleotides of the invention do not contain the coding sequence of more than 1000, 500, 250, 100, 50, 25, 20, 15, 10, 5, 4, 3, 2, or 1 genomic flanking gene(s).

[0081] “SEQ ID NO:X” refers to a polynucleotide sequence described in column 5 of Table 1A, while “SEQ ID NO:Y” refers to a polypeptide sequence described in column 10 of Table 1A. SEQ ID NO:X is identified by an integer specified in column 6 of Table 1A. The polypeptide sequence SEQ ID NO:Y is a translated open reading frame (ORF) encoded by polynucleotide SEQ ID NO:X. The polynucleotide sequences are shown in the sequence listing immediately followed by all of the polypeptide sequences. Thus, a polypeptide sequence corresponding to polynucleotide sequence SEQ ID NO:2 is the first polypeptide sequence shown in the sequence listing. The second polypeptide sequence corresponds to the polynucleotide sequence shown as SEQ ID NO:3, and so on.

[0082] The polypeptide of the present invention can be composed of amino acids joined to each other by peptide bonds or modified peptide bonds, i.e., peptide isosteres, and may contain amino acids other than the 20 gene-encoded amino acids. The polypeptides may be modified by either natural processes, such as posttranslational processing, or by chemical modification techniques which are well known in the art. Such modifications are well described in basic texts and in more detailed monographs, as well as in a voluminous research literature. Modifications can occur anywhere in a polypeptide, including the peptide backbone, the amino acid side-chains and the amino or carboxyl termini. It will be appreciated that the same type of modification may be present in the same or varying degrees at several sites in a given polypeptide. Also, a given polypeptide may contain many types of modifications. Polypeptides may be branched, for example, as a result of ubiquitination, and they may be cyclic, with or without branching. Cyclic, branched, and branched cyclic polypeptides may result from posttranslation natural processes or may be made by synthetic methods. Modifications include acetylation, acylation, ADP-ribosylation, amidation, covalent attachment of flavin, covalent attachment of a heme moiety, covalent attachment of a nucleotide or nucleotide derivative, covalent attachment of a lipid or lipid derivative, covalent attachment of phosphotidylinositol, cross-linking, cyclization, disulfide bond formation, demethylation, formation of covalent cross-links, formation of cysteine, formation of pyroglutamate, formylation, gamma-carboxylation, glycosylation, GPI anchor formation, hydroxylation, iodination, methylation, myristoylation, oxidation, pegylation, proteolytic processing, phosphorylation, prenylation, racemization, selenoylation, sulfation, transfer-RNA mediated addition of amino acids to proteins such as arginylation, and ubiquitination. (See, for instance, PROTEINS—STRUCTURE AND MOLECULAR PROPERTIES, 2nd Ed., T. E. Creighton, W. H. Freeman and Company, New York (1993); POSTTRANSLATIONAL COVALENT MODIFICATION OF PROTEINS, B. C. Johnson, Ed., Academic Press, New York pgs. 1-12 (1983); Seifter et al., Meth. Enzymol. 182:626-646 (1990); Rattan et al., Ann. N.Y. Acad. Sci. 663:48-62 (1992)).

[0083] “SEQ ID NO:X” refers to a polynucleotide sequence described, for example, in Tables 1A, Table 1B, or Table 2, while “SEQ ID NO:Y” refers to a polypeptide sequence described in column 11 of Table 1A and or Table 1B. SEQ ID NO:X is identified by an integer specified in Table 1B. The polypeptide sequence SEQ ID NO:Y is a translated open reading frame (ORF) encoded by polynucleotide SEQ ID NO:X. “Clone ID:” refers to a cDNA clone described in column 2 of Table 1A and/or Table 1B.

[0084] “A polypeptide having functional activity” refers to a polypeptide capable of displaying one or more known functional activities associated with a full-length (complete) protein. Such functional activities include, but are not limited to, biological activity (e.g. activity useful in treating, preventing and/or ameliorating cardiovascular diseases and disorders), antigenicity (ability to bind [or compete with a polypeptide for binding] to an anti-polypeptide antibody), immunogenicity (ability to generate antibody which binds to a specific polypeptide of the invention), ability to form multimers with polypeptides of the invention, and ability to bind to a receptor or ligand for a polypeptide.

[0085] The polypeptides of the invention can be assayed for functional activity (e.g. biological activity) using or routinely modifying assays known in the art, as well as assays described herein. Specifically, one of skill in the art may routinely assay secreted polypeptides (including fragments and variants) of the invention for activity using assays as described in the examples section below.

[0086] “A polypeptide having biological activity” refers to a polypeptide exhibiting activity similar to, but not necessarily identical to, an activity of a polypeptide of the present invention, including mature forms, as measured in a particular biological assay, with or without dose dependency. In the case where dose dependency does exist, it need not be identical to that of the polypeptide, but rather substantially similar to the dose-dependence in a given activity as compared to the polypeptide of the present invention (i.e., the candidate polypeptide will exhibit greater activity or not more than about 25-fold less and, preferably, not more than about tenfold less activity, and most preferably, not more than about three-fold less activity relative to the polypeptide of the present invention).

TABLE 1A

| | | | | | | | | | 5′ | | | | | |
|---|---|---|---|---|---|---|---|---|---|---|---|---|---|---|
| | | | | | | | | | NT of | | | | | |
| | | | | NT | | 5′ | | 5′ | First | AA | First | Last | | |
| | | | | SEQ | | NT | 3′ | NT | AA | SEQ | AA | AA | First | Last |
| | | ATCC | | ID | Total | of | NT of | of | of | ID | of | of | AA of | AA |
| Gene | cDNA | Deposit No: Z | | NO: | NT | Clone | Clone | Start | Signal | NO: | Sig | Sig | Secreted | of |
| No. | Clone ID | and Date | Vector | X | Seq. | Seq. | Seq. | Codon | Pep | Y | Pep | Pep | Portion | ORF |
| 1 | H2CBU83 | 209889 | pBluescript SK− | 11 | 2703 | 1 | 2703 | 157 | 157 | 527 | 1 | 30 | 31 | 207 |
| | | May 22, 1998 | | | | | | | | | | | | |
| 1 | H2CBU83 | 209889 | pBluescript SK− | 348 | 2709 | 1 | 2709 | 157 | 157 | 864 | 1 | 30 | 31 | 51 |
| | | May 22, 1998 | | | | | | | | | | | | |
| 2 | H2MAC30 | 209299 | pBluescript SK− | 12 | 459 | 1 | 459 | 157 | 157 | 528 | 1 | 28 | 29 | 72 |
| | | Sep. 25, 1997 | | | | | | | | | | | | |
| 3 | H6EDC19 | 209324 | Uni-ZAP XR | 13 | 760 | 324 | 760 | 389 | 389 | 529 | 1 | 25 | 26 | 114 |
| | | Oct. 02, 1997 | | | | | | | | | | | | |
| 4 | HACBD91 | 209626 | Uni-ZAP XR | 14 | 1445 | 1 | 1445 | 117 | 117 | 530 | 1 | 42 | 43 | 49 |
| | | Feb. 12, 1998 | | | | | | | | | | | | |
| 5 | HAGAQ26 | 209368 | Uni-ZAP XR | 15 | 1333 | 157 | 1333 | 251 | 251 | 531 | 1 | 20 | 21 | 62 |
| | | Oct. 16, 1997 | | | | | | | | | | | | |
| 6 | HAGBZ81 | 209118 | Uni-ZAP XR | 16 | 1382 | 24 | 1382 | | 65 | 532 | 1 | 30 | 31 | 49 |
| | | Jun. 12, 1997 | | | | | | | | | | | | |
| 7 | HAGDG59 | 209277 | Uni-ZAP XR | 17 | 1734 | 44 | 1717 | 124 | 124 | 533 | 1 | 18 | 19 | 300 |
| | | Sep. 18, 1997 | | | | | | | | | | | | |
| 8 | HAGDS35 | 209299 | Uni-ZAP XR | 18 | 751 | 1 | 751 | 45 | 45 | 534 | 1 | 23 | 24 | 122 |
| | | Sep. 25, 1997 | | | | | | | | | | | | |
| 8 | HAGDS35 | 209299 | Uni-ZAP XR | 349 | 813 | 1 | 813 | 52 | 52 | 865 | 1 | 23 | 24 | 118 |
| | | Sep. 25, 1997 | | | | | | | | | | | | |
| 9 | HAGFG51 | 203364 | Uni-ZAP XR | 19 | 1313 | 1 | 1313 | 163 | 163 | 535 | 1 | 23 | 24 | 43 |
| | | Oct. 19, 1998 | | | | | | | | | | | | |
| 10 | HAIBO71 | 209145 | Uni-ZAP XR | 20 | 752 | 172 | 752 | 325 | 325 | 536 | 1 | 28 | 29 | 66 |
| | | Jul. 17, 1997 | | | | | | | | | | | | |
| 11 | HAIFL18 | 209852 | Uni-ZAP XR | 21 | 879 | 1 | 879 | 274 | 274 | 537 | 1 | 29 | 30 | 140 |
| | | May 07, 1998 | | | | | | | | | | | | |
| 12 | HAJAF57 | 203364 | pCMVSport 3.0 | 22 | 2761 | 1 | 2761 | 43 | 43 | 538 | 1 | 1 | 2 | 94 |
| | | Oct. 19, 1998 | | | | | | | | | | | | |
| 13 | HAJAN23 | PTA-322 | pCMVSport 3.0 | 23 | 2849 | 1 | 2849 | 109 | 109 | 539 | 1 | 15 | 16 | 563 |
| | | Jul. 09, 1999 | | | | | | | | | | | | |
| 13 | HAJAN23 | PTA-322 | pCMVSport 3.0 | 350 | 2288 | 1 | 2288 | 120 | 120 | 866 | 1 | 15 | 16 | 169 |
| | | Jul. 09, 1999 | | | | | | | | | | | | |
| 14 | HAJBR69 | 209626 | pCMVSport 3.0 | 24 | 755 | 1 | 755 | 262 | 262 | 540 | 1 | 19 | 20 | 53 |
| | | Feb. 12, 1998 | | | | | | | | | | | | |
| 15 | HAMFE15 | 203364 | pCMVSport 3.0 | 25 | 4129 | 1 | 4129 | 1495 | 1495 | 541 | 1 | 34 | 35 | 421 |
| | | Oct. 19, 1998 | | | | | | | | | | | | |
| 15 | HAMFE15 | 203364 | pCMVSport 3.0 | 351 | 3758 | 1 | 3758 | 226 | 226 | 867 | 1 | 23 | 24 | 47 |
| | | Oct. 19, 1998 | | | | | | | | | | | | |
| 16 | HAMGG68 | 209878 | pCMVSport 3.0 | 26 | 1458 | 1 | 1458 | 312 | 312 | 542 | 1 | 20 | 21 | 55 |
| | | May 18, 1998 | | | | | | | | | | | | |
| 17 | HAMGR28 | 209965 | pCMVSport 3.0 | 27 | 1674 | 47 | 1674 | 98 | 98 | 543 | 1 | 18 | 19 | 242 |
| | | Jun. 11, 1998 | | | | | | | | | | | | |
| 17 | HAMGR28 | 209965 | pCMVSport 3.0 | 352 | 1534 | 1 | 1534 | 40 | 40 | 868 | 1 | 18 | 19 | 203 |
| | | Jun. 11, 1998 | | | | | | | | | | | | |
| 18 | HAPOM49 | 209878 | Uni-ZAP XR | 28 | 2005 | 1 | 2005 | 251 | 251 | 544 | 1 | 22 | 23 | 189 |
| | | May 18, 1998 | | | | | | | | | | | | |
| 18 | HAPOM49 | 209878 | Uni-ZAP XR | 353 | 2664 | 1 | 2664 | 448 | 448 | 869 | 1 | 1 | 2 | 123 |
| | | May 18, 1998 | | | | | | | | | | | | |
| 19 | HAPPW30 | 209683 | Uni-ZAP XR | 29 | 1472 | 1 | 1472 | 59 | 59 | 545 | 1 | 22 | 23 | 264 |
| | | Mar. 20, 1998 | | | | | | | | | | | | |
| 19 | HAPPW30 | 209683 | Uni-ZAP XR | 354 | 1508 | 14 | 1501 | 54 | 54 | 870 | 1 | 22 | 23 | 91 |
| | | Mar. 20, 1998 | | | | | | | | | | | | |
| 20 | HATBR65 | 209626 | Uni-ZAP XR | 30 | 812 | 1 | 812 | 252 | 252 | 546 | 1 | 16 | 17 | 64 |
| | | Feb. 12, 1998 | | | | | | | | | | | | |
| 21 | HATCB92 | 209683 | Uni-ZAP XR | 31 | 1756 | 1 | 1756 | 247 | 247 | 547 | 1 | 37 | 38 | 56 |
| | | Mar. 20, 1998 | | | | | | | | | | | | |
| 22 | HATEE46 | 209407 | Uni-ZAP XR | 32 | 1675 | 136 | 863 | 241 | 241 | 548 | 1 | 21 | 22 | 53 |
| | | Oct. 23, 1997 | | | | | | | | | | | | |
| 23 | HAUAI83 | 209626 | Uni-ZAP XR | 33 | 910 | 1 | 886 | 253 | 253 | 549 | 1 | 18 | 19 | 49 |
| | | Feb. 12, 1998 | | | | | | | | | | | | |
| 23 | HAUAI83 | 209626 | Uni-ZAP XR | 355 | 1076 | 1 | 1076 | | 575 | 871 | 1 | 10 | 11 | 23 |
| | | Feb. 12, 1998 | | | | | | | | | | | | |
| 24 | HBAMB15 | 209683 | pSport1 | 34 | 821 | 330 | 821 | 390 | 390 | 550 | 1 | 19 | 20 | 59 |
| | | Mar. 20, 1998 | | | | | | | | | | | | |
| 25 | HBGBA69 | 209878 | Uni-ZAP XR | 35 | 981 | 1 | 981 | 124 | 124 | 551 | 1 | 38 | 39 | 240 |
| | | May 18, 1998 | | | | | | | | | | | | |
| 25 | HBGBA69 | 209878 | Uni-ZAP XR | 356 | 943 | 1 | 933 | 62 | 62 | 872 | 1 | 38 | 39 | 60 |
| | | May 18, 1998 | | | | | | | | | | | | |
| 26 | HBIAE26 | 209224 | Uni-ZAP XR | 36 | 1038 | 1 | 1038 | 75 | 75 | 552 | 1 | 18 | 19 | 39 |
| | | Aug. 28, 1997 | | | | | | | | | | | | |
| 27 | HBINS58 | PTA-885 | pCMVSport 3.0 | 37 | 843 | 1 | 843 | 57 | 57 | 553 | 1 | 30 | 31 | 174 |
| | | Oct. 28, 1999 | | | | | | | | | | | | |
| 27 | HBINS58 | PTA-885 | pCMVSport 3.0 | 357 | 1566 | 1 | 1566 | 71 | 71 | 873 | 1 | 29 | 30 | 173 |
| | | Oct. 28, 1999 | | | | | | | | | | | | |
| 27 | HBINS58 | PTA-885 | pCMVSport 3.0 | 358 | 1067 | 1 | 1067 | 100 | 100 | 874 | 1 | 29 | 30 | 210 |
| | | Oct. 28, 1999 | | | | | | | | | | | | |
| 28 | HBJNC59 | PTA-622 | Uni-ZAP XR | 38 | 1061 | 1 | 1061 | 66 | 66 | 554 | 1 | 22 | 23 | 245 |
| | | Sep. 02, 1999 | | | | | | | | | | | | |
| 28 | HBJNC59 | PTA-622 | Uni-ZAP XR | 359 | 1021 | 1 | 1021 | 66 | 66 | 875 | 1 | 22 | 23 | 99 |
| | | Sep. 02, 1999 | | | | | | | | | | | | |
| 28 | HBJNC59 | PTA-622 | Uni-ZAP XR | 360 | 1086 | 1 | 1023 | 64 | 64 | 876 | 1 | 22 | 23 | 245 |
| | | Sep. 02, 1999 | | | | | | | | | | | | |
| 29 | HBNAW17 | 209242 | Uni-ZAP XR | 39 | 601 | 1 | 601 | 77 | 77 | 555 | 1 | 37 | 38 | 61 |
| | | Sep. 12, 1997 | | | | | | | | | | | | |
| 30 | HBOEG69 | 203081 | pSport1 | 40 | 1411 | 1 | 1411 | 302 | 302 | 556 | 1 | 19 | 20 | 54 |
| | | Jul. 30, 1998 | | | | | | | | | | | | |
| 31 | HCACU58 | 209626 | Uni-ZAP XR | 41 | 1554 | 1 | 1554 | 137 | 137 | 557 | 1 | 30 | 31 | 83 |
| | | Feb. 12, 1998 | | | | | | | | | | | | |
| 32 | HCE2F54 | 209626 | Uni-ZAP XR | 42 | 1276 | 19 | 1256 | 166 | 166 | 558 | 1 | 19 | 20 | 319 |
| | | Feb. 12, 1998 | | | | | | | | | | | | |
| 33 | HCE3G69 | 209878 | Uni-ZAP XR | 43 | 2084 | 1 | 2084 | 165 | 165 | 559 | 1 | 19 | 20 | 336 |
| | | May 18, 1998 | | | | | | | | | | | | |
| 33 | HCE3G69 | 209878 | Uni-ZAP XR | 361 | 2078 | 1 | 2078 | 165 | 165 | 877 | 1 | 19 | 20 | 105 |
| | | May 18, 1998 | | | | | | | | | | | | |
| 34 | HCE5F43 | 209580 | Uni-ZAP XR | 44 | 1765 | 1 | 1765 | 113 | 113 | 560 | 1 | 20 | 21 | 272 |
| | | Jan. 14, 1998 | | | | | | | | | | | | |
| 35 | HCEFB80 | PTA-2069 | Uni-ZAP XR | 45 | 2494 | 1 | 2494 | 12 | 12 | 561 | 1 | 35 | 36 | 89 |
| | | Jun. 09, 2000 | | | | | | | | | | | | |
| 35 | HCEFB80 | PTA-2069 | Uni-ZAP XR | 362 | 2494 | 1 | 2451 | 5 | 5 | 878 | 1 | 35 | 36 | 89 |
| | | Jun. 09, 2000 | | | | | | | | | | | | |
| 36 | HCENK38 | 209651 | Uni-ZAP XR | 46 | 1509 | 1 | 1509 | 10 | 10 | 562 | 1 | 28 | 29 | 52 |
| | | Mar. 04, 1998 | | | | | | | | | | | | |
| 37 | HCEWE20 | 209300 | Uni-ZAP XR | 47 | 885 | 13 | 885 | 166 | 166 | 563 | 1 | 18 | 19 | 51 |
| | | Sep. 25, 1997 | | | | | | | | | | | | |
| 38 | HCFNN01 | 209086 | pSport1 | 48 | 1261 | 154 | 1261 | 254 | 254 | 564 | 1 | 27 | 28 | 43 |
| | | May 29, 1997 | | | | | | | | | | | | |
| 39 | HCGMD59 | 209627 | pCMVSport 2.0 | 49 | 790 | 1 | 780 | 438 | 438 | 565 | 1 | 30 | 31 | 74 |
| | | Feb. 12, 1998 | | | | | | | | | | | | |
| 40 | HCHNF25 | 209651 | pSport1 | 50 | 3576 | 1 | 3576 | 1130 | 1130 | 566 | 1 | 30 | 31 | 169 |
| | | Mar. 04, 1998 | | | | | | | | | | | | |
| 40 | HCHNF25 | 209651 | pSport1 | 363 | 807 | 1 | 807 | 180 | 180 | 879 | 1 | 30 | 31 | 147 |
| | | Mar. 04, 1998 | | | | | | | | | | | | |
| 41 | HCNDR47 | PTA-855 | Lambda ZAP II | 51 | 1343 | 1 | 1343 | 21 | 21 | 567 | 1 | 24 | 25 | 127 |
| | | Oct. 18, 1999 | | | | | | | | | | | | |
| 41 | HCNDR47 | PTA-855 | Lambda ZAP II | 364 | 845 | 1 | 845 | 124 | 124 | 880 | 1 | 47 | 48 | 127 |
| | | Oct. 18, 1999 | | | | | | | | | | | | |
| 41 | HCNDR47 | PTA-855 | Lambda ZAP II | 365 | 738 | 1 | 738 | | 603 | 881 | 1 | 8 | 9 | 9 |
| | | Oct. 18, 1999 | | | | | | | | | | | | |
| 42 | HCNSB61 | 209242 | pBluescript | 52 | 712 | 1 | 712 | 218 | 218 | 568 | 1 | 21 | 22 | 43 |
| | | Sep. 12, 1997 | | | | | | | | | | | | |
| 43 | HCNSM70 | 209580 | pBluescript | 53 | 1089 | 1 | 1089 | 107 | 107 | 569 | 1 | 26 | 27 | 215 |
| | | Jan. 14, 1998 | | | | | | | | | | | | |
| 43 | HCNSM70 | 209580 | pBluescript | 366 | 1145 | 62 | 1145 | 161 | 161 | 882 | 1 | 26 | 27 | 91 |
| | | Jan. 14, 1998 | | | | | | | | | | | | |
| 44 | HCUCK44 | 209853 | ZAP Express | 54 | 1139 | 573 | 1133 | 593 | 593 | 570 | 1 | 30 | 31 | 60 |
| | | May 07, 1998 | | | | | | | | | | | | |
| 45 | HCUEO60 | 209215 | ZAP Express | 55 | 1222 | 1 | 1222 | 102 | 102 | 571 | 1 | 34 | 35 | 64 |
| | | Aug. 21, 1997 | | | | | | | | | | | | |
| 46 | HCUHK65 | 209641 | ZAP Express | 56 | 367 | 1 | 367 | 80 | 80 | 572 | 1 | 26 | 27 | 79 |
| | | Feb. 25, 1998 | | | | | | | | | | | | |
| 46 | HCUHK65 | 209641 | ZAP Express | 367 | 3113 | 2577 | 2946 | 770 | 770 | 883 | 1 | 30 | 31 | 708 |
| | | Feb. 25, 1998 | | | | | | | | | | | | |
| 47 | HCUIM65 | 209324 | ZAP Express | 57 | 875 | 331 | 736 | 557 | 557 | 573 | 1 | 27 | 28 | 47 |
| | | Oct. 02, 1997 | | | | | | | | | | | | |
| 48 | HCWDS72 | 209852 | ZAP Express | 58 | 320 | 1 | 320 | 19 | 19 | 574 | 1 | 17 | 18 | 100 |
| | | May 07, 1998 | | | | | | | | | | | | |
| 49 | HCWGU37 | PTA-883 | ZAP Express | 59 | 2777 | 1 | 2777 | 194 | 194 | 575 | 1 | | | 10 |
| | | Oct. 28, 1999 | | | | | | | | | | | | |
| 49 | HCWGU37 | PTA-883 | ZAP Express | 368 | 1651 | 1 | 1651 | 187 | 187 | 884 | 1 | | | 10 |
| | | Oct. 28, 1999 | | | | | | | | | | | | |
| 50 | HCWKC15 | 209324 | ZAP Express | 60 | 710 | 1 | 710 | 37 | 37 | 576 | 1 | 18 | 19 | 40 |
| | | Oct. 02, 1997 | | | | | | | | | | | | |
| 51 | HCWLD74 | 209626 | ZAP Express | 61 | 1540 | 1 | 1540 | 138 | 138 | 577 | 1 | 21 | 22 | 65 |
| | | Feb. 12, 1998 | | | | | | | | | | | | |
| 52 | HDHEB60 | 209215 | pCMVSport 2.0 | 62 | 1421 | 235 | 1421 | 568 | 568 | 578 | 1 | 24 | 25 | 108 |
| | | Aug. 21, 1997 | | | | | | | | | | | | |
| 53 | HDLAC10 | 209745 | pCMVSport 2.0 | 63 | 1477 | 1 | 1477 | 132 | 132 | 579 | 1 | 29 | 30 | 81 |
| | | Apr. 07, 1998 | | | | | | | | | | | | |
| 54 | HDPBA28 | PTA-163 | pCMVSport 3.0 | 64 | 3447 | 197 | 3447 | 259 | 259 | 580 | 1 | 32 | 33 | 941 |
| | | Jun. 01, 1999 | | | | | | | | | | | | |
| 54 | HDPBA28 | PTA-163 | pCMVSport 3.0 | 369 | 4909 | 1 | 4909 | 69 | 69 | 885 | 1 | 32 | 33 | 941 |
| | | Jun. 01, 1999 | | | | | | | | | | | | |
| 55 | HDPBQ71 | 209877 | pCMVSport 3.0 | 65 | 2312 | 1 | 2312 | 93 | 93 | 581 | 1 | 33 | 34 | 612 |
| | | May 18, 1998 | | | | | | | | | | | | |
| 55 | HDPBQ71 | 209877 | pCMVSport 3.0 | 370 | 2242 | 6 | 2242 | 24 | 24 | 886 | 1 | 33 | 34 | 612 |
| | | May 18, 1998 | | | | | | | | | | | | |
| 55 | HDPBQ71 | 209877 | pCMVSport 3.0 | 371 | 2381 | 146 | 2381 | 165 | 165 | 887 | 1 | 33 | 34 | 456 |
| | | May 18, 1998 | | | | | | | | | | | | |
| 56 | HDPCL63 | PTA-1544 | pCMVSport 3.0 | 66 | 3037 | 115 | 3037 | 35 | 35 | 582 | 1 | 58 | 59 | 267 |
| | | Mar. 21, 2000 | | | | | | | | | | | | |
| 56 | HDPCL63 | PTA-1544 | pCMVSport 3.0 | 372 | 2921 | 1 | 2921 | 260 | 260 | 888 | 1 | 17 | 18 | 157 |
| | | Mar. 21, 2000 | | | | | | | | | | | | |
| 56 | HDPCL63 | PTA-1544 | pCMVSport 3.0 | 373 | 1259 | 358 | 1259 | | 605 | 889 | 1 | 6 | 7 | 118 |
| | | Mar. 21, 2000 | | | | | | | | | | | | |
| 57 | HDPCO25 | 209125 | pCMVSport 3.0 | 67 | 767 | 76 | 767 | 182 | 182 | 583 | 1 | 20 | 21 | 53 |
| | | Jun. 19, 1997 | | | | | | | | | | | | |
| 58 | HDPFF39 | 209511 | pCMVSport 3.0 | 68 | 1256 | 1 | 1256 | 175 | 175 | 584 | 1 | 18 | 19 | 196 |
| | | Dec. 03, 1997 | | | | | | | | | | | | |
| 59 | HDPFP29 | 209626 | pCMVSport 3.0 | 69 | 1057 | 1 | 1057 | 293 | 293 | 585 | 1 | 30 | 31 | 52 |
| | | Feb. 12, 1998 | | | | | | | | | | | | |
| 60 | HDPGI49 | 203070 | pCMVSport 3.0 | 70 | 2683 | 1 | 2640 | 266 | 266 | 586 | 1 | 29 | 30 | 72 |
| | | Jul. 27, 1998 | | | | | | | | | | | | |
| 61 | HDPGT01 | 203027 | pCMVSport 3.0 | 71 | 2687 | 138 | 2687 | 8 | 8 | 587 | 1 | 28 | 29 | 87 |
| | | Jun. 26, 1998 | | | | | | | | | | | | |
| 62 | HDPHI51 | 209125 | pCMVSport 3.0 | 72 | 728 | 1 | 728 | 245 | 245 | 588 | 1 | 30 | 31 | 40 |
| | | Jun. 19, 1997 | | | | | | | | | | | | |
| 63 | HDPJM30 | 209563 | pCMVSport 3.0 | 73 | 1635 | 308 | 1633 | 59 | 59 | 589 | 1 | 59 | 60 | 525 |
| | | Dec. 18, 1997 | | | | | | | | | | | | |
| 63 | HDPJM30 | 209563 | pCMVSport 3.0 | 374 | 1314 | 1 | 1313 | 259 | 259 | 890 | 1 | 20 | 21 | 59 |
| | | Dec. 18, 1997 | | | | | | | | | | | | |
| 64 | HDPMM88 | PTA-848 | pCMVSport 3.0 | 74 | 4893 | 1 | 4893 | 100 | 100 | 590 | 1 | 37 | 38 | 937 |
| | | Oct. 13, 1999 | | | | | | | | | | | | |
| 64 | HDPMM88 | PTA-848 | pCMVSport 3.0 | 375 | 468 | 1 | 468 | 141 | 141 | 891 | 1 | 20 | 21 | 109 |
| | | Oct. 13, 1999 | | | | | | | | | | | | |
| 64 | HDPMM88 | PTA-848 | pCMVSport 3.0 | 376 | 181 | 1 | 181 | | 44 | 892 | 1 | 7 | 8 | 46 |
| | | Oct. 13, 1999 | | | | | | | | | | | | |
| 64 | HDPMM88 | PTA-848 | pCMVSport 3.0 | 377 | 612 | 1 | 612 | | 419 | 893 | 1 | | | 6 |
| | | Oct. 13, 1999 | | | | | | | | | | | | |
| 64 | HDPMM88 | PTA-848 | pCMVSport 3.0 | 378 | 1024 | 1 | 1024 | | 111 | 894 | 1 | 5 | 6 | 11 |
| | | Oct. 13, 1999 | | | | | | | | | | | | |
| 64 | HDPMM88 | PTA-848 | pCMVSport 3.0 | 379 | 366 | 18 | 321 | | 167 | 895 | 1 | 1 | 2 | 56 |
| | | Oct. 13, 1999 | | | | | | | | | | | | |
| 64 | HDPMM88 | PTA-848 | pCMVSport 3.0 | 380 | 519 | 1 | 519 | | 28 | 896 | 1 | 1 | 2 | 53 |
| | | Oct. 13, 1999 | | | | | | | | | | | | |
| 65 | HDPNC61 | 209627 | pCMVSport 3.0 | 75 | 1410 | 1 | 1410 | 20 | 20 | 591 | 1 | 22 | 23 | 94 |
| | | Feb. 12, 1998 | | | | | | | | | | | | |
| 66 | HDPOJ08 | 209878 | pCMVSport 3.0 | 76 | 1655 | 1 | 1655 | 159 | 159 | 592 | 1 | 18 | 19 | 122 |
| | | May 18, 1998 | | | | | | | | | | | | |
| 67 | HDPOZ56 | 209889 | pCMVSport 3.0 | 77 | 1905 | 1 | 1905 | 91 | 91 | 593 | 1 | 21 | 22 | 567 |
| | | May 22, 1998 | | | | | | | | | | | | |
| 67 | HDPOZ56 | 209889 | pCMVSport 3.0 | 381 | 1867 | 415 | 1867 | 103 | 103 | 897 | 1 | 21 | 22 | 566 |
| | | May 22, 1998 | | | | | | | | | | | | |
| 67 | HDPOZ56 | 209889 | pCMVSport 3.0 | 382 | 1722 | 1 | 1722 | 59 | 59 | 898 | 1 | 21 | 22 | 319 |
| | | May 22, 1998 | | | | | | | | | | | | |
| 68 | HDPPN86 | PTA-867 | pCMVSport 3.0 | 78 | 6297 | 1 | 6297 | 127 | 127 | 594 | 1 | 32 | 33 | 46 |
| | | Oct. 26, 1999 | | | | | | | | | | | | |
| 68 | HDPPN86 | PTA-867 | pCMVSport 3.0 | 383 | 2042 | 1 | 2042 | 117 | 117 | 899 | 1 | 26 | 27 | 46 |
| | | Oct. 26, 1999 | | | | | | | | | | | | |
| 69 | HDPSB18 | PTA-868 | pCMVSport 3.0 | 79 | 3408 | 1 | 3408 | 123 | 123 | 595 | 1 | 18 | 19 | 66 |
| | | Oct. 26, 1999 | | | | | | | | | | | | |
| 69 | HDPSB18 | PTA-868 | pCMVSport 3.0 | 384 | 308 | 1 | 308 | | 116 | 900 | 1 | 17 | 18 | 64 |
| | | Oct. 26, 1999 | | | | | | | | | | | | |
| 69 | HDPSB18 | PTA-868 | pCMVSport 3.0 | 385 | 1568 | 1 | 1568 | | 1525 | 901 | 1 | 7 | 8 | 14 |
| | | Oct. 26, 1999 | | | | | | | | | | | | |
| 69 | HDPSB18 | PTA-868 | pCMVSport 3.0 | 386 | 865 | 1 | 865 | | 345 | 902 | 1 | 1 | 2 | 107 |
| | | Oct. 26, 1999 | | | | | | | | | | | | |
| 70 | HDPSH53 | PTA-868 | pCMVSport 3.0 | 80 | 1663 | 1 | 1663 | 158 | 158 | 596 | 1 | 19 | 20 | 90 |
| | | Oct. 26, 1999 | | | | | | | | | | | | |
| 70 | HDPSH53 | PTA-868 | pCMVSport 3.0 | 387 | 1687 | 1 | 1687 | 153 | 153 | 903 | 1 | 19 | 20 | 127 |
| | | Oct. 26, 1999 | | | | | | | | | | | | |
| 70 | HDPSH53 | PTA-868 | pCMVSport 3.0 | 388 | 570 | 1 | 570 | 212 | 212 | 904 | 1 | 19 | 20 | 90 |
| | | Oct. 26, 1999 | | | | | | | | | | | | |
| 71 | HDPSP01 | 209745 | pCMVSport 3.0 | 81 | 2343 | 1 | 2343 | 184 | 184 | 597 | 1 | 20 | 21 | 710 |
| | | Apr. 07, 1998 | | | | | | | | | | | | |
| 71 | HDPSP01 | 209745 | pCMVSport 3.0 | 389 | 1752 | 1 | 1752 | 227 | 227 | 905 | 1 | 20 | 21 | 308 |
| | | Apr. 07, 1998 | | | | | | | | | | | | |
| 72 | HDPSP54 | 209782 | pCMVSport 3.0 | 82 | 3091 | 2304 | 3091 | 2356 | 2356 | 598 | 1 | 18 | 19 | 48 |
| | | Apr. 20, 1998 | | | | | | | | | | | | |
| 72 | HDPSP54 | 209782 | pCMVSport 3.0 | 390 | 536 | 1 | 536 | 179 | 179 | 906 | 1 | 41 | 42 | 55 |
| | | Apr. 20, 1998 | | | | | | | | | | | | |
| 73 | HDPTD15 | 209782 | pCMVSport 3.0 | 83 | 1396 | 1 | 1396 | 223 | 223 | 599 | 1 | 18 | 19 | 200 |
| | | Apr. 20, 1998 | | | | | | | | | | | | |
| 74 | HDPUW68 | 203331 | pCMVSport 3.0 | 84 | 1748 | 1 | 1748 | 40 | 40 | 600 | 1 | 18 | 19 | 467 |
| | | Oct. 08, 1998 | | | | | | | | | | | | |
| 75 | HDPWN93 | PTA-868 | pCMVSport 3.0 | 85 | 2679 | 1 | 2669 | 45 | 45 | 601 | 1 | 19 | 20 | 802 |
| | | Oct. 26, 1999 | | | | | | | | | | | | |
| 75 | HDPWN93 | PTA-868 | pCMVSport 3.0 | 391 | 716 | 1 | 716 | 35 | 35 | 907 | 1 | 19 | 20 | 214 |
| | | Oct. 26, 1999 | | | | | | | | | | | | |
| 75 | HDPWN93 | PTA-868 | pCMVSport 3.0 | 392 | 2716 | 26 | 2716 | 27 | 27 | 908 | 1 | 19 | 20 | 43 |
| | | Oct. 26, 1999 | | | | | | | | | | | | |
| 76 | HDPXY01 | PTA-868 | pCMVSport 3.0 | 86 | 766 | 1 | 766 | 23 | 23 | 602 | 1 | 37 | 38 | 98 |
| | | Oct. 26, 1999 | | | | | | | | | | | | |
| 76 | HDPXY01 | PTA-868 | pCMVSport 3.0 | 393 | 2409 | 1 | 2409 | 33 | 33 | 909 | 1 | 37 | 38 | 98 |
| | | Oct. 26, 1999 | | | | | | | | | | | | |
| 76 | HDPXY01 | PTA-868 | pCMVSport 3.0 | 394 | 737 | 1 | 423 | | 539 | 910 | 1 | 9 | 10 | 22 |
| | | Oct. 26, 1999 | | | | | | | | | | | | |
| 76 | HDPXY01 | PTA-868 | pCMVSport 3.0 | 395 | 1471 | 105 | 1471 | | 1190 | 911 | 1 | 16 | 17 | 25 |
| | | Oct. 26, 1999 | | | | | | | | | | | | |
| 77 | HDTBD53 | PTA-848 | pCMVSport 2.0 | 87 | 2803 | 1 | 2803 | 288 | 288 | 603 | 1 | 22 | 23 | 365 |
| | | Oct. 13, 1999 | | | | | | | | | | | | |
| 77 | HDTBD53 | PTA-848 | pCMVSport 2.0 | 396 | 3302 | 1 | 2718 | 292 | 292 | 912 | 1 | 22 | 23 | 365 |
| | | Oct. 13, 1999 | | | | | | | | | | | | |
| 78 | HDTBV77 | 203070 | pCMVSport 2.0 | 88 | 2181 | 1 | 2181 | 326 | 326 | 604 | 1 | 22 | 23 | 608 |
| | | Jul. 27, 1998 | | | | | | | | | | | | |
| 79 | HDTDQ23 | 209965 | pCMVSport 2.0 | 89 | 2207 | 1 | 2207 | 132 | 132 | 605 | 1 | 20 | 21 | 56 |
| | | Jun. 11, 1998 | | | | | | | | | | | | |
| 79 | HDTDQ23 | 209965 | pCMVSport 2.0 | 397 | 2227 | 1 | 2206 | 148 | 148 | 913 | 1 | 20 | 21 | 108 |
| | | Jun. 11, 1998 | | | | | | | | | | | | |
| 79 | HDTDQ23 | 209965 | pCMVSport 2.0 | 398 | 2214 | 1 | 2206 | 148 | 148 | 914 | 1 | 20 | 21 | 73 |
| | | Jun. 11, 1998 | | | | | | | | | | | | |
| 80 | HE2DE47 | 97923 | Uni-ZAP XR | 90 | 3533 | 2821 | 3532 | 808 | 808 | 606 | 1 | 30 | 31 | 540 |
| | | Mar. 07, 1997 | | | | | | | | | | | | |
| | | 209071 | | | | | | | | | | | | |
| | | May 22, 1997 | | | | | | | | | | | | |
| 80 | HE2DE47 | 97923 | Uni-ZAP XR | 399 | 1145 | 435 | 1115 | 515 | 515 | 915 | 1 | 22 | 23 | 81 |
| | | Mar. 07, 1997 | | | | | | | | | | | | |
| | | 209071 | | | | | | | | | | | | |
| | | May 22, 1997 | | | | | | | | | | | | |
| 81 | HE2EB74 | 209225 | Uni-ZAP XR | 91 | 1434 | 311 | 1418 | 507 | 507 | 607 | 1 | 15 | 16 | 19 |
| | | Aug. 28, 1997 | | | | | | | | | | | | |
| 82 | HE2NV57 | 209877 | Uni-ZAP XR | 92 | 867 | 1 | 867 | 99 | 99 | 608 | 1 | 36 | 37 | 99 |
| | | May 18, 1998 | | | | | | | | | | | | |
| 83 | HE2PH36 | 209603 | Uni-ZAP XR | 93 | 1558 | 1 | 1558 | 28 | 28 | 609 | 1 | 21 | 22 | 66 |
| | | Jan. 29, 1998 | | | | | | | | | | | | |
| 84 | HE8DS15 | PTA-1544 | Uni-ZAP XR | 94 | 2199 | 1 | 2199 | 91 | 91 | 610 | 1 | 24 | 25 | 72 |
| | | Mar. 21, 2000 | | | | | | | | | | | | |
| 85 | HE9CP41 | 209368 | Uni-ZAP XR | 95 | 1392 | 1 | 1392 | 132 | 132 | 611 | 1 | 20 | 21 | 41 |
| | | Oct. 16, 1997 | | | | | | | | | | | | |
| 86 | HE9DG49 | 97923 | Uni-ZAP XR | 96 | 717 | 1 | 717 | 70 | 70 | 612 | 1 | 28 | 29 | 201 |
| | | Mar. 07, 1997 | | | | | | | | | | | | |
| | | 209071 | | | | | | | | | | | | |
| | | May 22, 1997 | | | | | | | | | | | | |
| 86 | HE9DG49 | 97923 | Uni-ZAP XR | 400 | 717 | 1 | 717 | 70 | 70 | 916 | 1 | 27 | 28 | 201 |
| | | Mar. 07, 1997 | | | | | | | | | | | | |
| | | 209071 | | | | | | | | | | | | |
| | | May 22, 1997 | | | | | | | | | | | | |
| 86 | HE9DG49 | 97923 | Uni-ZAP XR | 401 | 713 | 17 | 713 | 78 | 78 | 917 | 1 | 28 | 29 | 203 |
| | | Mar. 07, 1997 | | | | | | | | | | | | |
| | | 209071 | | | | | | | | | | | | |
| | | May 22, 1997 | | | | | | | | | | | | |
| 87 | HE9HY07 | 209010 | Uni-ZAP XR | 97 | 832 | 1 | 832 | 35 | 35 | 613 | 1 | 26 | 27 | 41 |
| | | Apr. 28, 1997 | | | | | | | | | | | | |
| | | 209085 | | | | | | | | | | | | |
| | | May 29, 1997 | | | | | | | | | | | | |
| 88 | HEBEJ18 | 203069 | Uni-ZAP XR | 98 | 685 | 7 | 649 | 51 | 51 | 614 | 1 | 15 | 16 | 139 |
| | | Jul. 27, 1998 | | | | | | | | | | | | |
| 89 | HEEAQ11 | 203071 | Uni-ZAP XR | 99 | 921 | 1 | 921 | 213 | 213 | 615 | 1 | 28 | 29 | 147 |
| | | Jul. 27, 1998 | | | | | | | | | | | | |
| 90 | HEGAH43 | 209277 | Uni-ZAP XR | 100 | 442 | 1 | 442 | 29 | 29 | 616 | 1 | 20 | 21 | 111 |
| | | Sep. 18, 1997 | | | | | | | | | | | | |
| 91 | HELHD85 | PTA-1544 | Uni-ZAP XR | 101 | 1886 | 1 | 1886 | 41 | 41 | 617 | 1 | 25 | 26 | 79 |
| | | Mar. 21, 2000 | | | | | | | | | | | | |
| 92 | HEOMQ63 | 209563 | pSport1 | 102 | 1336 | 1 | 1336 | 123 | 123 | 618 | 1 | 23 | 24 | 47 |
| | | Dec. 18, 1997 | | | | | | | | | | | | |
| 93 | HEPAA46 | 209551 | Uni-ZAP XR | 103 | 1129 | 1 | 1129 | 18 | 18 | 619 | 1 | 20 | 21 | 123 |
| | | Dec. 12, 1997 | | | | | | | | | | | | |
| 94 | HEPAB80 | 209423 | Uni-ZAP XR | 104 | 799 | 1 | 799 | 73 | 73 | 620 | 1 | 28 | 29 | 121 |
| | | Oct. 30, 1997 | | | | | | | | | | | | |
| 94 | HEPAB80 | 209423 | Uni-ZAP XR | 402 | 802 | 1 | 802 | 67 | 67 | 918 | 1 | 28 | 29 | 122 |
| | | Oct. 30, 1997 | | | | | | | | | | | | |
| 95 | HFABG18 | PTA-1544 | Uni-ZAP XR | 105 | 1345 | 1 | 1345 | 53 | 53 | 621 | 1 | 26 | 27 | 87 |
| | | Mar. 21, 2000 | | | | | | | | | | | | |
| 96 | HFABH95 | 209407 | Uni-ZAP XR | 106 | 1347 | 1 | 1347 | 199 | 199 | 622 | 1 | 21 | 22 | 116 |
| | | Oct. 23, 1997 | | | | | | | | | | | | |
| 97 | HFAEF57 | 209277 | Uni-ZAP XR | 107 | 642 | 1 | 642 | 232 | 232 | 623 | 1 | 42 | 43 | 86 |
| | | Sep. 18, 1997 | | | | | | | | | | | | |
| 98 | HFAMH77 | 209300 | Uni-ZAP XR | 108 | 669 | 96 | 669 | 240 | 240 | 624 | 1 | 33 | 34 | 61 |
| | | Sep. 25, 1997 | | | | | | | | | | | | |
| 99 | HFCCQ50 | 209463 | Uni-ZAP XR | 109 | 1271 | 1 | 1271 | 47 | 47 | 625 | 1 | 20 | 21 | 352 |
| | | Nov. 14, 1997 | | | | | | | | | | | | |
| 100 | HFCEB37 | 209008 | Uni-ZAP XR | 110 | 802 | 352 | 802 | | 487 | 626 | 1 | | | 10 |
| | | Apr. 28, 1997 | | | | | | | | | | | | |
| | | 209084 | | | | | | | | | | | | |
| | | May 29, 1997 | | | | | | | | | | | | |
| 101 | HFFAD59 | 209242 | Lambda ZAP II | 111 | 470 | 1 | 470 | 44 | 44 | 627 | 1 | 17 | 18 | 45 |
| | | Sep. 12, 1997 | | | | | | | | | | | | |
| 102 | HFFAL36 | 209368 | Lambda ZAP II | 112 | 1020 | 1 | 1020 | 68 | 68 | 628 | 1 | 35 | 36 | 56 |
| | | Oct. 16, 1997 | | | | | | | | | | | | |
| 103 | HFGAD82 | 209225 | Uni-ZAP XR | 113 | 1881 | 772 | 1861 | 1019 | 1019 | 629 | 1 | 18 | 19 | 38 |
| | | Aug. 28, 1997 | | | | | | | | | | | | |
| 104 | HFIUR10 | 209277 | pSport1 | 114 | 541 | 1 | 541 | 50 | 50 | 630 | 1 | 22 | 23 | 44 |
| | | Sep. 18, 1997 | | | | | | | | | | | | |
| 105 | HFTBM50 | 209300 | Uni-ZAP XR | 115 | 762 | 1 | 740 | 158 | 158 | 631 | 1 | 20 | 21 | 34 |
| | | Sep. 25, 1997 | | | | | | | | | | | | |
| 106 | HFTDZ36 | 209300 | Uni-ZAP XR | 116 | 1103 | 231 | 1103 | 547 | 547 | 632 | 1 | 22 | 23 | 68 |
| | | Sep. 25, 1997 | | | | | | | | | | | | |
| 107 | HFVAB79 | 209368 | Uni-ZAP XR | 117 | 1175 | 1 | 1175 | 133 | 133 | 633 | 1 | 15 | 16 | 194 |
| | | Oct. 16, 1997 | | | | | | | | | | | | |
| 107 | HFVAB79 | 209368 | Uni-ZAP XR | 403 | 1186 | 1 | 1186 | 139 | 139 | 919 | 1 | 15 | 16 | 194 |
| | | Oct. 16, 1997 | | | | | | | | | | | | |
| 108 | HFVGE32 | PTA-844 | pBluescript | 118 | 572 | 1 | 572 | 154 | 154 | 634 | 1 | 32 | 33 | 79 |
| | | Oct. 13, 1999 | | | | | | | | | | | | |
| 108 | HFVGE32 | PTA-844 | pBluescript | 404 | 470 | 2 | 470 | | 1 | 920 | 1 | 1 | 2 | 67 |
| | | Oct. 13, 1999 | | | | | | | | | | | | |
| 109 | HFXBL33 | 203071 | Lambda ZAP II | 119 | 1633 | 1 | 1633 | 152 | 152 | 635 | 1 | 24 | 25 | 162 |
| | | Jul. 27, 1998 | | | | | | | | | | | | |
| 110 | HFXDN63 | 209346 | Lambda ZAP II | 120 | 1026 | 1 | 1026 | 33 | 33 | 636 | 1 | 14 | 15 | 53 |
| | | Oct. 09, 1997 | | | | | | | | | | | | |
| 111 | HFXJX44 | 209782 | Lambda ZAP II | 121 | 1384 | 1 | 1384 | 98 | 98 | 637 | 1 | 18 | 19 | 47 |
| | | Apr. 20, 1998 | | | | | | | | | | | | |
| 112 | HFXKJ03 | 209215 | Lambda ZAP II | 122 | 941 | 1 | 941 | 179 | 179 | 638 | 1 | 33 | 34 | 41 |
| | | Aug. 21, 1997 | | | | | | | | | | | | |
| 113 | HFXKT05 | 209651 | Lambda ZAP II | 123 | 1715 | 1 | 1715 | 204 | 204 | 639 | 1 | 18 | 19 | 79 |
| | | Mar. 04, 1998 | | | | | | | | | | | | |
| 114 | HGBHI35 | 209423 | Uni-ZAP XR | 124 | 1437 | 71 | 1276 | 87 | 87 | 640 | 1 | 16 | 17 | 292 |
| | | Oct. 30, 1997 | | | | | | | | | | | | |
| 115 | HGBIB74 | 203648 | Uni-ZAP XR | 125 | 1816 | 1 | 1804 | 14 | 14 | 641 | 1 | 23 | 24 | 377 |
| | | Feb. 09, 1999 | | | | | | | | | | | | |
| 115 | HGBIB74 | 203648 | Uni-ZAP XR | 405 | 1821 | 1 | 1821 | 28 | 28 | 921 | 1 | 20 | 21 | 170 |
| | | Feb. 09, 1999 | | | | | | | | | | | | |
| 115 | HGBIB74 | 203648 | Uni-ZAP XR | 406 | 1094 | 1 | 1094 | | 2 | 922 | 1 | 1 | 2 | 151 |
| | | Feb. 09, 1999 | | | | | | | | | | | | |
| 116 | HGLAF75 | 209407 | Uni-ZAP XR | 126 | 776 | 1 | 776 | 231 | 231 | 642 | 1 | 28 | 29 | 121 |
| | | Oct. 23, 1997 | | | | | | | | | | | | |
| 117 | HGLAL82 | 209242 | Uni-ZAP XR | 127 | 406 | 1 | 406 | 144 | 144 | 643 | 1 | 19 | 20 | 26 |
| | | Sep. 12, 1997 | | | | | | | | | | | | |
| 118 | HHEMA59 | 203364 | pCMVSport 3.0 | 128 | 3102 | 1 | 3099 | 239 | 239 | 644 | 1 | 20 | 21 | 76 |
| | | Oct. 19, 1998 | | | | | | | | | | | | |
| 119 | HHENV10 | 209368 | pCMVSport 3.0 | 129 | 1155 | 1 | 1155 | 143 | 143 | 645 | 1 | 27 | 28 | 50 |
| | | Oct. 16, 1997 | | | | | | | | | | | | |
| 120 | HHEPM33 | PTA-322 | pCMVSport 3.0 | 130 | 1459 | 1 | 1459 | 269 | 269 | 646 | 1 | 20 | 21 | 82 |
| | | Jul. 09, 1999 | | | | | | | | | | | | |
| 121 | HHFBY53 | 203364 | Uni-ZAP XR | 131 | 870 | 1 | 870 | 172 | 172 | 647 | 1 | 18 | 19 | 64 |
| | | Oct. 19, 1998 | | | | | | | | | | | | |
| 122 | HHFGR93 | 209746 | Uni-ZAP XR | 132 | 1835 | 1 | 1835 | 132 | 132 | 648 | 1 | 29 | 30 | 390 |
| | | Apr. 07, 1998 | | | | | | | | | | | | |
| 122 | HHFGR93 | 209746 | Uni-ZAP XR | 407 | 1932 | 1 | 1836 | 130 | 130 | 923 | 1 | 29 | 30 | 236 |
| | | Apr. 07, 1998 | | | | | | | | | | | | |
| 123 | HHGCG53 | 97899 | Lambda ZAP II | 133 | 407 | 1 | 407 | 230 | 230 | 649 | 1 | 33 | 34 | 44 |
| | | Feb. 26, 1997 | | | | | | | | | | | | |
| | | 209045 | | | | | | | | | | | | |
| | | May 15, 1997 | | | | | | | | | | | | |
| 124 | HHGCM76 | 97958 | Lambda ZAP II | 134 | 711 | 8 | 711 | 270 | 270 | 650 | 1 | 22 | 23 | 89 |
| | | Mar. 13, 1997 | | | | | | | | | | | | |
| | | 209072 | | | | | | | | | | | | |
| | | May 22, 1997 | | | | | | | | | | | | |
| 124 | HHGCM76 | 97958 | Lambda ZAP II | 408 | 711 | 8 | 711 | 270 | 270 | 924 | 1 | | | 11 |
| | | Mar. 13, 1997 | | | | | | | | | | | | |
| | | 209072 | | | | | | | | | | | | |
| | | May 22, 1997 | | | | | | | | | | | | |
| 125 | HHGDF16 | 209463 | Lambda ZAP II | 135 | 890 | 215 | 890 | 253 | 253 | 651 | 1 | 26 | 27 | 52 |
| | | Nov. 14, 1997 | | | | | | | | | | | | |
| 126 | HHPDX20 | 209580 | Uni-ZAP XR | 136 | 1161 | 1 | 1161 | 174 | 174 | 652 | 1 | 30 | 31 | 66 |
| | | Jan. 14, 1998 | | | | | | | | | | | | |
| 127 | HHPEN62 | 209746 | Uni-ZAP XR | 137 | 2152 | 141 | 2152 | 183 | 183 | 653 | 1 | 27 | 28 | 508 |
| | | Apr. 07, 1998 | | | | | | | | | | | | |
| 128 | HHPGO40 | 209878 | Uni-ZAP XR | 138 | 1002 | 1 | 1002 | 116 | 116 | 654 | 1 | 26 | 27 | 295 |
| | | May 18, 1998 | | | | | | | | | | | | |
| 128 | HHPGO40 | 209878 | Uni-ZAP XR | 409 | 973 | 1 | 973 | 68 | 68 | 925 | 1 | 37 | 38 | 302 |
| | | May 18, 1998 | | | | | | | | | | | | |
| 128 | HHPGO40 | 209878 | Uni-ZAP XR | 410 | 984 | 1 | 984 | 74 | 74 | 926 | 1 | 37 | 38 | 224 |
| | | May 18, 1998 | | | | | | | | | | | | |
| 129 | HHSDX28 | 209346 | Uni-ZAP XR | 139 | 1113 | 1 | 1113 | 90 | 90 | 655 | 1 | 21 | 22 | 56 |
| | | Oct. 09, 1997 | | | | | | | | | | | | |
| 130 | HILCF66 | 209627 | pBluescript SK− | 140 | 1668 | 740 | 1668 | 331 | 331 | 656 | 1 | 21 | 22 | 44 |
| | | Feb. 12, 1998 | | | | | | | | | | | | |
| 131 | HJABB94 | 209119 | pBluescript SK− | 141 | 1555 | 1 | 1555 | 74 | 74 | 657 | 1 | 28 | 29 | 77 |
| | | Jun. 12, 1997 | | | | | | | | | | | | |
| 132 | HJACG02 | 209215 | pBluescript SK− | 142 | 575 | 1 | 575 | 66 | 66 | 658 | 1 | 22 | 23 | 108 |
| | | Aug. 21, 1997 | | | | | | | | | | | | |
| 132 | HJACG02 | 209215 | pBluescript SK− | 411 | 553 | 1 | 553 | 47 | 47 | 927 | 1 | 23 | 24 | 108 |
| | | Aug. 21, 1997 | | | | | | | | | | | | |
| 133 | HJACG30 | PTA-843 | pBluescript SK− | 143 | 1532 | 1 | 1532 | 291 | 291 | 659 | 1 | 27 | 28 | 44 |
| | | Oct. 13, 1999 | | | | | | | | | | | | |
| 133 | HJACG30 | PTA-843 | pBluescript SK− | 412 | 1614 | 1020 | 1614 | | 50 | 928 | 1 | 1 | 2 | 130 |
| | | Oct. 13, 1999 | | | | | | | | | | | | |
| 133 | HJACG30 | PTA-843 | pBluescript SK− | 413 | 1087 | 491 | 1087 | | 350 | 929 | 1 | 1 | 2 | 122 |
| | | Oct. 13, 1999 | | | | | | | | | | | | |
| 134 | HJBCY35 | 209877 | pBluescript SK− | 144 | 1559 | 93 | 1272 | 232 | 232 | 660 | 1 | 23 | 24 | 327 |
| | | May 18, 1998 | | | | | | | | | | | | |
| 135 | HJMBI18 | 209580 | pCMVSport 3.0 | 145 | 1021 | 303 | 1021 | 574 | 574 | 661 | 1 | 19 | 20 | 80 |
| | | Jan. 14, 1998 | | | | | | | | | | | | |
| 136 | HJMBM38 | 209300 | pCMVSport 3.0 | 146 | 1024 | 316 | 1023 | 387 | 387 | 662 | 1 | 14 | 15 | 112 |
| | | Sep. 25, 1997 | | | | | | | | | | | | |
| 137 | HJPAD75 | 209641 | Uni-ZAP XR | 147 | 1231 | 1 | 1231 | 60 | 60 | 663 | 1 | 29 | 30 | 91 |
| | | Feb. 25, 1998 | | | | | | | | | | | | |
| 138 | HJPCP42 | PTA-843 | Uni-ZAP XR | 148 | 1223 | 1 | 1223 | | 156 | 664 | 1 | 20 | 21 | 223 |
| | | Oct. 13, 1999 | | | | | | | | | | | | |
| 138 | HJPCP42 | PTA-843 | Uni-ZAP XR | 414 | 1201 | 1 | 1201 | | 134 | 930 | 1 | 20 | 21 | 223 |
| | | Oct. 13, 1999 | | | | | | | | | | | | |
| 138 | HJPCP42 | PTA-843 | Uni-ZAP XR | 415 | 628 | 229 | 628 | | 468 | 931 | 1 | | | 8 |
| | | Oct. 13, 1999 | | | | | | | | | | | | |
| 138 | HJPCP42 | PTA-843 | Uni-ZAP XR | 416 | 425 | 237 | 348 | | 1 | 932 | 1 | 1 | 2 | 83 |
| | | Oct. 13, 1999 | | | | | | | | | | | | |
| 139 | HKABI84 | 209603 | pCMVSport 2.0 | 149 | 1238 | 45 | 1238 | 274 | 274 | 665 | 1 | 16 | 17 | 47 |
| | | Jan. 29, 1998 | | | | | | | | | | | | |
| 140 | HKABZ65 | 209683 | pCMVSport 2.0 | 150 | 1189 | 1 | 1189 | 77 | 77 | 666 | 1 | 17 | 18 | 243 |
| | | Mar. 20, 1998 | | | | | | | | | | | | |
| 140 | HKABZ65 | 209683 | pCMVSport 2.0 | 417 | 1191 | 1 | 1191 | 69 | 69 | 933 | 1 | 17 | 18 | 243 |
| | | Mar. 20, 1998 | | | | | | | | | | | | |
| 141 | HKACB56 | 209346 | pCMVSport 2.0 | 151 | 496 | 1 | 496 | 27 | 27 | 667 | 1 | 23 | 24 | 80 |
| | | Oct. 09, 1997 | | | | | | | | | | | | |
| 142 | HKACD58 | 209346 | pCMVSport 2.0 | 152 | 3153 | 1 | 3153 | 38 | 38 | 668 | 1 | 25 | 26 | 301 |
| | | Oct. 09, 1997 | | | | | | | | | | | | |
| 142 | HKACD58 | 209346 | pCMVSport 2.0 | 418 | 1626 | 1 | 1626 | 35 | 35 | 934 | 1 | 25 | 26 | 154 |
| | | Oct. 09, 1997 | | | | | | | | | | | | |
| 143 | HKACH44 | 209300 | pCMVSport 2.0 | 153 | 686 | 1 | 686 | 375 | 375 | 669 | 1 | 25 | 26 | 44 |
| | | Sep. 25, 1997 | | | | | | | | | | | | |
| 144 | HKAEV06 | 209627 | pCMVSport 2.0 | 154 | 2496 | 1 | 2496 | 501 | 501 | 670 | 1 | 30 | 31 | 438 |
| | | Feb. 12, 1998 | | | | | | | | | | | | |
| 144 | HKAEV06 | 209627 | pCMVSport 2.0 | 419 | 2351 | 1 | 2351 | 197 | 197 | 935 | 1 | 29 | 30 | 57 |
| | | Feb. 12, 1998 | | | | | | | | | | | | |
| 145 | HKAFT66 | PTA-849 | pCMVSport 2.0 | 155 | 1001 | 270 | 1001 | 508 | 508 | 671 | 1 | 41 | 42 | 107 |
| | | Oct. 13, 1999 | | | | | | | | | | | | |
| 145 | HKAFT66 | PTA-849 | pCMVSport 2.0 | 420 | 1001 | 270 | 1001 | 508 | 508 | 936 | 1 | 41 | 42 | 107 |
| | | Oct. 13, 1999 | | | | | | | | | | | | |
| 145 | HKAFT66 | PTA-849 | pCMVSport 2.0 | 421 | 669 | 1 | 669 | 234 | 234 | 937 | 1 | | | 37 |
| | | Oct. 13, 1999 | | | | | | | | | | | | |
| 146 | HKBIE57 | 209651 | pCMVSport 1 | 156 | 1142 | 1038 | 1142 | 178 | 178 | 672 | 1 | 30 | 31 | 234 |
| | | Mar. 04, 1998 | | | | | | | | | | | | |
| 146 | HKBIE57 | 209651 | pCMVSport 1 | 422 | 417 | 1 | 417 | 30 | 30 | 938 | 1 | 26 | 27 | 46 |
| | | Mar. 04, 1998 | | | | | | | | | | | | |
| 147 | HKFBC53 | 209782 | ZAP Express | 157 | 2238 | 1 | 2238 | 64 | 64 | 673 | 1 | 15 | 16 | 470 |
| | | Apr. 20, 1998 | | | | | | | | | | | | |
| 147 | HKFBC53 | 209782 | ZAP Express | 423 | 1949 | 1 | 1906 | 41 | 41 | 939 | 1 | 18 | 19 | 442 |
| | | Apr. 20, 1998 | | | | | | | | | | | | |
| 147 | HKFBC53 | 209782 | ZAP Express | 424 | 1487 | 1 | 1487 | | 3 | 940 | 1 | 1 | 2 | 309 |
| | | Apr. 20, 1998 | | | | | | | | | | | | |
| 147 | HKFBC53 | 209782 | ZAP Express | 425 | 1525 | 1 | 1525 | | 3 | 941 | 1 | 1 | 2 | 243 |
| | | Apr. 20, 1998 | | | | | | | | | | | | |
| 148 | HKGDL36 | 209877 | pSport1 | 158 | 1052 | 1 | 1052 | 53 | 53 | 674 | 1 | 33 | 34 | 260 |
| | | May 18, 1998 | | | | | | | | | | | | |
| 148 | HKGDL36 | 209877 | pSport1 | 426 | 1050 | 1 | 1050 | 55 | 55 | 942 | 1 | 33 | 34 | 148 |
| | | May 18, 1998 | | | | | | | | | | | | |
| 149 | HKISB57 | 209603 | pBluescript | 159 | 1492 | 1 | 1439 | 130 | 130 | 675 | 1 | 19 | 20 | 95 |
| | | Jan. 29, 1998 | | | | | | | | | | | | |
| 150 | HKMLM11 | 209236 | pBluescript | 160 | 954 | 1 | 954 | 82 | 82 | 676 | 1 | 20 | 21 | 130 |
| | | Sep. 04, 1997 | | | | | | | | | | | | |
| 151 | HKMLP68 | PTA-845 | pBluescript | 161 | 2784 | 1 | 2784 | 130 | 130 | 677 | 1 | 24 | 25 | 80 |
| | | Oct. 13, 1999 | | | | | | | | | | | | |
| 151 | HKMLP68 | PTA-845 | pBluescript | 427 | 718 | 1 | 718 | 153 | 153 | 943 | 1 | 24 | 25 | 80 |
| | | Oct. 13, 1999 | | | | | | | | | | | | |
| 151 | HKMLP68 | PTA-845 | pBluescript | 428 | 614 | 1 | 614 | | 471 | 944 | 1 | 1 | 2 | 47 |
| | | Oct. 13, 1999 | | | | | | | | | | | | |
| 152 | HKMMD13 | 209568 | pBluescript | 162 | 943 | 1 | 943 | 342 | 342 | 678 | 1 | 21 | 22 | 49 |
| | | Jan. 06, 1998 | | | | | | | | | | | | |
| 153 | HKMMW74 | 209463 | pBluescript | 163 | 1794 | 1 | 1794 | 202 | 202 | 679 | 1 | 21 | 22 | 41 |
| | | Nov. 14, 1997 | | | | | | | | | | | | |
| 154 | HKMND01 | 203069 | pBluescript | 164 | 887 | 1 | 887 | 23 | 23 | 680 | 1 | 26 | 27 | 50 |
| | | Jul. 27, 1998 | | | | | | | | | | | | |
| 155 | HLDBE54 | 209563 | pCMVSport 3.0 | 165 | 1222 | 1 | 1222 | 155 | 155 | 681 | 1 | 38 | 39 | 318 |
| | | Dec. 18, 1997 | | | | | | | | | | | | |
| 155 | HLDBE54 | 209563 | pCMVSport 3.0 | 429 | 1194 | 1 | 1194 | 130 | 130 | 945 | 1 | 26 | 27 | 89 |
| | | Dec. 18, 1997 | | | | | | | | | | | | |
| 155 | HLDBE54 | 209563 | pCMVSport 3.0 | 430 | 2334 | 1874 | 2334 | 133 | 133 | 946 | 1 | 33 | 34 | 486 |
| | | Dec. 18, 1997 | | | | | | | | | | | | |
| 156 | HLDBX13 | 203331 | pCMVSport 3.0 | 166 | 1815 | 1 | 1815 | 303 | 303 | 682 | 1 | 39 | 40 | 55 |
| | | Oct. 08, 1998 | | | | | | | | | | | | |
| 157 | HLDON23 | 209628 | pCMVSport 3.0 | 167 | 1262 | 208 | 1256 | 368 | 368 | 683 | 1 | 20 | 21 | 113 |
| | | Feb. 12, 1998 | | | | | | | | | | | | |
| 158 | HLDQC46 | PTA-1544 | pCMVSport 3.0 | 168 | 632 | 1 | 632 | 163 | 163 | 684 | 1 | 34 | 35 | 87 |
| | | Mar. 21, 2000 | | | | | | | | | | | | |
| 159 | HLDQR62 | 203027 | pCMVSport 3.0 | 169 | 2572 | 427 | 2572 | 520 | 520 | 685 | 1 | 18 | 19 | 161 |
| | | Jun. 26, 1998 | | | | | | | | | | | | |
| 160 | HLDQU79 | 203071 | pCMVSport 3.0 | 170 | 1488 | 1 | 1488 | 99 | 99 | 686 | 1 | 23 | 24 | 348 |
| | | Jul. 27, 1998 | | | | | | | | | | | | |
| 161 | HLDRM43 | 209628 | pCMVSport 3.0 | 171 | 609 | 1 | 609 | 24 | 24 | 687 | 1 | 20 | 21 | 151 |
| | | Feb. 12, 1998 | | | | | | | | | | | | |
| 161 | HLDRM43 | 209628 | pCMVSport 3.0 | 431 | 759 | 1 | 759 | 164 | 164 | 947 | 1 | 20 | 21 | 151 |
| | | Feb. 12, 1998 | | | | | | | | | | | | |
| 162 | HLDRP33 | 209641 | pCMVSport 3.0 | 172 | 612 | 1 | 612 | 215 | 215 | 688 | 1 | 26 | 27 | 41 |
| | | Feb. 25, 1998 | | | | | | | | | | | | |
| 163 | HLHAL68 | 209746 | Uni-ZAP XR | 173 | 704 | 1 | 704 | 30 | 30 | 689 | 1 | 21 | 22 | 44 |
| | | Apr. 07, 1998 | | | | | | | | | | | | |
| 164 | HLHFP03 | 209126 | Uni-ZAP XR | 174 | 613 | 1 | 613 | 224 | 224 | 690 | 1 | 19 | 20 | 116 |
| | | Jun. 19, 1997 | | | | | | | | | | | | |
| 165 | HLIBD68 | 203071 | pCMVSport 1 | 175 | 1022 | 1 | 1022 | 186 | 186 | 691 | 1 | 35 | 36 | 50 |
| | | Jul. 27, 1998 | | | | | | | | | | | | |
| 166 | HLICQ90 | 203517 | pCMVSport 1 | 176 | 1766 | 1 | 1766 | 249 | 249 | 692 | 1 | 29 | 30 | 206 |
| | | Dec. 10, 1998 | | | | | | | | | | | | |
| 167 | HLMBO76 | 209603 | Lambda ZAP II | 177 | 815 | 1 | 795 | 43 | 43 | 693 | 1 | 43 | 44 | 107 |
| | | Jan. 29, 1998 | | | | | | | | | | | | |
| 168 | HLTEJ06 | 209346 | Uni-ZAP XR | 178 | 617 | 69 | 617 | 197 | 197 | 694 | 1 | 22 | 23 | 55 |
| | | Oct. 09, 1997 | | | | | | | | | | | | |
| 169 | HLTHR66 | 209782 | Uni-ZAP XR | 179 | 2286 | 1 | 2286 | 5 | 5 | 695 | 1 | 34 | 35 | 75 |
| | | Apr. 20, 1998 | | | | | | | | | | | | |
| 170 | HLTIP94 | PTA-2076 | Uni-ZAP XR | 180 | 1240 | 1 | 1170 | 226 | 226 | 696 | 1 | 26 | 27 | 97 |
| | | Jun. 09, 2000 | | | | | | | | | | | | |
| 170 | HLTIP94 | PTA-2076 | Uni-ZAP XR | 432 | 647 | 1 | 647 | 226 | 226 | 948 | 1 | 26 | 27 | 65 |
| | | Jun. 09, 2000 | | | | | | | | | | | | |
| 170 | HLTIP94 | PTA-2076 | Uni-ZAP XR | 433 | 1321 | 870 | 1209 | | 3 | 949 | 1 | 1 | 2 | 299 |
| | | Jun. 09, 2000 | | | | | | | | | | | | |
| 171 | HLWAA17 | 209626 | pCMVSport 3.0 | 181 | 997 | 246 | 997 | 436 | 436 | 697 | 1 | 15 | 16 | 187 |
| | | Feb. 12, 1998 | | | | | | | | | | | | |
| 172 | HLWAA88 | 209551 | pCMVSport 3.0 | 182 | 1770 | 1 | 1770 | 35 | 35 | 698 | 1 | 22 | 23 | 113 |
| | | Dec. 12, 1997 | | | | | | | | | | | | |
| 172 | HLWAA88 | 209551 | pCMVSport 3.0 | 434 | 1636 | 1 | 1636 | 51 | 51 | 950 | 1 | 22 | 23 | 488 |
| | | Dec. 12, 1997 | | | | | | | | | | | | |
| 173 | HLWAD77 | 209651 | pCMVSport 3.0 | 183 | 1167 | 304 | 1167 | 326 | 326 | 699 | 1 | 24 | 25 | 140 |
| | | Mar. 04, 1998 | | | | | | | | | | | | |
| 174 | HLWAE11 | 203071 | pCMVSport 3.0 | 184 | 1618 | 1 | 1618 | 28 | 28 | 700 | 1 | 46 | 47 | 278 |
| | | Jul. 27, 1998 | | | | | | | | | | | | |
| 175 | HLWAO22 | 209511 | pCMVSport 3.0 | 185 | 1338 | 1 | 1311 | 212 | 212 | 701 | 1 | 21 | 22 | 354 |
| | | Dec. 03, 1997 | | | | | | | | | | | | |
| 176 | HLWBH18 | PTA-849 | pCMVSport 3.0 | 186 | 813 | 1 | 813 | 107 | 107 | 702 | 1 | 18 | 19 | 60 |
| | | Oct. 13, 1999 | | | | | | | | | | | | |
| 176 | HLWBH18 | PTA-849 | pCMVSport 3.0 | 435 | 645 | 1 | 645 | 67 | 67 | 951 | 1 | 18 | 19 | 60 |
| | | Oct. 13, 1999 | | | | | | | | | | | | |
| 177 | HLWBY76 | 203517 | pCMVSport 3.0 | 187 | 2081 | 1 | 2081 | 432 | 432 | 703 | 1 | 27 | 28 | 232 |
| | | Dec. 10, 1998 | | | | | | | | | | | | |
| 178 | HLYAC95 | 203071 | pSport1 | 188 | 312 | 1 | 312 | 92 | 92 | 704 | 1 | 16 | 17 | 46 |
| | | Jul. 27, 1998 | | | | | | | | | | | | |
| 179 | HMADK33 | 209368 | Uni-ZAP XR | 189 | 864 | 1 | 864 | 161 | 161 | 705 | 1 | 24 | 25 | 152 |
| | | Oct. 16, 1997 | | | | | | | | | | | | |
| 180 | HMADS41 | 209563 | Uni-ZAP XR | 190 | 1267 | 1 | 1267 | 267 | 267 | 706 | 1 | 21 | 22 | 88 |
| | | Dec. 18, 1997 | | | | | | | | | | | | |
| 181 | HMAMI15 | PTA-2075 | Uni-ZAP XR | 191 | 1258 | 1 | 1258 | 4 | 4 | 707 | 1 | 26 | 27 | 340 |
| | | Jun. 09, 2000 | | | | | | | | | | | | |
| 181 | HMAMI15 | PTA-2075 | Uni-ZAP XR | 436 | 1084 | 1 | 1084 | 3 | 3 | 952 | 1 | 26 | 27 | 306 |
| | | Jun. 09, 2000 | | | | | | | | | | | | |
| 182 | HMCFY13 | 209628 | Uni-ZAP XR | 192 | 883 | 1 | 883 | 175 | 175 | 708 | 1 | 27 | 28 | 64 |
| | | Feb. 12, 1998 | | | | | | | | | | | | |
| 183 | HMDAB56 | 209368 | Uni-ZAP XR | 193 | 1465 | 1 | 1465 | 273 | 273 | 709 | 1 | 32 | 33 | 44 |
| | | Oct. 16, 1997 | | | | | | | | | | | | |
| 184 | HMDAM24 | 209226 | Uni-ZAP XR | 194 | 996 | 1 | 996 | 109 | 109 | 710 | 1 | | | 20 |
| | | Aug. 28, 1997 | | | | | | | | | | | | |
| 185 | HMEAI48 | 203069 | Lambda ZAP II | 195 | 413 | 1 | 413 | 36 | 36 | 711 | 1 | 29 | 30 | 88 |
| | | Jul. 27, 1998 | | | | | | | | | | | | |
| 185 | HMEAI48 | 203069 | Lambda ZAP II | 437 | 1168 | 1 | 1168 | 95 | 95 | 953 | 1 | 29 | 30 | 40 |
| | | Jul. 27, 1998 | | | | | | | | | | | | |
| 186 | HMEED18 | 209368 | Lambda ZAP II | 196 | 1369 | 28 | 1369 | 34 | 34 | 712 | 1 | 34 | 35 | 221 |
| | | Oct. 16, 1997 | | | | | | | | | | | | |
| 187 | HMEFT54 | 209243 | Lambda ZAP II | 197 | 596 | 1 | 596 | 332 | 332 | 713 | 1 | 19 | 20 | 39 |
| | | Sep. 12, 1997 | | | | | | | | | | | | |
| 188 | HMEGF92 | 209243 | Lambda ZAP II | 198 | 629 | 1 | 611 | 92 | 92 | 714 | 1 | 27 | 28 | 62 |
| | | Sep. 12, 1997 | | | | | | | | | | | | |
| 189 | HMSDL37 | PTA-842 | Uni-ZAP XR | 199 | 2497 | 1 | 2497 | 531 | 531 | 715 | 1 | 26 | 27 | 64 |
| | | Oct. 13, 1999 | | | | | | | | | | | | |
| 189 | HMSDL37 | PTA-842 | Uni-ZAP XR | 438 | 1776 | 1 | 1776 | 528 | 528 | 954 | 1 | 26 | 27 | 64 |
| | | Oct. 13, 1999 | | | | | | | | | | | | |
| 189 | HMSDL37 | PTA-842 | Uni-ZAP XR | 439 | 784 | 1 | 784 | 565 | 565 | 955 | 1 | 6 | 7 | 26 |
| | | Oct. 13, 1999 | | | | | | | | | | | | |
| 189 | HMSDL37 | PTA-842 | Uni-ZAP XR | 440 | 699 | 275 | 427 | | 2 | 956 | 1 | 1 | 2 | 50 |
| | | Oct. 13, 1999 | | | | | | | | | | | | |
| 190 | HMSFI26 | 209368 | Uni-ZAP XR | 200 | 1217 | 1 | 1217 | 120 | 120 | 716 | 1 | 34 | 35 | 62 |
| | | Oct. 16, 1997 | | | | | | | | | | | | |
| 191 | HMSGT42 | 97958 | Uni-ZAP XR | 201 | 1563 | 33 | 1077 | 40 | 40 | 717 | 1 | 32 | 33 | 92 |
| | | Mar. 13, 1997 | | | | | | | | | | | | |
| | | 209072 | | | | | | | | | | | | |
| | | May 22, 1997 | | | | | | | | | | | | |
| 192 | HMSHM14 | 209126 | Uni-ZAP XR | 202 | 756 | 1 | 756 | 103 | 103 | 718 | 1 | 29 | 30 | 45 |
| | | Jun. 19, 1997 | | | | | | | | | | | | |
| 193 | HMSHS36 | PTA-2070 | Uni-ZAP XR | 203 | 1402 | 1 | 1402 | 134 | 134 | 719 | 1 | 23 | 24 | 103 |
| | | Jun. 09, 2000 | | | | | | | | | | | | |
| 193 | HMSHS36 | PTA-2070 | Uni-ZAP XR | 441 | 616 | 30 | 616 | 162 | 162 | 957 | 1 | 23 | 24 | 103 |
| | | Jun. 09, 2000 | | | | | | | | | | | | |
| 194 | HMSKC04 | 203105 | Uni-ZAP XR | 204 | 1417 | 1 | 1417 | 133 | 133 | 720 | 1 | 22 | 23 | 73 |
| | | Aug. 13, 1998 | | | | | | | | | | | | |
| 195 | HMUAP70 | 209878 | pCMVSport 3.0 | 205 | 1965 | 531 | 1914 | 183 | 183 | 721 | 1 | 16 | 17 | 221 |
| | | May 18, 1998 | | | | | | | | | | | | |
| 195 | HMUAP70 | 209878 | pCMVSport 3.0 | 442 | 1842 | 407 | 1783 | 413 | 413 | 958 | 1 | 25 | 26 | 103 |
| | | May 18, 1998 | | | | | | | | | | | | |
| 195 | HMUAP70 | 209878 | pCMVSport 3.0 | 443 | 1963 | 530 | 1914 | 251 | 251 | 959 | 1 | 28 | 29 | 198 |
| | | May 18, 1998 | | | | | | | | | | | | |
| 195 | HMUAP70 | 209878 | pCMVSport 3.0 | 444 | 1487 | 1 | 1487 | 62 | 62 | 960 | 1 | 16 | 17 | 106 |
| | | May 18, 1998 | | | | | | | | | | | | |
| 195 | HMUAP70 | 209878 | pCMVSport 3.0 | 445 | 1653 | 1 | 1653 | 60 | 60 | 961 | 1 | 15 | 16 | 68 |
| | | May 18, 1998 | | | | | | | | | | | | |
| 195 | HMUAP70 | 209878 | pCMVSport 3.0 | 446 | 1830 | 407 | 1830 | 60 | 60 | 962 | 1 | | | 23 |
| | | May 18, 1998 | | | | | | | | | | | | |
| 196 | HMVBS81 | 209628 | pSport1 | 206 | 529 | 1 | 529 | 34 | 34 | 722 | 1 | 43 | 44 | 139 |
| | | Feb. 12, 1998 | | | | | | | | | | | | |
| 197 | HMWDC28 | 209126 | Uni-ZAP XR | 207 | 1146 | 105 | 754 | 124 | 124 | 723 | 1 | 30 | 31 | 42 |
| | | Jun. 19, 1997 | | | | | | | | | | | | |
| 198 | HMWFT65 | 209368 | Uni-ZAP XR | 208 | 1346 | 1 | 1346 | 72 | 72 | 724 | 1 | 27 | 28 | 121 |
| | | Oct. 16, 1997 | | | | | | | | | | | | |
| 199 | HMWGY65 | 203105 | Uni-ZAP XR | 209 | 1974 | 1 | 1974 | 42 | 42 | 725 | 1 | 21 | 22 | 490 |
| | | Aug. 13, 1998 | | | | | | | | | | | | |
| 199 | HMWGY65 | 203105 | Uni-ZAP XR | 447 | 2027 | 1 | 1976 | 42 | 42 | 963 | 1 | 21 | 22 | 188 |
| | | Aug. 13, 1998 | | | | | | | | | | | | |
| 200 | HNEAC05 | 209236 | Uni-ZAP XR | 210 | 890 | 1 | 890 | 101 | 101 | 726 | 1 | 24 | 25 | 105 |
| | | Sep. 04, 1997 | | | | | | | | | | | | |
| 201 | HNEEB45 | PTA-845 | Uni-ZAP XR | 211 | 1043 | 1 | 1043 | 139 | 139 | 727 | 1 | 25 | 26 | 57 |
| | | Oct. 13, 1999 | | | | | | | | | | | | |
| 201 | HNEEB45 | PTA-845 | Uni-ZAP XR | 448 | 699 | 160 | 699 | 226 | 226 | 964 | 1 | 25 | 26 | 57 |
| | | Oct. 13, 1999 | | | | | | | | | | | | |
| 202 | HNEEE24 | 209346 | Uni-ZAP XR | 212 | 1079 | 1 | 1079 | 213 | 213 | 728 | 1 | 21 | 22 | 71 |
| | | Oct. 09, 1997 | | | | | | | | | | | | |
| 203 | HNFFC43 | 203027 | Uni-ZAP XR | 213 | 2103 | 209 | 2058 | 488 | 488 | 729 | 1 | 12 | 13 | 68 |
| | | Jun. 26, 1998 | | | | | | | | | | | | |
| 204 | HNFIY77 | 209628 | pBluescript | 214 | 1212 | 28 | 1212 | 228 | 228 | 730 | 1 | 34 | 35 | 233 |
| | | Feb. 12, 1998 | | | | | | | | | | | | |
| 205 | HNFJF07 | 209463 | Uni-ZAP XR | 215 | 616 | 1 | 616 | 86 | 86 | 731 | 1 | 21 | 22 | 66 |
| | | Nov. 14, 1997 | | | | | | | | | | | | |
| 206 | HNGAK47 | 209368 | Uni-ZAP XR | 216 | 1144 | 1 | 1144 | 89 | 89 | 732 | 1 | 23 | 24 | 40 |
| | | Oct. 16, 1997 | | | | | | | | | | | | |
| 207 | HNGBC07 | PTA-844 | Uni-ZAP XR | 217 | 1649 | 1 | 1647 | 81 | 81 | 733 | 1 | 18 | 19 | 249 |
| | | Oct. 13, 1999 | | | | | | | | | | | | |
| 207 | HNGBC07 | PTA-844 | Uni-ZAP XR | 449 | 1649 | 1 | 1647 | 122 | 122 | 965 | 1 | 24 | 25 | 44 |
| | | Oct. 13, 1999 | | | | | | | | | | | | |
| 207 | HNGBC07 | PTA-844 | Uni-ZAP XR | 450 | 1570 | 1 | 1570 | 55 | 55 | 966 | 1 | 24 | 25 | 44 |
| | | Oct. 13, 1999 | | | | | | | | | | | | |
| 208 | HNGDG40 | 209299 | Uni-ZAP XR | 218 | 520 | 1 | 520 | 13 | 13 | 734 | 1 | 36 | 37 | 127 |
| | | Sep. 25, 1997 | | | | | | | | | | | | |
| 209 | HNGEP09 | 209197 | Uni-ZAP XR | 219 | 1042 | 1 | 1042 | 72 | 72 | 735 | 1 | 15 | 16 | 82 |
| | | Aug. 08, 1997 | | | | | | | | | | | | |
| 210 | HNGFR31 | 209407 | Uni-ZAP XR | 220 | 536 | 1 | 536 | 108 | 108 | 736 | 1 | 23 | 24 | 90 |
| | | Oct. 23, 1997 | | | | | | | | | | | | |
| 211 | HNGIJ31 | 209236 | Uni-ZAP XR | 221 | 796 | 1 | 796 | 135 | 135 | 737 | 1 | 16 | 17 | 36 |
| | | Sep. 04, 1997 | | | | | | | | | | | | |
| 212 | HNGJE50 | 209368 | Uni-ZAP XR | 222 | 1037 | 1 | 1037 | 77 | 77 | 738 | 1 | 36 | 37 | 46 |
| | | Oct. 16, 1997 | | | | | | | | | | | | |
| 213 | HNGJT54 | 209215 | Uni-ZAP XR | 223 | 1110 | 1 | 1110 | 172 | 172 | 739 | 1 | 19 | 20 | 34 |
| | | Aug. 21, 1997 | | | | | | | | | | | | |
| 214 | HNGND37 | 203648 | Uni-ZAP XR | 224 | 841 | 1 | 841 | 388 | 388 | 740 | 1 | 27 | 28 | 82 |
| | | Feb. 09, 1999 | | | | | | | | | | | | |
| 215 | HNGOI12 | PTA-847 | Uni-ZAP XR | 225 | 2128 | 1 | 2128 | 27 | 27 | 741 | 1 | 34 | 35 | 57 |
| | | Oct. 13, 1999 | | | | | | | | | | | | |
| 215 | HNGOI12 | PTA-847 | Uni-ZAP XR | 451 | 774 | 1 | 774 | 27 | 27 | 967 | 1 | 34 | 35 | 57 |
| | | Oct. 13, 1999 | | | | | | | | | | | | |
| 215 | HNGOI12 | PTA-847 | Uni-ZAP XR | 452 | 1396 | 1 | 1396 | | 596 | 968 | 1 | 25 | 26 | 93 |
| | | Oct. 13, 1999 | | | | | | | | | | | | |
| 216 | HNGOM56 | 203648 | Uni-ZAP XR | 226 | 956 | 1 | 956 | 391 | 391 | 742 | 1 | 22 | 23 | 55 |
| | | Feb. 09, 1999 | | | | | | | | | | | | |
| 217 | HNGOU56 | 203858 | Uni-ZAP XR | 227 | 742 | 1 | 742 | 317 | 317 | 743 | 1 | 23 | 24 | 59 |
| | | Mar. 18, 1999 | | | | | | | | | | | | |
| 218 | HNGOW62 | PTA-622 | Uni-ZAP XR | 228 | 1298 | 1 | 1298 | 167 | 167 | 744 | 1 | 19 | 20 | 54 |
| | | Sep. 02, 1999 | | | | | | | | | | | | |
| 219 | HNHEU93 | 209628 | Uni-ZAP XR | 229 | 748 | 1 | 748 | 57 | 57 | 745 | 1 | 34 | 35 | 81 |
| | | Feb. 12, 1998 | | | | | | | | | | | | |
| 220 | HNHFM14 | 209683 | Uni-ZAP XR | 230 | 297 | 1 | 297 | 38 | 38 | 746 | 1 | 28 | 29 | 80 |
| | | Mar. 20, 1998 | | | | | | | | | | | | |
| 221 | HNHFO29 | 209138 | Uni-ZAP XR | 231 | 699 | 1 | 699 | 160 | 160 | 747 | 1 | 21 | 22 | 180 |
| | | Jul. 03, 1997 | | | | | | | | | | | | |
| 222 | HNHNB29 | PTA-623 | Uni-ZAP XR | 232 | 1894 | 1 | 1894 | 40 | 40 | 748 | 1 | 20 | 21 | 53 |
| | | Sep. 02, 1999 | | | | | | | | | | | | |
| 223 | HNHOD46 | PTA-1543 | Uni-ZAP XR | 233 | 1355 | 1 | 1355 | 12 | 12 | 749 | 1 | 20 | 21 | 80 |
| | | Mar. 21, 2000 | | | | | | | | | | | | |
| 224 | HNHOG73 | 203570 | Uni-ZAP XR | 234 | 802 | 1 | 802 | 342 | 342 | 750 | 1 | 19 | 20 | 51 |
| | | Jan. 11, 1999 | | | | | | | | | | | | |
| 225 | HNTBI26 | 209563 | pCMVSport 3.0 | 235 | 1382 | 1 | 1382 | 28 | 28 | 751 | 1 | 35 | 36 | 320 |
| | | Dec. 18, 1997 | | | | | | | | | | | | |
| 225 | HNTBI26 | 209563 | pCMVSport 3.0 | 453 | 1397 | 1 | 1397 | 32 | 32 | 969 | 1 | 35 | 36 | 172 |
| | | Dec. 18, 1997 | | | | | | | | | | | | |
| 225 | HNTBI26 | 209563 | pCMVSport 3.0 | 454 | 1368 | 1 | 1368 | 16 | 16 | 970 | 1 | 35 | 36 | 131 |
| | | Dec. 18, 1997 | | | | | | | | | | | | |
| 226 | HNTBL27 | 209324 | pCMVSport 3.0 | 236 | 791 | 71 | 791 | 100 | 100 | 752 | 1 | 23 | 24 | 115 |
| | | Oct. 02, 1997 | | | | | | | | | | | | |
| 227 | HNTCE26 | PTA-1544 | pCMVSport 3.0 | 237 | 2163 | 830 | 2163 | 111 | 111 | 753 | 1 | 30 | 31 | 402 |
| | | Mar. 21, 2000 | | | | | | | | | | | | |
| 227 | HNTCE26 | PTA-1544 | pCMVSport 3.0 | 455 | 1763 | 1 | 1763 | 57 | 57 | 971 | 1 | 28 | 29 | 121 |
| | | Mar. 21, 2000 | | | | | | | | | | | | |
| 228 | HNTNI01 | 209782 | pSport1 | 238 | 2087 | 1 | 2087 | 307 | 307 | 754 | 1 | 33 | 34 | 76 |
| | | Apr. 20, 1998 | | | | | | | | | | | | |
| 228 | HNTNI01 | 209782 | pSport1 | 456 | 1274 | 1 | 1114 | 306 | 306 | 972 | 1 | 33 | 34 | 49 |
| | | Apr. 20, 1998 | | | | | | | | | | | | |
| 229 | HODDF13 | 203069 | Uni-ZAP XR | 239 | 830 | 1 | 830 | 46 | 46 | 755 | 1 | 23 | 24 | 41 |
| | | Jul. 27, 1998 | | | | | | | | | | | | |
| 230 | HODDN92 | 209012 | Uni-ZAP XR | 240 | 1939 | 294 | 1939 | | 434 | 756 | 1 | 26 | 27 | 35 |
| | | Apr. 28, 1997 | | | | | | | | | | | | |
| | | 209089 | | | | | | | | | | | | |
| | | Jun. 05, 1997 | | | | | | | | | | | | |
| 231 | HODFN71 | 203570 | Uni-ZAP XR | 241 | 1126 | 1 | 1126 | | 1 | 757 | 1 | 1 | 2 | 159 |
| | | Jan. 11, 1999 | | | | | | | | | | | | |
| 231 | HODFN71 | 203570 | Uni-ZAP XR | 457 | 1124 | 1 | 1124 | 27 | 27 | 973 | 1 | 18 | 19 | 148 |
| | | Jan. 11, 1999 | | | | | | | | | | | | |
| 232 | HODGE68 | 203570 | Uni-ZAP XR | 242 | 851 | 1 | 851 | 87 | 87 | 758 | 1 | 26 | 27 | 59 |
| | | Jan. 11, 1999 | | | | | | | | | | | | |
| 233 | HOEDB32 | 209628 | Uni-ZAP XR | 243 | 1462 | 73 | 1462 | 104 | 104 | 759 | 1 | 21 | 22 | 226 |
| | | Feb. 12, 1998 | | | | | | | | | | | | |
| 234 | HOFMQ33 | PTA-848 | pCMVSport 2.0 | 244 | 2410 | 1 | 2410 | 49 | 49 | 760 | 1 | 24 | 25 | 484 |
| | | Oct. 13, 1999 | | | | | | | | | | | | |
| 234 | HOFMQ33 | PTA-848 | pCMVSport 2.0 | 458 | 2409 | 1 | 2409 | 48 | 48 | 974 | 1 | 24 | 25 | 484 |
| | | Oct. 13, 1999 | | | | | | | | | | | | |
| 234 | HOFMQ33 | PTA-848 | pCMVSport 2.0 | 459 | 876 | 1 | 876 | 78 | 78 | 975 | 1 | 24 | 25 | 266 |
| | | Oct. 13, 1999 | | | | | | | | | | | | |
| 234 | HOFMQ33 | PTA-848 | pCMVSport 2.0 | 460 | 1586 | 1 | 1586 | | 724 | 976 | 1 | | | 5 |
| | | Oct. 13, 1999 | | | | | | | | | | | | |
| 234 | HOFMQ33 | PTA-848 | pCMVSport 2.0 | 461 | 1011 | 873 | 1011 | | 123 | 977 | 1 | 1 | 2 | 84 |
| | | Oct. 13, 1999 | | | | | | | | | | | | |
| 235 | HOFMT75 | PTA-848 | pCMVSport 2.0 | 245 | 2131 | 6 | 2131 | 83 | 83 | 761 | 1 | 20 | 21 | 410 |
| | | Oct. 13, 1999 | | | | | | | | | | | | |
| 235 | HOFMT75 | PTA-848 | pCMVSport 2.0 | 462 | 427 | 1 | 427 | 83 | 83 | 978 | 1 | 20 | 21 | 115 |
| | | Oct. 13, 1999 | | | | | | | | | | | | |
| 235 | HOFMT75 | PTA-848 | pCMVSport 2.0 | 463 | 1500 | 1 | 1500 | | 1225 | 979 | 1 | 9 | 10 | 92 |
| | | Oct. 13, 1999 | | | | | | | | | | | | |
| 235 | HOFMT75 | PTA-848 | pCMVSport 2.0 | 464 | 1234 | 337 | 1234 | 129 | 129 | 980 | 1 | 20 | 21 | 368 |
| | | Oct. 13, 1999 | | | | | | | | | | | | |
| 236 | HOFNY91 | PTA-1544 | pCMVSport 2.0 | 246 | 2406 | 1 | 2406 | 64 | 64 | 762 | 1 | 14 | 15 | 82 |
| | | Mar. 21, 2000 | | | | | | | | | | | | |
| 237 | HOFOC73 | PTA-848 | pCMVSport 2.0 | 247 | 1491 | 1 | 1491 | 18 | 18 | 763 | 1 | 18 | 19 | 129 |
| | | Oct. 13, 1999 | | | | | | | | | | | | |
| 237 | HOFOC73 | PTA-848 | pCMVSport 2.0 | 465 | 1395 | 1 | 1395 | 23 | 23 | 981 | 1 | 18 | 19 | 67 |
| | | Oct. 13, 1999 | | | | | | | | | | | | |
| 237 | HOFOC73 | PTA-848 | pCMVSport 2.0 | 466 | 270 | 1 | 270 | | 127 | 982 | 1 | 4 | 5 | 14 |
| | | Oct. 13, 1999 | | | | | | | | | | | | |
| 237 | HOFOC73 | PTA-848 | pCMVSport 2.0 | 467 | 2324 | 662 | 2324 | 142 | 142 | 983 | 1 | | | 6 |
| | | Oct. 13, 1999 | | | | | | | | | | | | |
| 238 | HOGAW62 | 209463 | pCMVSport 2.0 | 248 | 571 | 1 | 571 | 259 | 259 | 764 | 1 | 25 | 26 | 55 |
| | | Nov. 14, 1997 | | | | | | | | | | | | |
| 239 | HOHCH55 | 203331 | pCMVSport 2.0 | 249 | 2499 | 1 | 2499 | 221 | 221 | 765 | 1 | 23 | 24 | 494 |
| | | Oct. 08, 1998 | | | | | | | | | | | | |
| 239 | HOHCH55 | 203331 | pCMVSport 2.0 | 468 | 2522 | 1 | 2522 | 230 | 230 | 984 | 1 | 23 | 24 | 469 |
| | | Oct. 08, 1998 | | | | | | | | | | | | |
| 240 | HOQBJ82 | PTA-845 | Uni-ZAP XR | 250 | 3530 | 1 | 3530 | 361 | 361 | 766 | 1 | 21 | 22 | 164 |
| | | Oct. 13, 1999 | | | | | | | | | | | | |
| 240 | HOQBJ82 | PTA-845 | Uni-ZAP XR | 469 | 585 | 64 | 585 | 102 | 102 | 985 | 1 | 24 | 25 | 161 |
| | | Oct. 13, 1999 | | | | | | | | | | | | |
| 240 | HOQBJ82 | PTA-845 | Uni-ZAP XR | 470 | 4344 | 1339 | 1942 | | 55 | 986 | 1 | 1 | 2 | 325 |
| | | Oct. 13, 1999 | | | | | | | | | | | | |
| 241 | HOSBY40 | 209551 | Uni-ZAP XR | 251 | 1145 | 1 | 1145 | 89 | 89 | 767 | 1 | 30 | 31 | 56 |
| | | Dec. 12, 1997 | | | | | | | | | | | | |
| 242 | HOSDJ25 | 209423 | Uni-ZAP XR | 252 | 2214 | 985 | 2214 | 1076 | 1076 | 768 | 1 | 18 | 19 | 40 |
| | | Oct. 30, 1997 | | | | | | | | | | | | |
| 242 | HOSDJ25 | 209423 | Uni-ZAP XR | 471 | 1258 | 1 | 1258 | 146 | 146 | 987 | 1 | 18 | 19 | 40 |
| | | Oct. 30, 1997 | | | | | | | | | | | | |
| 243 | HOSFD58 | 97957 | Uni-ZAP XR | 253 | 2527 | 290 | 1747 | 56 | 56 | 769 | 1 | 30 | 31 | 624 |
| | | Mar. 13, 1997 | | | | | | | | | | | | |
| | | 209073 | | | | | | | | | | | | |
| | | May 22, 1997 | | | | | | | | | | | | |
| 243 | HOSFD58 | 97957 | Uni-ZAP XR | 472 | 2527 | 288 | 1747 | 477 | 477 | 988 | 1 | 32 | 33 | 61 |
| | | Mar. 13, 1997 | | | | | | | | | | | | |
| | | 209073 | | | | | | | | | | | | |
| | | May 22, 1997 | | | | | | | | | | | | |
| 244 | HPDDC77 | 209012 | pBluescript SK− | 254 | 978 | 1 | 978 | 51 | 51 | 770 | 1 | 29 | 30 | 131 |
| | | Apr. 28, 1997 | | | | | | | | | | | | |
| | | 209089 | | | | | | | | | | | | |
| | | Jun. 05, 1997 | | | | | | | | | | | | |
| 244 | HPDDC77 | 209012 | pBluescript SK− | 473 | 2361 | 455 | 1442 | 510 | 510 | 989 | 1 | 29 | 30 | 131 |
| | | Apr. 28, 1997 | | | | | | | | | | | | |
| | | 209089 | | | | | | | | | | | | |
| | | Jun. 05, 1997 | | | | | | | | | | | | |
| 245 | HPEAD79 | 209244 | Uni-ZAP XR | 255 | 813 | 1 | 813 | 51 | 51 | 771 | 1 | 15 | 16 | 41 |
| | | Sep. 12, 1997 | | | | | | | | | | | | |
| 246 | HPFCL43 | 209299 | Uni-ZAP XR | 256 | 665 | 1 | 665 | 21 | 21 | 772 | 1 | 17 | 18 | 79 |
| | | Sep. 25, 1997 | | | | | | | | | | | | |
| 247 | HPIBO15 | 209563 | Uni-ZAP XR | 257 | 1739 | 1 | 1739 | 128 | 128 | 773 | 1 | 18 | 19 | 211 |
| | | Dec. 18, 1997 | | | | | | | | | | | | |
| 247 | HPIBO15 | 209563 | Uni-ZAP XR | 474 | 1739 | 1 | 1739 | 127 | 127 | 990 | 1 | 18 | 19 | 173 |
| | | Dec. 18, 1997 | | | | | | | | | | | | |
| 248 | HPICB53 | PTA-846 | Uni-ZAP XR | 258 | 1139 | 1 | 1139 | 170 | 170 | 774 | 1 | 23 | 24 | 51 |
| | | Oct. 13, 1999 | | | | | | | | | | | | |
| 248 | HPICB53 | PTA-846 | Uni-ZAP XR | 475 | 438 | 1 | 438 | 163 | 163 | 991 | 1 | 23 | 24 | 51 |
| | | Oct. 13, 1999 | | | | | | | | | | | | |
| 249 | HPJBI33 | 209889 | Uni-ZAP XR | 259 | 1677 | 1 | 1677 | 236 | 236 | 775 | 1 | 31 | 32 | 53 |
| | | May 22, 1998 | | | | | | | | | | | | |
| 250 | HPJBK12 | PTA-855 | Uni-ZAP XR | 260 | 2648 | 1 | 2648 | 126 | 126 | 776 | 1 | 18 | 19 | 48 |
| | | Oct. 18, 1999 | | | | | | | | | | | | |
| 250 | HPJBK12 | PTA-855 | Uni-ZAP XR | 476 | 538 | 1 | 538 | 119 | 119 | 992 | 1 | 18 | 19 | 48 |
| | | Oct. 18, 1999 | | | | | | | | | | | | |
| 250 | HPJBK12 | PTA-855 | Uni-ZAP XR | 477 | 1346 | 1 | 1346 | | 969 | 993 | 1 | | | 10 |
| | | Oct. 18, 1999 | | | | | | | | | | | | |
| 250 | HPJBK12 | PTA-855 | Uni-ZAP XR | 478 | 912 | 1 | 912 | 509 | 509 | 994 | 1 | | | 4 |
| | | Oct. 18, 1999 | | | | | | | | | | | | |
| 251 | HPMDK28 | 209628 | Uni-ZAP XR | 261 | 1084 | 1 | 1084 | 64 | 64 | 777 | 1 | 25 | 26 | 201 |
| | | Feb. 12, 1998 | | | | | | | | | | | | |
| 251 | HPMDK28 | 209628 | Uni-ZAP XR | 479 | 1177 | 1 | 1083 | 58 | 58 | 995 | 1 | 25 | 26 | 201 |
| | | Feb. 12, 1998 | | | | | | | | | | | | |
| 252 | HPMFP40 | 209628 | Uni-ZAP XR | 262 | 1217 | 1 | 1217 | 37 | 37 | 778 | 1 | 24 | 25 | 44 |
| | | Feb. 12, 1998 | | | | | | | | | | | | |
| 253 | HPRAL78 | 209195 | Uni-ZAP XR | 263 | 2072 | 1 | 2072 | 62 | 62 | 779 | 1 | 29 | 30 | 420 |
| | | Aug. 01, 1997 | | | | | | | | | | | | |
| 253 | HPRAL78 | 209195 | Uni-ZAP XR | 480 | 1775 | 1038 | 1775 | 70 | 70 | 996 | 1 | 29 | 30 | 392 |
| | | Aug. 01, 1997 | | | | | | | | | | | | |
| 253 | HPRAL78 | 209195 | Uni-ZAP XR | 481 | 866 | 128 | 866 | 148 | 148 | 997 | 1 | 42 | 43 | 63 |
| | | Aug. 01, 1997 | | | | | | | | | | | | |
| 254 | HPRBC80 | 209852 | Uni-ZAP XR | 264 | 2543 | 1245 | 2543 | 94 | 94 | 780 | 1 | 30 | 31 | 387 |
| | | May 07, 1998 | | | | | | | | | | | | |
| 254 | HPRBC80 | 209852 | Uni-ZAP XR | 482 | 2052 | 275 | 2032 | 404 | 404 | 998 | 1 | 26 | 27 | 69 |
| | | May 07, 1998 | | | | | | | | | | | | |
| 255 | HPTTG19 | 209628 | Uni-ZAP XR | 265 | 559 | 1 | 559 | 215 | 215 | 781 | 1 | 16 | 17 | 49 |
| | | Feb. 12, 1998 | | | | | | | | | | | | |
| 256 | HPZAB47 | 209511 | pBluescript | 266 | 1676 | 1 | 1676 | 34 | 34 | 782 | 1 | 18 | 19 | 47 |
| | | Dec. 03, 1997 | | | | | | | | | | | | |
| 257 | HRAAB15 | 209651 | pCMVSport 3.0 | 267 | 1747 | 1 | 1747 | 35 | 35 | 783 | 1 | 14 | 15 | 159 |
| | | Mar. 04, 1998 | | | | | | | | | | | | |
| 258 | HRABA80 | 209889 | pCMVSport 3.0 | 268 | 1251 | 1 | 1251 | 144 | 144 | 784 | 1 | 27 | 28 | 102 |
| | | May 22, 1998 | | | | | | | | | | | | |
| 258 | HRABA80 | 209889 | pCMVSport 3.0 | 483 | 1237 | 1 | 1237 | 130 | 130 | 999 | 1 | 27 | 28 | 102 |
| | | May 22, 1998 | | | | | | | | | | | | |
| 259 | HRACD15 | 209852 | pCMVSport 3.0 | 269 | 1539 | 24 | 1539 | 252 | 252 | 785 | 1 | 40 | 41 | 53 |
| | | May 07, 1998 | | | | | | | | | | | | |
| 259 | HRACD15 | 209852 | pCMVSport 3.0 | 484 | 1681 | 24 | 1453 | 252 | 252 | 1000 | 1 | 40 | 41 | 53 |
| | | May 07, 1998 | | | | | | | | | | | | |
| 260 | HRACJ35 | 209878 | pCMVSport 3.0 | 270 | 2077 | 1 | 2077 | 132 | 132 | 786 | 1 | 24 | 25 | 472 |
| | | May 18, 1998 | | | | | | | | | | | | |
| 260 | HRACJ35 | 209878 | pCMVSport 3.0 | 485 | 1863 | 8 | 1863 | 99 | 99 | 1001 | 1 | 24 | 25 | 472 |
| | | May 18, 1998 | | | | | | | | | | | | |
| 260 | HRACJ35 | 209878 | pCMVSport 3.0 | 486 | 1134 | 1 | 1134 | | 1 | 1002 | 1 | 1 | 2 | 178 |
| | | May 18, 1998 | | | | | | | | | | | | |
| 261 | HRDFD27 | 209423 | Uni-ZAP XR | 271 | 805 | 1 | 805 | 82 | 82 | 787 | 1 | 35 | 36 | 83 |
| | | Oct. 30, 1997 | | | | | | | | | | | | |
| 262 | HRGBL78 | PTA-841 | Uni-ZAP XR | 272 | 2108 | 1 | 2108 | 30 | 30 | 788 | 1 | 27 | 28 | 359 |
| | | Oct. 13, 1999 | | | | | | | | | | | | |
| 262 | HRGBL78 | PTA-841 | Uni-ZAP XR | 487 | 626 | 8 | 626 | 30 | 30 | 1003 | 1 | 38 | 39 | 199 |
| | | Oct. 13, 1999 | | | | | | | | | | | | |
| 262 | HRGBL78 | PTA-841 | Uni-ZAP XR | 488 | 152 | 1 | 152 | | 11 | 1004 | 1 | | | 2 |
| | | Oct. 13, 1999 | | | | | | | | | | | | |
| 262 | HRGBL78 | PTA-841 | Uni-ZAP XR | 489 | 1760 | 127 | 1760 | | 1048 | 1005 | 1 | 10 | 11 | 32 |
| | | Oct. 13, 1999 | | | | | | | | | | | | |
| 263 | HROAJ03 | 209423 | Uni-ZAP XR | 273 | 1182 | 1 | 1182 | 19 | 19 | 789 | 1 | 20 | 21 | 192 |
| | | Oct. 30, 1997 | | | | | | | | | | | | |
| 264 | HROAJ39 | PTA-2069 | Uni-ZAP XR | 274 | 1146 | 224 | 1146 | 10 | 10 | 790 | 1 | 30 | 31 | 379 |
| | | Jun. 09, 2000 | | | | | | | | | | | | |
| 264 | HROAJ39 | PTA-2069 | Uni-ZAP XR | 490 | 880 | 1 | 880 | 31 | 31 | 1006 | 1 | 15 | 16 | 283 |
| | | Jun. 09, 2000 | | | | | | | | | | | | |
| 264 | HROAJ39 | PTA-2069 | Uni-ZAP XR | 491 | 1106 | 224 | 1106 | 247 | 247 | 1007 | 1 | 15 | 16 | 286 |
| | | Jun. 09, 2000 | | | | | | | | | | | | |
| 265 | HROBD68 | 203499 | Uni-ZAP XR | 275 | 1998 | 1 | 1998 | 122 | 122 | 791 | 1 | 22 | 23 | 48 |
| | | Dec. 01, 1998 | | | | | | | | | | | | |
| 266 | HSATR82 | 209299 | Uni-ZAP XR | 276 | 777 | 1 | 777 | 74 | 74 | 792 | 1 | 15 | 16 | 41 |
| | | Sep. 25, 1997 | | | | | | | | | | | | |
| 267 | HSAVH65 | 209651 | Uni-ZAP XR | 277 | 600 | 1 | 600 | 104 | 104 | 793 | 1 | 21 | 22 | 100 |
| | | Mar. 04, 1998 | | | | | | | | | | | | |
| 268 | HSAWD74 | 209126 | Uni-ZAP XR | 278 | 970 | 106 | 970 | 142 | 142 | 794 | 1 | 26 | 27 | 142 |
| | | Jun. 19, 1997 | | | | | | | | | | | | |
| 268 | HSAWD74 | 209126 | Uni-ZAP XR | 492 | 646 | 1 | 646 | 122 | 122 | 1008 | 1 | 29 | 30 | 45 |
| | | Jun. 19, 1997 | | | | | | | | | | | | |
| 269 | HSAWZ41 | 209463 | Uni-ZAP XR | 279 | 1388 | 1 | 1388 | 98 | 98 | 795 | 1 | 24 | 25 | 57 |
| | | Nov. 14, 1997 | | | | | | | | | | | | |
| 270 | HSAXA83 | 209324 | Uni-ZAP XR | 280 | 649 | 1 | 649 | 92 | 92 | 796 | 1 | 22 | 23 | 74 |
| | | Oct. 02, 1997 | | | | | | | | | | | | |
| 271 | HSAYB43 | 209568 | Uni-ZAP XR | 281 | 1699 | 37 | 1699 | 89 | 89 | 797 | 1 | 14 | 15 | 45 |
| | | Jan. 06, 1998 | | | | | | | | | | | | |
| 272 | HSDEK49 | 209603 | Uni-ZAP XR | 282 | 1782 | 1 | 1782 | 60 | 60 | 798 | 1 | 19 | 20 | 399 |
| | | Jan. 29, 1998 | | | | | | | | | | | | |
| 272 | HSDEK49 | 209603 | Uni-ZAP XR | 493 | 1590 | 96 | 1590 | 126 | 126 | 1009 | 1 | 21 | 22 | 305 |
| | | Jan. 29, 1998 | | | | | | | | | | | | |
| 273 | HSDFJ26 | 203648 | Uni-ZAP XR | 283 | 1205 | 23 | 1179 | 99 | 99 | 799 | 1 | 20 | 21 | 223 |
| | | Feb. 09, 1999 | | | | | | | | | | | | |
| 273 | HSDFJ26 | 203648 | Uni-ZAP XR | 494 | 1179 | 1 | 1179 | 99 | 99 | 1010 | 1 | 19 | 20 | 72 |
| | | Feb. 09, 1999 | | | | | | | | | | | | |
| 274 | HSDJJ82 | 209126 | Uni-ZAP XR | 284 | 462 | 1 | 462 | 79 | 79 | 800 | 1 | 32 | 33 | 52 |
| | | Jun. 19, 1997 | | | | | | | | | | | | |
| 275 | HSDSB09 | 209145 | pBluescript | 285 | 809 | 1 | 809 | 16 | 16 | 801 | 1 | 17 | 18 | 135 |
| | | Jul. 17, 1997 | | | | | | | | | | | | |
| 275 | HSDSB09 | 209145 | pBluescript | 495 | 819 | 1 | 819 | 22 | 22 | 1011 | 1 | 17 | 18 | 121 |
| | | Jul. 17, 1997 | | | | | | | | | | | | |
| 276 | HSDSE75 | 209324 | pBluescript | 286 | 1151 | 1 | 1151 | 160 | 160 | 802 | 1 | 18 | 19 | 181 |
| | | Oct. 02, 1997 | | | | | | | | | | | | |
| 277 | HSDZR57 | 209641 | pBluescript | 287 | 308 | 1 | 308 | 27 | 27 | 803 | 1 | 27 | 28 | 61 |
| | | Feb. 25, 1998 | | | | | | | | | | | | |
| 278 | HSIDJ81 | 209551 | Uni-ZAP XR | 288 | 1303 | 1 | 1303 | 8 | 8 | 804 | 1 | 22 | 23 | 58 |
| | | Dec. 12, 1997 | | | | | | | | | | | | |
| 279 | HSKDA27 | PTA-322 | Uni-ZAP XR | 289 | 4412 | 1 | 4412 | 786 | 786 | 805 | 1 | 24 | 25 | 950 |
| | | Jul. 09, 1999 | | | | | | | | | | | | |
| 279 | HSKDA27 | PTA-322 | Uni-ZAP XR | 496 | 1792 | 134 | 1792 | 127 | 127 | 1012 | 1 | 21 | 22 | 509 |
| | | Jul. 09, 1999 | | | | | | | | | | | | |
| 279 | HSKDA27 | PTA-322 | Uni-ZAP XR | 497 | 1673 | 1 | 1673 | 12 | 12 | 1013 | 1 | 21 | 22 | 554 |
| | | Jul. 09, 1999 | | | | | | | | | | | | |
| 280 | HSKGN81 | 97977 | pBluescript | 290 | 1907 | 151 | 1432 | 353 | 353 | 806 | 1 | 23 | 24 | 260 |
| | | Apr. 04, 1997 | | | | | | | | | | | | |
| | | 209082 | | | | | | | | | | | | |
| | | May 29, 1997 | | | | | | | | | | | | |
| 280 | HSKGN81 | 97977 | pBluescript | 498 | 2084 | 335 | 2084 | 537 | 537 | 1014 | 1 | 18 | 19 | 23 |
| | | Apr. 04, 1997 | | | | | | | | | | | | |
| | | 209082 | | | | | | | | | | | | |
| | | May 29, 1997 | | | | | | | | | | | | |
| 281 | HSLCQ82 | 209551 | Uni-ZAP XR | 291 | 1476 | 1 | 1476 | 226 | 226 | 807 | 1 | 28 | 29 | 84 |
| | | Dec. 12, 1997 | | | | | | | | | | | | |
| 281 | HSLCQ82 | 209551 | Uni-ZAP XR | 499 | 1501 | 1 | 1501 | 233 | 233 | 1015 | 1 | 22 | 23 | 57 |
| | | Dec. 12, 1997 | | | | | | | | | | | | |
| 282 | HSNAD72 | 209139 | Uni-ZAP XR | 292 | 861 | 1 | 861 | 220 | 220 | 808 | 1 | 19 | 20 | 35 |
| | | Jul. 03, 1997 | | | | | | | | | | | | |
| 283 | HSNMC45 | 209300 | Uni-ZAP XR | 293 | 587 | 1 | 587 | 225 | 225 | 809 | 1 | 18 | 19 | 55 |
| | | Sep. 25, 1997 | | | | | | | | | | | | |
| 283 | HSNMC45 | 209300 | Uni-ZAP XR | 500 | 720 | 1 | 720 | 232 | 232 | 1016 | 1 | 17 | 18 | 25 |
| | | Sep. 25, 1997 | | | | | | | | | | | | |
| 284 | HSQFP66 | 209126 | Uni-ZAP XR | 294 | 477 | 1 | 477 | 96 | 96 | 810 | 1 | 32 | 33 | 78 |
| | | Jun. 19, 1997 | | | | | | | | | | | | |
| 285 | HSRFZ57 | PTA-622 | Uni-ZAP XR | 295 | 1930 | 1 | 1925 | 82 | 82 | 811 | 1 | 18 | 19 | 41 |
| | | Sep. 02, 1999 | | | | | | | | | | | | |
| 286 | HSSFT08 | 209551 | Uni-ZAP XR | 296 | 791 | 1 | 791 | 125 | 125 | 812 | 1 | 34 | 35 | 58 |
| | | Dec. 12, 1997 | | | | | | | | | | | | |
| 287 | HSSGD52 | PTA-1543 | Uni-ZAP XR | 297 | 2425 | 1 | 2425 | 344 | 344 | 813 | 1 | 32 | 33 | 606 |
| | | Mar. 21, 2000 | | | | | | | | | | | | |
| 287 | HSSGD52 | PTA-1543 | Uni-ZAP XR | 501 | 2460 | 105 | 2460 | 338 | 338 | 1017 | 1 | 27 | 28 | 606 |
| | | Mar. 21, 2000 | | | | | | | | | | | | |
| 288 | HSSGG82 | 209580 | Uni-ZAP XR | 298 | 1543 | 186 | 1543 | 203 | 203 | 814 | 1 | 17 | 18 | 62 |
| | | Jan. 14, 1998 | | | | | | | | | | | | |
| 289 | HSUBW09 | 209007 | Uni-ZAP XR | 299 | 1021 | 1 | 1021 | 153 | 153 | 815 | 1 | 31 | 32 | 56 |
| | | Apr. 28, 1997 | | | | | | | | | | | | |
| | | 209083 | | | | | | | | | | | | |
| | | May 29, 1997 | | | | | | | | | | | | |
| 290 | HSVBU91 | 209603 | Uni-ZAP XR | 300 | 727 | 1 | 727 | 256 | 256 | 816 | 1 | 18 | 19 | 90 |
| | | Jan. 29, 1998 | | | | | | | | | | | | |
| 291 | HSYAV50 | PTA-1544 | pCMVSport 3.0 | 301 | 2801 | 1 | 2801 | 155 | 155 | 817 | 1 | 23 | 24 | 672 |
| | | Mar. 21, 2000 | | | | | | | | | | | | |
| 292 | HTAEE28 | PTA-843 | Uni-ZAP XR | 302 | 1341 | 1 | 1341 | 319 | 319 | 818 | 1 | 33 | 34 | 282 |
| | | Oct. 13, 1999 | | | | | | | | | | | | |
| 292 | HTAEE28 | PTA-843 | Uni-ZAP XR | 502 | 738 | 159 | 738 | 372 | 372 | 1018 | 1 | 33 | 34 | 122 |
| | | Oct. 13, 1999 | | | | | | | | | | | | |
| 292 | HTAEE28 | PTA-843 | Uni-ZAP XR | 503 | 935 | 1 | 807 | | 124 | 1019 | 1 | 1 | 2 | 216 |
| | | Oct. 13, 1999 | | | | | | | | | | | | |
| 293 | HTECC05 | 209877 | Uni-ZAP XR | 303 | 839 | 1 | 839 | 13 | 13 | 819 | 1 | 15 | 16 | 178 |
| | | May 18, 1998 | | | | | | | | | | | | |
| 293 | HTECC05 | 209877 | Uni-ZAP XR | 504 | 871 | 1 | 871 | 21 | 21 | 1020 | 1 | 15 | 16 | 127 |
| | | May 18, 1998 | | | | | | | | | | | | |
| 293 | HTECC05 | 209877 | Uni-ZAP XR | 505 | 881 | 1 | 881 | 27 | 27 | 1021 | 1 | 15 | 16 | 164 |
| | | May 18, 1998 | | | | | | | | | | | | |
| 294 | HTEEB42 | 97922 | Uni-ZAP XR | 304 | 1022 | 20 | 1022 | 59 | 59 | 820 | 1 | 22 | 23 | 298 |
| | | Mar. 07, 1997 | | | | | | | | | | | | |
| | | 209070 | | | | | | | | | | | | |
| | | May 22, 1997 | | | | | | | | | | | | |
| 295 | HTEFU65 | 209324 | Uni-ZAP XR | 305 | 1028 | 1 | 1028 | 231 | 231 | 821 | 1 | 24 | 25 | 46 |
| | | Oct. 2, 1997 | | | | | | | | | | | | |
| 296 | HTEGA76 | 97958 | Uni-ZAP XR | 306 | 450 | 1 | 450 | 90 | 90 | 822 | 1 | 43 | 44 | 65 |
| | | Mar. 13, 1997 | | | | | | | | | | | | |
| | | 209072 | | | | | | | | | | | | |
| | | May 22, 1997 | | | | | | | | | | | | |
| 297 | HTELM16 | 203648 | Uni-ZAP XR | 307 | 531 | 1 | 531 | 121 | 121 | 823 | 1 | 21 | 22 | 84 |
| | | Feb. 09, 1999 | | | | | | | | | | | | |
| 298 | HTELP17 | 203648 | Uni-ZAP XR | 308 | 808 | 1 | 808 | 164 | 164 | 824 | 1 | 20 | 21 | 44 |
| | | Feb. 09, 1999 | | | | | | | | | | | | |
| 299 | HTELS08 | PTA-1544 | Uni-ZAP XR | 309 | 1898 | 1 | 1898 | 15 | 15 | 825 | 1 | 17 | 18 | 158 |
| | | Mar. 21, 2000 | | | | | | | | | | | | |
| 300 | HTEPG70 | 203570 | Uni-ZAP XR | 310 | 813 | 1 | 813 | 365 | 365 | 826 | 1 | 27 | 28 | 89 |
| | | Jan. 11, 1999 | | | | | | | | | | | | |
| 301 | HTGEP89 | 97977 | Uni-ZAP XR | 311 | 703 | 1 | 703 | 285 | 285 | 827 | 1 | 29 | 30 | 94 |
| | | Apr. 04, 1997 | | | | | | | | | | | | |
| | | 209082 | | | | | | | | | | | | |
| | | May 29, 1997 | | | | | | | | | | | | |
| 302 | HTHBG43 | PTA-843 | Uni-ZAP XR | 312 | 848 | 1 | 848 | 47 | 47 | 828 | 1 | | | 39 |
| | | Oct. 13, 1999 | | | | | | | | | | | | |
| 302 | HTHBG43 | PTA-843 | Uni-ZAP XR | 506 | 632 | 103 | 632 | 149 | 149 | 1022 | 1 | | | 39 |
| | | Oct. 13, 1999 | | | | | | | | | | | | |
| 303 | HTHDS25 | 203071 | Uni-ZAP XR | 313 | 1061 | 1 | 1061 | 70 | 70 | 829 | 1 | 15 | 16 | 90 |
| | | Jul. 27, 1998 | | | | | | | | | | | | |
| 304 | HTLEP53 | 209641 | Uni-ZAP XR | 314 | 818 | 1 | 818 | 73 | 73 | 830 | 1 | 43 | 44 | 101 |
| | | Feb. 25, 1998 | | | | | | | | | | | | |
| 305 | HTLGE31 | PTA-2081 | Uni-ZAP XR | 315 | 534 | 1 | 534 | 51 | 51 | 831 | 1 | 17 | 18 | 86 |
| | | Jun. 09, 2000 | | | | | | | | | | | | |
| 306 | HTLHY14 | 203648 | Uni-ZAP XR | 316 | 1032 | 1 | 1032 | 36 | 36 | 832 | 1 | 17 | 18 | 246 |
| | | Feb. 09, 1999 | | | | | | | | | | | | |
| 307 | HTLIV19 | PTA-2081 | Uni-ZAP XR | 317 | 978 | 1 | 978 | 110 | 110 | 833 | 1 | 33 | 34 | 84 |
| | | Jun. 09, 2000 | | | | | | | | | | | | |
| 308 | HTOAK16 | 209368 | Uni-ZAP XR | 318 | 1466 | 1 | 1466 | 87 | 87 | 834 | 1 | 18 | 19 | 110 |
| | | Oct. 16, 1997 | | | | | | | | | | | | |
| 309 | HTOGR42 | 209603 | Uni-ZAP XR | 319 | 1430 | 1 | 1430 | 14 | 14 | 835 | 1 | 18 | 19 | 56 |
| | | Jan. 29, 1998 | | | | | | | | | | | | |
| 309 | HTOGR42 | 209603 | Uni-ZAP XR | 507 | 1433 | 1 | 1433 | 13 | 13 | 1023 | 1 | 18 | 19 | 60 |
| | | Jan. 29, 1998 | | | | | | | | | | | | |
| 310 | HTOHT18 | 209745 | Uni-ZAP XR | 320 | 1499 | 267 | 1499 | 433 | 433 | 836 | 1 | 24 | 25 | 53 |
| | | Apr. 07, 1998 | | | | | | | | | | | | |
| 311 | HTOIZ02 | PTA-843 | Uni-ZAP XR | 321 | 549 | 1 | 549 | 243 | 243 | 837 | 1 | 16 | 17 | 50 |
| | | Oct. 13, 1999 | | | | | | | | | | | | |
| 311 | HTOIZ02 | PTA-843 | Uni-ZAP XR | 508 | 1369 | 746 | 1345 | | 2 | 1024 | 1 | 1 | 2 | 240 |
| | | Oct. 13, 1999 | | | | | | | | | | | | |
| 312 | HTOJK60 | 209324 | Uni-ZAP XR | 322 | 904 | 1 | 904 | 217 | 217 | 838 | 1 | 18 | 19 | 32 |
| | | Oct. 02, 1997 | | | | | | | | | | | | |
| 313 | HTPCS72 | 209423 | Uni-ZAP XR | 323 | 3435 | 2141 | 3431 | 2365 | 2365 | 839 | 1 | 29 | 30 | 71 |
| | | Oct. 30, 1997 | | | | | | | | | | | | |
| 313 | HTPCS72 | 209423 | Uni-ZAP XR | 509 | 1598 | 306 | 1598 | 530 | 530 | 1025 | 1 | 29 | 30 | 71 |
| | | Oct. 30, 1997 | | | | | | | | | | | | |
| 314 | HTPIH83 | PTA-871 | Uni-ZAP XR | 324 | 1481 | 1 | 1481 | 118 | 118 | 840 | 1 | 24 | 25 | 230 |
| | | Oct. 26, 1999 | | | | | | | | | | | | |
| 314 | HTPIH83 | PTA-871 | Uni-ZAP XR | 510 | 530 | 1 | 530 | 111 | 111 | 1026 | 1 | 24 | 25 | 140 |
| | | Oct. 26, 1999 | | | | | | | | | | | | |
| 314 | HTPIH83 | PTA-871 | Uni-ZAP XR | 511 | 1046 | 359 | 1046 | | 96 | 1027 | 1 | 1 | 2 | 86 |
| | | Oct. 26, 1999 | | | | | | | | | | | | |
| 315 | HTSEW17 | 209138 | pBluescript | 325 | 652 | 1 | 652 | 170 | 170 | 841 | 1 | 34 | 35 | 37 |
| | | Jul. 03, 1997 | | | | | | | | | | | | |
| 316 | HTTBI76 | 209641 | Uni-ZAP XR | 326 | 1711 | 1 | 1711 | 133 | 133 | 842 | 1 | 22 | 23 | 133 |
| | | Feb. 25, 1998 | | | | | | | | | | | | |
| 317 | HTTBS64 | PTA-841 | Uni-ZAP XR | 327 | 2058 | 1 | 2058 | 95 | 95 | 843 | 1 | 17 | 18 | 42 |
| | | Oct. 13, 1999 | | | | | | | | | | | | |
| 317 | HTTBS64 | PTA-841 | Uni-ZAP XR | 512 | 819 | 1 | 819 | 100 | 100 | 1028 | 1 | 17 | 18 | 42 |
| | | Oct. 13, 1999 | | | | | | | | | | | | |
| 317 | HTTBS64 | PTA-841 | Uni-ZAP XR | 513 | 501 | 1 | 501 | | 175 | 1029 | 1 | 1 | 2 | 76 |
| | | Oct. 13, 1999 | | | | | | | | | | | | |
| 318 | HTWDF76 | 209852 | pSport1 | 328 | 963 | 1 | 963 | 316 | 316 | 844 | 1 | 24 | 25 | 85 |
| | | May 07, 1998 | | | | | | | | | | | | |
| 319 | HTXCV12 | 209423 | Uni-ZAP XR | 329 | 1134 | 1 | 1134 | 175 | 175 | 845 | 1 | 27 | 28 | 102 |
| | | Oct. 30, 1997 | | | | | | | | | | | | |
| 319 | HTXCV12 | 209423 | Uni-ZAP XR | 514 | 1162 | 1 | 1162 | 183 | 183 | 1030 | 1 | 27 | 28 | 91 |
| | | Oct. 30, 1997 | | | | | | | | | | | | |
| 320 | HTXFL30 | 209603 | Uni-ZAP XR | 330 | 1991 | 1 | 1991 | 30 | 30 | 846 | 1 | 39 | 40 | 102 |
| | | Jan. 29, 1998 | | | | | | | | | | | | |
| 321 | HTXJM03 | 209580 | Uni-ZAP XR | 331 | 2398 | 211 | 2398 | 328 | 328 | 847 | 1 | 18 | 19 | 56 |
| | | Jan. 14, 1998 | | | | | | | | | | | | |
| 322 | HTXON32 | 203648 | Uni-ZAP XR | 332 | 1505 | 1 | 1505 | 72 | 72 | 848 | 1 | 22 | 23 | 52 |
| | | Feb. 09, 1999 | | | | | | | | | | | | |
| 323 | HUFBY15 | PTA-1543 | pSport1 | 333 | 1193 | 1 | 1193 | 49 | 49 | 849 | 1 | 26 | 27 | 159 |
| | | Mar. 21, 2000 | | | | | | | | | | | | |
| 323 | HUFBY15 | PTA-1543 | pSport1 | 515 | 1012 | 1 | 1012 | 74 | 74 | 1031 | 1 | 26 | 27 | 145 |
| | | Mar. 21, 2000 | | | | | | | | | | | | |
| 324 | HUFCJ30 | 209641 | pSport1 | 334 | 868 | 1 | 868 | 123 | 123 | 850 | 1 | 29 | 30 | 50 |
| | | Feb. 25, 1998 | | | | | | | | | | | | |
| 325 | HUKAH51 | 209568 | Lambda ZAP II | 335 | 853 | 1 | 853 | 286 | 286 | 851 | 1 | 20 | 21 | 151 |
| | | Jan. 06, 1998 | | | | | | | | | | | | |
| 325 | HUKAH51 | 209568 | Lambda ZAP II | 516 | 754 | 1 | 754 | 144 | 144 | 1032 | 1 | 22 | 23 | 142 |
| | | Jan. 06, 1998 | | | | | | | | | | | | |
| 325 | HUKAH51 | 209568 | Lambda ZAP II | 517 | 667 | 1 | 667 | 55 | 55 | 1033 | 1 | 22 | 23 | 119 |
| | | Jan. 06, 1998 | | | | | | | | | | | | |
| 326 | HUSXS50 | 209651 | pSport1 | 336 | 2561 | 1 | 2561 | 280 | 280 | 852 | 1 | 19 | 20 | 522 |
| | | Mar. 04, 1998 | | | | | | | | | | | | |
| 326 | HUSXS50 | 209651 | pSport1 | 518 | 2025 | 1098 | 1997 | 281 | 281 | 1034 | 1 | 30 | 31 | 462 |
| | | Mar. 04, 1998 | | | | | | | | | | | | |
| 326 | HUSXS50 | 209651 | pSport1 | 519 | 1020 | 1 | 1020 | 179 | 179 | 1035 | 1 | 23 | 24 | 174 |
| | | Mar. 04, 1998 | | | | | | | | | | | | |
| 327 | HUVEB53 | 209603 | Uni-ZAP XR | 337 | 1502 | 1 | 1502 | 14 | 14 | 853 | 1 | 20 | 21 | 45 |
| | | Jan. 29, 1998 | | | | | | | | | | | | |
| 328 | HWAAD63 | 203570 | pCMVSport 3.0 | 338 | 3308 | 1 | 3308 | 322 | 322 | 854 | 1 | 30 | 31 | 168 |
| | | Jan. 11, 1999 | | | | | | | | | | | | |
| 328 | HWAAD63 | 203570 | pCMVSport 3.0 | 520 | 3306 | 1 | 3306 | 322 | 322 | 1036 | 1 | 30 | 31 | 53 |
| | | Jan. 11, 1999 | | | | | | | | | | | | |
| 328 | HWAAD63 | 203570 | pCMVSport 3.0 | 521 | 2194 | 1 | 2194 | 312 | 312 | 1037 | 1 | 30 | 31 | 169 |
| | | Jan. 11, 1999 | | | | | | | | | | | | |
| 329 | HWABY10 | 203071 | pCMVSport 3.0 | 339 | 2950 | 78 | 2914 | 263 | 263 | 855 | 1 | 22 | 23 | 168 |
| | | Jul. 27, 1998 | | | | | | | | | | | | |
| 330 | HWADJ89 | PTA-1543 | pCMVSport 3.0 | 340 | 1769 | 529 | 1769 | 581 | 581 | 856 | 1 | 1 | 2 | 43 |
| | | Mar. 21, 2000 | | | | | | | | | | | | |
| 331 | HWBCB89 | PTA-499 | pCMVSport 3.0 | 341 | 1317 | 3 | 1317 | 37 | 37 | 857 | 1 | 19 | 20 | 187 |
| | | Aug. 11, 1999 | | | | | | | | | | | | |
| 331 | HWBCB89 | PTA-499 | pCMVSport 3.0 | 522 | 1315 | 1 | 1315 | 35 | 35 | 1038 | 1 | 19 | 20 | 187 |
| | | Aug. 11, 1999 | | | | | | | | | | | | |
| 332 | HWBFX31 | PTA-1543 | pCMVSport 3.0 | 342 | 1677 | 1 | 1677 | 271 | 271 | 858 | 1 | 1 | 2 | 52 |
| | | Mar. 21, 2000 | | | | | | | | | | | | |
| 333 | HWDAH38 | PTA-868 | pCMVSport 3.0 | 343 | 1604 | 1 | 1604 | 255 | 255 | 859 | 1 | 20 | 21 | 40 |
| | | Oct. 26, 1999 | | | | | | | | | | | | |
| 333 | HWDAH38 | PTA-868 | pCMVSport 3.0 | 523 | 796 | 1 | 796 | 319 | 319 | 1039 | 1 | 20 | 21 | 40 |
| | | Oct. 26, 1999 | | | | | | | | | | | | |
| 334 | HWHGZ51 | PTA-499 | pCMVSport 3.0 | 344 | 1699 | 1 | 1699 | 33 | 33 | 860 | 1 | 30 | 31 | 346 |
| | | Aug. 11, 1999 | | | | | | | | | | | | |
| 335 | HWLIH65 | 203081 | pSport1 | 345 | 831 | 1 | 831 | 129 | 129 | 861 | 1 | 18 | 19 | 165 |
| | | Jul. 30, 1998 | | | | | | | | | | | | |
| 336 | HTEAM34 | PTA-623 | Uni-ZAP XR | 346 | 801 | 87 | 801 | 136 | 136 | 862 | 1 | 28 | 29 | 122 |
| | | Sep. 02, 1999 | | | | | | | | | | | | |
| 336 | HTEAM34 | PTA-623 | Uni-ZAP XR | 524 | 734 | 1 | 734 | 63 | 63 | 1040 | 1 | 28 | 29 | 122 |
| | | Sep. 02, 1999 | | | | | | | | | | | | |
| 337 | HTEJN13 | 97958 | Uni-ZAP XR | 347 | 1094 | 1 | 1094 | 156 | 156 | 866 | 1 | 15 | 16 | 208 |
| | | Mar. 13, 1997 | | | | | | | | | | | | |
| | | 209072 | | | | | | | | | | | | |
| | | May 22, 1997 | | | | | | | | | | | | |

Table 1B (Comprised of Tables 1B.1 and 1B.2)

[0087] The first column in Table 1B.1 and Table 1B.2 provides the gene number in the application corresponding to the clone identifier. The second column in Table 1B.1 and Table 1B.2 provides a unique “Clone ID:” for the cDNA clone related to each contig sequence disclosed in Table 1B.1 and Table 1B.2. This clone ID references the cDNA clone which contains at least the 5′ most sequence of the assembled contig and at least a portion of SEQ ID NO:X as determined by directly sequencing the referenced clone. The referenced clone may have more sequence than described in the sequence listing or the clone may have less. In the vast majority of cases, however, the clone is believed to encode a full-length polypeptide. In the case where a clone is not full-length, a full-length cDNA can be obtained by methods described elsewhere herein. The third column in Table 1B.1 and Table 1B.2 provides a unique “Contig ID” identification for each contig sequence. The fourth column in Table 1B.1 and Table 1B.2 provides the “SEQ ID NO:” identifier for each of the contig polynucleotide sequences disclosed in Table 1B.

[0088] Table 1B.1

[0089] The fifth column in Table 1B.1, “ORF (From-To)”, provides the location (i.e., nucleotide position numbers) within the polynucleotide sequence “SEQ ID NO:X” that delineate the preferred open reading flame (ORF) shown in the sequence listing and referenced in Table 1B.1, column 6, as SEQ ID NO:Y. Where the nucleotide position number “To” is lower than the nucleotide position number “From”, the preferred ORF is the reverse complement of the referenced polynucleotide sequence. The sixth column in Table 1B.1 provides the corresponding SEQ ID NO:Y for the polypeptide sequence encoded by the preferred ORF delineated in column 5. In one embodiment, the invention provides an amino acid sequence comprising, or alternatively consisting of, a polypeptide encoded by the portion of SEQ ID NO:X delineated by “ORF (From-To)”. Also provided are polynucleotides encoding such amino acid sequences and the complementary strand thereto. Column 7 in Table 1B.1 lists residues comprising epitopes contained in the polypeptides encoded by the preferred ORF (SEQ ID NO:Y), as predicted using the algorithm of Jameson and Wolf, (1988) Comp. Appl. Biosci. 4:181-186. The Jameson-Wolf antigenic analysis was performed using the computer program PROTEAN (Version 3.11 for the Power MacIntosh, DNASTAR, Inc., 1228 South Park Street Madison, Wis.). In specific embodiments, polypeptides of the invention comprise, or alternatively consist of, at least one, two, three, four, five or more of the predicted epitopes as described in Table 1B. It will be appreciated that depending on the analytical criteria used to predict antigenic determinants, the exact address of the determinant may vary slightly. Column 8 of Table 1B.1 (“Cytologic Band”) provides the chromosomal location of polynucleotides corresponding to SEQ ID NO:X. Chromosomal location was determined by finding exact matches to EST and cDNA sequences contained in the NCBI (National Center for Biotechnology Information) UniGene database.

[0090] It will be appreciated that depending on the analytical criteria used to predict antigenic determinants, the exact address of the determinant may vary slightly.

[0091] A modified version of the computer program BLASTN (Altshul, et al., J. Mot. Biol. 215:403-410 (1990), and Gish, and States, Nat. Genet. 3:266-272) (1993) was used to search the UniGene database for EST or cDNA sequences that contain exact or near-exact matches to a polynucleotide sequence of the invention (the ‘Query’). A sequence from the UniGene database (the ‘Subject’) was said to be an exact match if it contained a segment of 50 nucleotides in length such that 48 of those nucleotides were in the same order as found in the Query sequence. If all of the matches that met this criteria were in the same UniGene cluster, and mapping data was available for this cluster, it is indicated in Table 1B under the heading “Cytologic Band”. Where a cluster had been further localized to a distinct cytologic band, that band is disclosed; where no banding information was available, but the gene had been localized to a single-chromosome, the chromosome is disclosed.

[0092] Once a presumptive chromosomal location was determined for a polynucleotide of the invention, an associated disease locus was identified by comparison with a database of diseases which have been experimentally associated with genetic loci. The database used was the Morbid Map, derived from OMIM™ and National Center for Biotechnology Information, National Library of Medicine (Bethesda, Md.) 2000;. If the putative chromosomal location of a polynucleotide of the invention (Query sequence) was associated with a disease in the Morbid Map database, an OMIM reference identification number was noted in column 9, Table 1B.1, labelled “OMIM Disease Reference(s). Table 5 is a key to the OMIM reference identification numbers (column 1), and provides a description of the associated disease in Column 2.

[0093] Table 1B.2

[0094] Column 5, in Table 1B.2, provides an expression profile and library code:count for each of the contig sequences (SEQ ID NO:X) disclosed in Table 1B, which can routinely be combined with the information provided in Table 4 and used to determine the tissues, cells, and/or cell line libraries which predominantly express the polynucleotides of the invention. The first number in Table 1B.2, column 5 (preceding the colon), represents the tissue/cell source identifier code corresponding to the code and description provided in Table 4. The second number in column 5 (following the colon) represents the number of times a sequence corresponding to the reference polynucleotide sequence was identified in the corresponding tissue/cell source. Those tissue/cell source identifier codes in which the first two letters are “AR” designate information generated using DNA array technology. Utilizing this technology, cDNAs were amplified by PCR and then transferred, in duplicate, onto the array. Gene expression was assayed through hybridization of first strand cDNA probes to the DNA array. cDNA probes were generated from total RNA extracted from a variety of different tissues and cell lines. Probe synthesis was performed in the presence of ³³P dCTP, using oligo (dT) to prime reverse transcription. After hybridization, high stringency washing conditions were employed to remove non-specific hybrids from the array. The remaining signal, emanating from each gene target, was measured using a Phosphorimager. Gene expression was reported as Phosphor Stimulating Luminescence (PSL) which reflects the level of phosphor signal generated from the probe hybridized to each of the gene targets represented on the array. A local background signal subtraction was performed before the total signal generated from each array was used to normalize gene expression between the different hybridizations. The value presented after “[array code]:” represents the mean of the duplicate values, following background subtraction and probe normalization One of skill in the art could routinely use this information to identify normal and/or diseased tissue(s) which show a predominant expression pattern of the corresponding polynucleotide of the invention or to identify polynucleotides which show predominant and/or specific tissue and/or cell expression.

TABLE 1B.1

| | | | | | AA | | | |
|---|---|---|---|---|---|---|---|---|
| | | | | | SEQ | | | |
| | | | | | ID | | | OMIM |
| Gene | | Contig | SEQ ID | ORF | NO: | | Cytologic | Disease |
| No: | cDNA Clone ID | ID: | NO: X | (From-To) | Y | Predicted Epitopes | Band | Reference(s): |
| 1 | H2CBU83 | 884134 | 11 | 157-777 | 527 | Pro-62 to Asp-67, | | |
| | | | | | | Arg-74 to Gly-80, | | |
| | | | | | | Gln-146 to Glu-168. | | |
| | H2CBU83 | 745366 | 348 | 157-312 | 864 | | | |
| 2 | H2MAC30 | 544957 | 12 | 157-375 | 528 | Pro-54 to Gly-67. | | |
| 3 | H6EDC19 | 543259 | 13 | 389-733 | 529 | Arg-5 to Pro-12. | | |
| 4 | HACBD91 | 637482 | 14 | 117-266 | 530 | | | |
| 5 | HAGAQ26 | 561996 | 15 | 251-439 | 531 | | | |
| 6 | HAGBZ81 | 456414 | 16 | 65-214 | 532 | Ile-40 to Lys-45. | | |
| 7 | HAGDG59 | 534165 | 17 | 124-1026 | 533 | Lys-29 to Val-34, | | |
| | | | | | | Cys-94 to Asp-99, | | |
| | | | | | | Ser-102 to Val-107, | | |
| | | | | | | Gln-133 to Lys-139. | | |
| 8 | HAGDS35 | 1352199 | 18 | 45-410 | 534 | Leu-31 to Phe-38, | | |
| | | | | | | Glu-47 to Trp-52. | | |
| | HAGDS35 | 543617 | 349 | 52-405 | 865 | Leu-31 to Phe-38, | | |
| | | | | | | Glu-47 to Trp-52. | | |
| 9 | HAGFG51 | 823509 | 19 | 163-294 | 535 | Cys-36 to Gly-43. | | |
| 10 | HAIBO71 | 490848 | 20 | 325-525 | 536 | | | |
| 11 | HAIFL18 | 676933 | 21 | 274-693 | 537 | Glu-28 to Gly-45, | | |
| | | | | | | Ser-63 to Gly-69, | | |
| | | | | | | Gln-96 to Trp-104, | | |
| | | | | | | Gly-112 to Pro-117, | | |
| | | | | | | Arg-121 to Pro-128. | | |
| 12 | HAJAF57 | 823516 | 22 | 43-324 | 538 | Cys-25 to Ile-31, | | |
| | | | | | | Cys-85 to Asn-91. | | |
| 13 | HAJAN23 | 1352364 | 23 | 109-1797 | 539 | Pro-186 to Tyr-196, | | |
| | | | | | | Leu-294 to Leu-300, | | |
| | | | | | | Ser-380 to Thr-385, | | |
| | | | | | | Thr-486 to Ser-499, | | |
| | | | | | | Phe-513 to Ser-522. | | |
| | HAJAN23 | 872551 | 350 | 120-629 | 866 | | | |
| 14 | HAJBR69 | 638516 | 24 | 262-423 | 540 | | | |
| 15 | HAMFE15 | 905695 | 25 | 1495-2757 | 541 | Leu-8 to Thr-16, | | |
| | | | | | | Gly-93 to Ala-105, | | |
| | | | | | | Arg-136 to Thr-142, | | |
| | | | | | | Lys-195 to Gln-200, | | |
| | | | | | | Lys-241 to His-247, | | |
| | | | | | | Gly-255 to Gln-270, | | |
| | | | | | | Gln-288 to Leu-293, | | |
| | | | | | | Thr-316 to Asp-328, | | |
| | | | | | | Gly-348 to Pro-355, | | |
| | | | | | | Asp-408 to Met-415. | | |
| | HAMFE15 | 823350 | 351 | 226-369 | 867 | Ser-39 to Asn-47. | | |
| 16 | HAMGG68 | 731859 | 26 | 312-479 | 542 | | | |
| 17 | HAMGR28 | 892971 | 27 | 98-823 | 543 | Ala-27 to Asp-34, | | |
| | | | | | | Tyr-116 to Leu-125. | | |
| | HAMGR28 | 748223 | 352 | 40-651 | 868 | Ala-27 to Asp-34, | | |
| | | | | | | Tyr-116 to Leu-125, | | |
| | | | | | | Arg-185 to Cys-194. | | |
| 18 | HAPOM49 | 769555 | 28 | 251-817 | 544 | Gln-23 to Asp-30, | | |
| | | | | | | Lys-66 to Cys-87. | | |
| | HAPOM49 | 722386 | 353 | 448-816 | 869 | Met-1 to Cys-21, | | |
| | | | | | | Cys-41 to Asp-59, | | |
| | | | | | | Pro-104 to His-116. | | |
| 19 | HAPPW30 | 1352278 | 29 | 59-850 | 545 | Glu-42 to Pro-53, | | |
| | | | | | | Ser-67 to Tyr-79, | | |
| | | | | | | Phe-137 to Leu-143, | | |
| | | | | | | Ser-180 to Arg-186, | | |
| | | | | | | Trp-188 to Gly-195, | | |
| | | | | | | Pro-210 to Arg-216, | | |
| | | | | | | Thr-222 to Asp-243. | | |
| | HAPPW30 | 684272 | 354 | 54-329 | 870 | Glu-42 to Pro-53, | | |
| | | | | | | Ser-67 to Thr-73, | | |
| | | | | | | Ala-84 to Leu-90. | | |
| 20 | HATBR65 | 635514 | 30 | 252-446 | 546 | Ile-25 to Trp-30. | | |
| 21 | HATCB92 | 603948 | 31 | 247-417 | 547 | Arg-49 to Gln-56. | | |
| 22 | HATEE46 | 565618 | 32 | 241-402 | 548 | | | |
| 23 | HAUAI83 | 639009 | 33 | 253-399 | 549 | Asn-34 to Lys-42. | 19 | |
| | HAUAI83 | 383592 | 355 | 575-643 | 871 | Ala-17 to Lys-23. | | |
| 24 | HBAMB15 | 671835 | 34 | 390-569 | 550 | | | |
| 25 | HBGBA69 | 1352289 | 35 | 124-843 | 551 | Pro-51 to Asp-56, | | |
| | | | | | | Gly-95 to Thr-105, | | |
| | | | | | | Val-132 to Ala-138, | | |
| | | | | | | Pro-229 to Leu-240. | | |
| | HBGBA69 | 709658 | 356 | 62-244 | 872 | Thr-52 to Gly-57. | | |
| 26 | HBIAE26 | 514418 | 36 | 75-194 | 552 | Ser-22 to Lys-27. | | |
| 27 | HBINS58 | 1352386 | 37 | 57-578 | 553 | Gly-32 to Gly-37, | 1 | |
| | | | | | | Glu-78 to His-87, | | |
| | | | | | | Tyr-102 to Ala-107, | | |
| | | | | | | Pro-115 to Val-122, | | |
| | | | | | | Lys-164 to Tyr-170. | | |
| | HBINS58 | 961712 | 357 | 71-592 | 873 | Gly-32 to Gly-37, | | |
| | | | | | | Glu-78 to His-87, | | |
| | | | | | | Tyr-102 to Ala-107, | | |
| | | | | | | Pro-115 to Val-122, | | |
| | | | | | | Lys-164 to Gln-171. | | |
| | HBINS58 | 892924 | 358 | 100-732 | 874 | Gly-32 to Gly-37, | | |
| | | | | | | Glu-78 to His-87, | | |
| | | | | | | Tyr-102 to Ala-107, | | |
| | | | | | | Pro-115 to Val-122. | | |
| 28 | HBJNC59 | 1125802 | 38 | 66-803 | 554 | Pro-29 to Gly-46, | | |
| | | | | | | Lys-48 to Gly-55, | | |
| | | | | | | Lys-67 to Gly-80, | | |
| | | | | | | Lys-100 to Pro-115, | | |
| | | | | | | Arg-121 to Gly-127, | | |
| | | | | | | Asn-139 to Gly-149, | | |
| | | | | | | Ser-179 to Arg-185, | | |
| | | | | | | Asp-191 to Gly-196, | | |
| | | | | | | Lys-219 to Gly-224. | | |
| | HBJNC59 | 899397 | 359 | 66-365 | 875 | Pro-29 to Gly-46, | | |
| | | | | | | Lys-48 to Gly-55, | | |
| | | | | | | Lys-67 to Gly-80, | | |
| | | | | | | Gly-89 to Asn-99. | | |
| | HBJNC59 | 902207 | 360 | 64-801 | 876 | Pro-29 to Gly-46, | | |
| | | | | | | Lys-48 to Gly-55, | | |
| | | | | | | Lys-67 to Gly-80, | | |
| | | | | | | Lys-100 to Pro-115, | | |
| | | | | | | Arg-121 to Gly-127, | | |
| | | | | | | Asn-139 to Gly-149, | | |
| | | | | | | Ser-179 to Arg-185, | | |
| | | | | | | Asp-191 to Gly-196, | | |
| | | | | | | Lys-219 to Gly-224. | | |
| 29 | HBNAW17 | 526797 | 39 | 77-262 | 555 | | | |
| 30 | HBOEG69 | 793786 | 40 | 302-466 | 556 | | | |
| 31 | HCACU58 | 625923 | 41 | 137-388 | 557 | | | |
| 32 | HCE2F54 | 634016 | 42 | 166-1125 | 558 | His-44 to Pro-50, | | |
| | | | | | | Glu-90 to Glu-96, | | |
| | | | | | | Gln-111 to Glu-117, | | |
| | | | | | | Ser-143 to Gly-151, | | |
| | | | | | | Ala-154 to Leu-166, | | |
| | | | | | | Pro-199 to Ala-216, | | |
| | | | | | | Gly-264 to Asp-272. | | |
| 33 | HCE3G69 | 728432 | 43 | 165-1175 | 559 | Lys-50 to Asp-66, | 2 | |
| | | | | | | Pro-68 to Glu-77, | | |
| | | | | | | Glu-102 to Glu-107, | | |
| | | | | | | Glu-131 to Leu-146, | | |
| | | | | | | Ala-175 to Glu-183, | | |
| | | | | | | Phe-205 to Lys-216, | | |
| | | | | | | Val-263 to Thr-281, | | |
| | | | | | | Pro-304 to Ala-313. | | |
| | HCE3G69 | 494346 | 361 | 165-482 | 877 | Lys-50 to Leu-69. | | |
| 34 | HCE5F43 | 612796 | 44 | 113-931 | 560 | Asn-23 to Ser-32, | | |
| | | | | | | Trp-61 to Ser-68, | | |
| | | | | | | Ala-130 to Ala-135, | | |
| | | | | | | Thr-141 to Gly-148, | | |
| | | | | | | Asn-176 to Gly-182, | | |
| | | | | | | Pro-197 to Glu-205, | | |
| | | | | | | His-211 to Glu-222, | | |
| | | | | | | Gln-242 to Ile-248, | | |
| | | | | | | Thr-265 to Leu-271. | | |
| 35 | HCEFB80 | 1143407 | 45 | 12-281 | 561 | Met-1 to Ala-8, | 22 | |
| | | | | | | Ser-51 to Leu-62, | | |
| | | | | | | Pro-70 to Lys-78. | | |
| | HCEFB80 | 1046853 | 362 | 5-274 | 878 | Met-1 to Ala-8. | | |
| 36 | HCENK38 | 658737 | 46 | 10-168 | 562 | Tyr-30 to Ser-40. | | |
| 37 | HCEWE20 | 543370 | 47 | 166-321 | 563 | Ser-17 to Gln-22. | | |
| 38 | HCFNN01 | 430297 | 48 | 254-385 | 564 | | | |
| 39 | HCGMD59 | 636078 | 49 | 438-662 | 565 | | | |
| 40 | HCHNF25 | 1352270 | 50 | 1130-1636 | 566 | Val-34 to Leu-39, | | |
| | | | | | | Ser-64 to Cys-74, | | |
| | | | | | | Ser-86 to Lys-94, | | |
| | | | | | | Gln-133 to Asn-143, | | |
| | | | | | | Pro-160 to Asp-169. | | |
| | HCHNF25 | 658672 | 363 | 180-623 | 879 | Val-34 to Leu-39, | | |
| | | | | | | Ser-64 to Cys-74, | | |
| | | | | | | Ser-86 to Ser-95, | | |
| | | | | | | Arg-128 to Ala-136. | | |
| 41 | HCNDR47 | 1016919 | 51 | 21-401 | 567 | Pro-71 to His-92. | 1 | |
| | HCNDR47 | 863677 | 364 | 124-507 | 880 | Pro-71 to His-92. | | |
| | HCNDR47 | 874128 | 365 | 603-632 | 881 | Leu-1 to Thr-9. | | |
| 42 | HCNSB61 | 526413 | 52 | 218-349 | 568 | Pro-26 to Asn-32. | | |
| 43 | HCNSM70 | 637547 | 53 | 107-751 | 569 | Met-1 to Ser-6. | | |
| | HCNSM70 | 589445 | 366 | 161-436 | 882 | Met-1 to Ser-6. | | |
| 44 | HCUCK44 | 720291 | 54 | 593-772 | 570 | | | |
| 45 | HCUEO60 | 499242 | 55 | 102-296 | 571 | | | |
| 46 | HCUHK65 | 651313 | 56 | 80-319 | 572 | Met-24 to Gly-29, | | |
| | | | | | | Ala-57 to Thr-63. | | |
| | HCUHK65 | 880178 | 367 | 770-2893 | 883 | Glu-124 to Leu-131, | | |
| | | | | | | Asp-266 to Pro-271, | | |
| | | | | | | Asn-273 to Phe-280, | | |
| | | | | | | Glu-315 to Arg-321, | | |
| | | | | | | Pro-400 to Val-407, | | |
| | | | | | | Ala-446 to Pro-452, | | |
| | | | | | | Thr-487 to Gly-492, | | |
| | | | | | | Phe-517 to Gly-523, | | |
| | | | | | | Tyr-599 to Lys-605, | | |
| | | | | | | Thr-611 to Thr-626, | | |
| | | | | | | Met-653 to Gly-658, | | |
| | | | | | | Ala-686 to Thr-692. | | |
| 47 | HCUIM65 | 550208 | 57 | 557-700 | 573 | | 19p13.3 | 108725, 109480, |
| | | | | | | | | 111250, 120700, |
| | | | | | | | | 130130, 130130, |
| | | | | | | | | 133171, 136836, |
| | | | | | | | | 145981, 147141, |
| | | | | | | | | 147840, 164953, |
| | | | | | | | | 181800, 188070, |
| | | | | | | | | 277600, 600957, |
| | | | | | | | | 601238, 601240, |
| | | | | | | | | 601768, 601846, |
| | | | | | | | | 602018, 602216, |
| | | | | | | | | 602216, 602216, |
| | | | | | | | | 602477, 605248 |
| 48 | HCWDS72 | 707833 | 58 | 19-318 | 574 | | | |
| 49 | HCWGU37 | 1042325 | 59 | 194-226 | 575 | | 13, 15, 16, 19, 2, 3, 4, 5 | |
| | HCWGU37 | 901913 | 368 | 187-219 | 884 | | | |
| 50 | HCWKC15 | 553621 | 60 | 37-159 | 576 | Lys-28 to Thr-34. | | |
| 51 | HCWLD74 | 628256 | 61 | 138-335 | 577 | | | |
| 52 | HDHEB60 | 499233 | 62 | 568-894 | 578 | Asp-48 to Ser-54. | | |
| 53 | HDLAC10 | 692299 | 63 | 132-377 | 579 | | | |
| 54 | HDPBA28 | 1062783 | 64 | 259-3084 | 580 | Gln-33 to Trp-49, | | |
| | | | | | | Gly-161 to Gly-172, | | |
| | | | | | | Ile-207 to Arg-212, | | |
| | | | | | | Asn-414 to Val-419, | | |
| | | | | | | Val-423 to Gln-428, | | |
| | | | | | | Val-436 to Gly-441, | | |
| | | | | | | Lys-467 to Leu-478, | | |
| | | | | | | Phe-497 to Ser-508, | | |
| | | | | | | Met-550 to Gly-560, | | |
| | | | | | | Glu-688 to Thr-697, | | |
| | | | | | | Ile-711 to Gly-720, | | |
| | | | | | | Ala-747 to Gly-759, | | |
| | | | | | | Leu-785 to Phe-791, | | |
| | | | | | | Ser-795 to Gln-800, | | |
| | | | | | | Thr-808 to Lys-813, | | |
| | | | | | | Ser-821 to Phe-832, | | |
| | | | | | | Thr-879 to Glu-889, | | |
| | | | | | | Leu-898 to Gln-904, | | |
| | | | | | | Gln-934 to Met-941. | | |
| | HDPBA28 | 866429 | 369 | 69-2894 | 885 | Gln-33 to Trp-49, | | |
| | | | | | | Gly-161 to Gly-172, | | |
| | | | | | | Ile-207 to Arg-212, | | |
| | | | | | | Asn-414 to Val-419, | | |
| | | | | | | Val-423 to Gln-428, | | |
| | | | | | | Val-436 to Gly-441, | | |
| | | | | | | Lys-467 to Leu-478, | | |
| | | | | | | Phe-497 to Ser-508, | | |
| | | | | | | Met-550 to Gly-560, | | |
| | | | | | | Glu-688 to Thr-697, | | |
| | | | | | | Ile-711 to Gly-720, | | |
| | | | | | | Ala-747 to Gly-759, | | |
| | | | | | | Leu-785 to Phe-791, | | |
| | | | | | | Ser-795 to Gln-800. | | |
| 55 | HDPBQ71 | 1160316 | 65 | 93-1928 | 581 | Leu-56 to Thr-62, | | |
| | | | | | | Gln-80 to Pro-87, | | |
| | | | | | | Gly-106 to Gln-113, | | |
| | | | | | | Pro-122 to Lys-127, | | |
| | | | | | | Gln-138 to Asn-146, | | |
| | | | | | | Cys-280 to Lys-287, | | |
| | | | | | | Asp-306 to Gly-311, | | |
| | | | | | | Asp-321 to Thr-326, | | |
| | | | | | | Gly-337 to Pro-345, | | |
| | | | | | | Thr-354 to Gln-359, | | |
| | | | | | | Asn-451 to Ile-457, | | |
| | | | | | | Lys-526 to Glu-532, | | |
| | | | | | | Gln-591 to Glu-603. | | |
| | HDPBQ71 | 727200 | 370 | 24-1859 | 886 | Leu-56 to Thr-62, | | |
| | | | | | | Gln-80 to Pro-87, | | |
| | | | | | | Gly-106 to Gln-113, | | |
| | | | | | | Pro-122 to Lys-127, | | |
| | | | | | | Gln-138 to Asn-146. | | |
| | HDPBQ71 | 886067 | 371 | 165-1535 | 887 | Leu-56 to Thr-62, | | |
| | | | | | | Gln-80 to Pro-87, | | |
| | | | | | | Gly-106 to Gln-113, | | |
| | | | | | | Pro-122 to Lys-127, | | |
| | | | | | | Gln-138 to Asn-146, | | |
| | | | | | | Cys-280 to Lys-287, | | |
| | | | | | | Asp-306 to Gly-311, | | |
| | | | | | | Asp-321 to Thr-326, | | |
| | | | | | | Gly-337 to Pro-345, | | |
| | | | | | | Thr-354 to Gln-359, | | |
| | | | | | | Asn-451 to Arg-456. | | |
| 56 | HDPCL63 | 1019008 | 66 | 35-835 | 582 | Ile-4 to Glu-10, | | |
| | | | | | | Gly-58 to Asp-64. | | |
| | HDPCL63 | 847045 | 372 | 260-733 | 888 | Lys-72 to Cys-80, | | |
| | | | | | | Leu-90 to Pro-96, | | |
| | | | | | | Ala-110 to Thr-119, | | |
| | | | | | | Glu-121 to Gly-128, | | |
| | | | | | | Ser-140 to Lys-147. | | |
| | HDPCL63 | 897484 | 373 | 605-961 | 889 | Pro-8 to Gln-13, | | |
| | | | | | | Thr-38 to Pro-46, | | |
| | | | | | | Pro-100 to Met-108, | | |
| | | | | | | Pro-113 to Pro-118. | | |
| 57 | HDPCO25 | 460682 | 67 | 182-343 | 583 | Pro-22 to His-33, | | |
| | | | | | | Ser-42 to Trp-48. | | |
| 58 | HDPFF39 | 588697 | 68 | 175-765 | 584 | Ser-128 to Thr-133, | | |
| | | | | | | Thr-158 to Thr-166, | | |
| | | | | | | Leu-168 to Gly-175, | | |
| | | | | | | Ala-179 to Asp-196. | | |
| 59 | HDPFP29 | 628254 | 69 | 293-451 | 585 | | | |
| 60 | HDPGI49 | 785887 | 70 | 266-484 | 586 | | | |
| 61 | HDPGT01 | 771583 | 71 | 8-271 | 587 | Cys-65 to Ser-71. | 16 | |
| 62 | HDPHI51 | 460679 | 72 | 245-367 | 588 | Gly-2 to Glu-7, | | |
| | | | | | | Arg-27 to Gly-34. | | |
| 63 | HDPJM30 | 879325 | 73 | 59-1633 | 589 | Arg-15 to Val-22. | | |
| | HDPJM30 | 603517 | 374 | 259-438 | 890 | Pro-41 to Ala-55. | | |
| 64 | HDPMM88 | 972734 | 74 | 100-2913 | 590 | Met-1 to Ser-13, | | |
| | | | | | | Ser-45 to Phe-51, | | |
| | | | | | | Asn-103 to Lys-113, | | |
| | | | | | | Phe-135 to Gly-140, | | |
| | | | | | | Asp-165 to Pro-178, | | |
| | | | | | | Ser-224 to Ala-229, | | |
| | | | | | | Asn-283 to Arg-288, | | |
| | | | | | | Asp-347 to Tyr-352, | | |
| | | | | | | Thr-367 to Glu-372, | | |
| | | | | | | Gly-420 to Thr-425, | | |
| | | | | | | Glu-456 to Lys-462, | | |
| | | | | | | Phe-466 to Asn-474, | | |
| | | | | | | Glu-480 to Leu-485, | | |
| | | | | | | Asp-673 to Asp-681, | | |
| | | | | | | Gln-684 to Gly-689, | | |
| | | | | | | Leu-841 to Gly-874, | | |
| | | | | | | Gly-890 to Pro-900, | | |
| | | | | | | Ser-902 to Ser-911, | | |
| | | | | | | Leu-918 to Asp-924, | | |
| | | | | | | Ser-930 to Val-935. | | |
| | HDPMM88 | 906121 | 375 | 141-467 | 891 | Ser-28 to Phe-34, | | |
| | | | | | | Asn-86 to Tyr-93. | | |
| | HDPMM88 | 902299 | 376 | 44-181 | 892 | | | |
| | HDPMM88 | 885059 | 377 | 419-439 | 893 | | | |
| | HDPMM88 | 874074 | 378 | 111-146 | 894 | | | |
| | HDPMM88 | 854246 | 379 | 167-334 | 895 | | | |
| | HDPMM88 | 854245 | 380 | 28-186 | 896 | Ser-26 to Thr-31. | | |
| 65 | HDPNC61 | 637585 | 75 | 20-304 | 591 | Glu-35 to Lys-44, | | |
| | | | | | | Cys-83 to Gly-88. | | |
| 66 | HDPOJ08 | 731863 | 76 | 159-527 | 592 | Lys-30 to Thr-35. | | |
| 67 | HDPOZ56 | 1352319 | 77 | 91-1791 | 593 | Gln-22 to Gln-44, | | |
| | | | | | | Ala-90 to Gly-95, | | |
| | | | | | | Lys-137 to Trp-146, | | |
| | | | | | | Arg-171 to Asp-181, | | |
| | | | | | | Glu-370 to Ser-380, | | |
| | | | | | | Asp-447 to Gly-452, | | |
| | | | | | | Gln-463 to Trp-469, | | |
| | | | | | | Asn-505 to Ala-511, | | |
| | | | | | | Asp-513 to His-520, | | |
| | | | | | | Ala-542 to Val-551, | | |
| | | | | | | Asn-559 to His-567. | | |
| | HDPOZ56 | 815653 | 381 | 103-1800 | 897 | Gln-22 to Gln-44, | | |
| | | | | | | Ala-90 to Gly-95, | | |
| | | | | | | Lys-137 to Trp-146, | | |
| | | | | | | Arg-171 to Asp-181, | | |
| | | | | | | Glu-370 to Ser-380, | | |
| | | | | | | Asp-447 to Gly-452, | | |
| | | | | | | Gln-463 to Trp-469, | | |
| | | | | | | Asn-504 to Ala-510, | | |
| | | | | | | Asp-512 to His-519, | | |
| | | | | | | Ala-541 to Val-550, | | |
| | | | | | | Asn-558 to His-566. | | |
| | HDPOZ56 | 743479 | 382 | 59-1018 | 898 | Gln-22 to Gln-44, | | |
| | | | | | | Ala-53 to Gly-58. | | |
| 68 | HDPPN86 | 1037893 | 78 | 127-267 | 594 | | | |
| | HDPPN86 | 895711 | 383 | 117-257 | 899 | | | |
| 69 | HDPSB18 | 1043263 | 79 | 123-323 | 595 | Lys-23 to Lys-31, | 10 | |
| | | | | | | Ala-38 to Ser-43. | | |
| | HDPSB18 | 903816 | 384 | 116-307 | 900 | | | |
| | HDPSB18 | 905414 | 385 | 1525-1566 | 901 | | | |
| | HDPSB18 | 732097 | 386 | 345-665 | 902 | Lys-57 to Gly-64. | | |
| 70 | HDPSH53 | 1309174 | 80 | 158-430 | 596 | Met-1 to Trp-6, | | |
| | | | | | | Leu-22 to Thr-27, | | |
| | | | | | | Pro-44 to Thr-63. | | |
| | HDPSH53 | 1040056 | 387 | 153-536 | 903 | Met-1 to Trp-6, | | |
| | | | | | | Leu-22 to Thr-27, | | |
| | | | | | | Pro-44 to Gly-58, | | |
| | | | | | | Ala-61 to Glu-74, | | |
| | | | | | | Pro-99 to Gly-111, | | |
| | | | | | | Cys-121 to Ser-127. | | |
| | HDPSH53 | 882768 | 388 | 212-484 | 904 | Met-1 to Trp-6, | | |
| | | | | | | Leu-22 to Thr-27. | | |
| 71 | HDPSP01 | 1352280 | 81 | 184-2313 | 597 | Gln-75 to Cys-80, | | |
| | | | | | | Glu-97 to Lys-104, | | |
| | | | | | | Glu-114 to Ala-119, | | |
| | | | | | | Thr-177 to Gln-190, | | |
| | | | | | | Asn-230 to Trp-240, | | |
| | | | | | | Glu-269 to Arg-274, | | |
| | | | | | | Pro-279 to Ala-286, | | |
| | | | | | | Pro-323 to Cys-328, | | |
| | | | | | | Asn-362 to Leu-367, | | |
| | | | | | | Thr-390 to Arg-397, | | |
| | | | | | | Leu-490 to Arg-495, | | |
| | | | | | | Gln-556 to Leu-561, | | |
| | | | | | | Gln-657 to Val-674. | | |
| | HDPSP01 | 689129 | 389 | 227-1153 | 905 | Gln-75 to Cys-80. | | |
| 72 | HDPSP54 | 744440 | 82 | 2356-2499 | 598 | Pro-29 to Lys-37. | | |
| | HDPSP54 | 502472 | 390 | 179-343 | 906 | | | |
| 73 | HDPTD15 | 692917 | 83 | 223-825 | 599 | Arg-20 to Lys-44, | | |
| | | | | | | Arg-59 to Arg-68, | | |
| | | | | | | Trp-74 to Lys-86, | | |
| | | | | | | Thr-91 to Val-102. | | |
| 74 | HDPUW68 | 812737 | 84 | 40-1440 | 600 | Gly-12 to Tyr-26, | | |
| | | | | | | Val-52 to Asp-59, | | |
| | | | | | | Gln-88 to Asp-93, | | |
| | | | | | | Arg-124 to Asn-129, | | |
| | | | | | | His-193 to Arg-198, | | |
| | | | | | | Gln-207 to Thr-213, | | |
| | | | | | | Gln-338 to Arg-346, | | |
| | | | | | | Ser-378 to Ala-384, | | |
| | | | | | | Ser-413 to Arg-420, | | |
| | | | | | | Ser-428 to Glu-434, | | |
| | | | | | | His-443 to Ser-451, | | |
| | | | | | | Glu-454 to Ser-461. | | |
| 75 | HDPWN93 | 992925 | 85 | 45-2453 | 601 | Pro-36 to Ser-52, | 17 | |
| | | | | | | Ala-63 to Pro-78, | | |
| | | | | | | Ala-106 to Lys-115, | | |
| | | | | | | Glu-134 to Glu-141, | | |
| | | | | | | Val-155 to Asp-164, | | |
| | | | | | | Phe-199 to Gly-204, | | |
| | | | | | | Arg-218 to Leu-228, | | |
| | | | | | | Glu-230 to Val-235, | | |
| | | | | | | Val-247 to Pro-253, | | |
| | | | | | | Arg-262 to Gly-276, | | |
| | | | | | | Thr-303 to Gln-310, | | |
| | | | | | | Arg-335 to Trp-342, | | |
| | | | | | | Glu-399 to Ala-415, | | |
| | | | | | | Ser-458 to Glu-466, | | |
| | | | | | | Arg-508 to Asp-517, | | |
| | | | | | | Glu-580 to Pro-585, | | |
| | | | | | | Gln-620 to Trp-628, | | |
| | | | | | | Lys-651 to Ala-657, | | |
| | | | | | | Gly-677 to Met-682, | | |
| | | | | | | Ala-712 to Leu-717, | | |
| | | | | | | Gly-724 to Thr-731, | | |
| | | | | | | Arg-770 to Gln-775. | | |
| | HDPWN93 | 887914 | 391 | 35-679 | 907 | Pro-36 to Ser-52, | | |
| | | | | | | Ala-63 to Pro-78, | | |
| | | | | | | Ala-106 to Lys-115, | | |
| | | | | | | Glu-134 to Glu-141, | | |
| | | | | | | Val-155 to Asp-164. | | |
| | HDPWN93 | 905983 | 392 | 27-158 | 908 | | | |
| 76 | HDPXY01 | 879048 | 86 | 23-319 | 602 | Pro-39 to Trp-44. | 17 | |
| | HDPXY01 | 904768 | 393 | 33-329 | 909 | Pro-39 to Trp-44. | | |
| | HDPXY01 | 895716 | 394 | 539-607 | 910 | | | |
| | HDPXY01 | 895715 | 395 | 1190-1267 | 911 | | | |
| 77 | HDTBD53 | 972757 | 87 | 288-1385 | 603 | Glu-91 to Arg-117, | | |
| | | | | | | Lys-124 to Ser-136, | | |
| | | | | | | Tyr-191 to Glu-200, | | |
| | | | | | | Glu-265 to Lys-272. | | |
| | HDTBD53 | 906342 | 396 | 292-1389 | 912 | Glu-91 to Arg-117, | | |
| | | | | | | Lys-124 to Ser-136. | | |
| 78 | HDTBV77 | 785879 | 88 | 326-2149 | 604 | Lys-5 to Lys-10, | | |
| | | | | | | Asn-33 to Lys-39, | | |
| | | | | | | Asp-48 to Lys-54, | | |
| | | | | | | Pro-62 to Asp-67, | | |
| | | | | | | Asn-116 to Arg-123, | | |
| | | | | | | His-157 to Ala-162, | | |
| | | | | | | Val-242 to Lys-249, | | |
| | | | | | | Val-251 to Asp-264. | | |
| 79 | HDTDQ23 | 1306984 | 89 | 132-302 | 605 | Arg-24 to Arg-31, | | |
| | | | | | | Ile-33 to Trp-41, | | |
| | | | | | | Met-43 to His-52. | | |
| | HDTDQ23 | 879009 | 397 | 148-471 | 913 | Arg-24 to Arg-31, | | |
| | | | | | | Ile-33 to Gly-41. | | |
| | HDTDQ23 | 751707 | 398 | 148-369 | 914 | Arg-24 to Arg-31. | | |
| 80 | HE2DE47 | 619852 | 90 | 808-2427 | 606 | Leu-9 to Tyr-15, | | |
| | | | | | | Asp-34 to Gln-46, | | |
| | | | | | | Pro-51 to Asp-57, | | |
| | | | | | | Gly-88 to Thr-104, | | |
| | | | | | | Thr-123 to Ser-128. | | |
| | HE2DE47 | 382025 | 399 | 515-757 | 915 | Leu-31 to Asn-38. | | |
| 81 | HE2EB74 | 513662 | 91 | 507-566 | 607 | | | |
| 82 | HE2NV57 | 740750 | 92 | 99-398 | 608 | Ala-84 to Gln-93. | | |
| 83 | HE2PH36 | 570903 | 93 | 28-228 | 609 | | | |
| 84 | HE8DS15 | 847060 | 94 | 91-309 | 610 | | | |
| 85 | HE9CP41 | 560625 | 95 | 132-257 | 611 | Ala-22 to Lys-36. | | |
| 86 | HE9DG49 | 1299935 | 96 | 70-675 | 612 | Ala-118 to Phe-124, | | |
| | | | | | | Arg-178 to Lys-201. | | |
| | HE9DG49 | 658678 | 400 | 70-672 | 916 | Ala-118 to Phe-124, | | |
| | | | | | | Arg-178 to Lys-201. | | |
| | HE9DG49 | 382000 | 401 | 78-686 | 917 | Ala-118 to Phe-124, | | |
| | | | | | | Thr-177 to Lys-203. | | |
| 87 | HE9HY07 | 420063 | 97 | 35-160 | 613 | Pro-35 to Phe-41. | | |
| 88 | HEBEJ18 | 701802 | 98 | 51-467 | 614 | Ser-39 to Asn-45, | | |
| | | | | | | Asn-103 to Ser-109. | | |
| 89 | HEEAQ11 | 777843 | 99 | 213-656 | 615 | Phe-31 to Asp-38, | | |
| | | | | | | Asn-59 to Tyr-65, | | |
| | | | | | | Ser-76 to Glu-82, | | |
| | | | | | | Thr-96 to Cys-108, | | |
| | | | | | | Gln-111 to Asn-118. | | |
| 90 | HEGAH43 | 532596 | 100 | 29-364 | 616 | Lys-35 to Glu-41, | | |
| | | | | | | Ala-62 to Asn-67. | | |
| 91 | HELHD85 | 847372 | 101 | 41-280 | 617 | Asn-36 to Gln-41, | | |
| | | | | | | Pro-49 to Ser-54, | | |
| | | | | | | Cys-65 to Ser-70. | | |
| 92 | HEOMQ63 | 603533 | 102 | 123-266 | 618 | | | |
| 93 | HEPAA46 | 596830 | 103 | 18-389 | 619 | Tyr-21 to Asp-40, | | |
| | | | | | | Ser-58 to Arg-64, | | |
| | | | | | | Thr-71 to Ser-76, | | |
| | | | | | | Ser-106 to Thr-112. | | |
| 94 | HEPAB80 | 1307790 | 104 | 73-438 | 620 | Met-1 to Pro-6, | | |
| | | | | | | Glu-58 to Cys-63, | | |
| | | | | | | Glu-65 to Gly-72, | | |
| | | | | | | Thr-74 to Asn-88, | | |
| | | | | | | Tyr-104 to Trp-109. | | |
| | HEPAB80 | 570048 | 402 | 67-435 | 918 | Met-1 to Pro-6, | | |
| | | | | | | Glu-58 to Cys-63, | | |
| | | | | | | Glu-65 to Gly-72, | | |
| | | | | | | Thr-74 to Val-87. | | |
| 95 | HFABG18 | 847073 | 105 | 53-316 | 621 | Glu-36 to Lys-55. | | |
| 96 | HFABH95 | 566712 | 106 | 199-549 | 622 | | | |
| 97 | HFAEF57 | 534142 | 107 | 232-492 | 623 | Leu-69 to Leu-74. | | |
| 98 | HFAMH77 | 543486 | 108 | 240-425 | 624 | Ser-33 to Ser-44. | | |
| 99 | HFCCQ50 | 579993 | 109 | 47-1105 | 625 | Ala-27 to Ser-38, | | |
| | | | | | | Pro-43 to Asn-54, | | |
| | | | | | | Thr-115 to Asp-121, | | |
| | | | | | | Leu-225 to Val-232, | | |
| | | | | | | Pro-247 to Gly-252, | | |
| | | | | | | Arg-306 to Leu-311. | | |
| 100 | HFCEB37 | 411345 | 110 | 487-519 | 626 | | | |
| 101 | HFFAD59 | 520369 | 111 | 44-181 | 627 | Lys-13 to Asn-19, | | |
| | | | | | | Asn-27 to Asn-35. | | |
| 102 | HFFAL36 | 560639 | 112 | 68-238 | 628 | | | |
| 103 | HFGAD82 | 513669 | 113 | 1019-1135 | 629 | | | |
| 104 | HFIUR10 | 532060 | 114 | 50-184 | 630 | Gln-31 to Pro-39. | | |
| 105 | HFTBM50 | 545012 | 115 | 158-262 | 631 | Ala-19 to Lys-34. | | |
| 106 | HFTDZ36 | 545726 | 116 | 547-753 | 632 | | | |
| 107 | HFVAB79 | 1300736 | 117 | 133-717 | 633 | Ser-21 to Trp-34, | | |
| | | | | | | Cys-68 to Gly-89, | | |
| | | | | | | Cys-122 to Phe-133, | | |
| | | | | | | Glu-188 to Leu-194. | | |
| | HFVAB79 | 565076 | 403 | 139-723 | 919 | Ser-21 to Trp-34, | | |
| | | | | | | Cys-68 to Gly-89, | | |
| | | | | | | Cys-122 to Phe-133. | | |
| 108 | HFVGE32 | 854545 | 118 | 154-393 | 634 | | 9 | |
| | HFVGE32 | 698580 | 404 | 1-201 | 920 | His-49 to Ser-55. | | |
| 109 | HFXBL33 | 778070 | 119 | 152-640 | 635 | | | |
| 110 | HFXDN63 | 553685 | 120 | 33-194 | 636 | Pro-21 to Ser-27. | | |
| 111 | HFXJX44 | 701988 | 121 | 98-241 | 637 | | | |
| 112 | HFXKJ03 | 505207 | 122 | 179-304 | 638 | Met-1 to Arg-8. | | |
| 113 | HFXKT05 | 658690 | 123 | 204-443 | 639 | Leu-16 to Ser-23, | | |
| | | | | | | Ser-38 to Pro-43, | | |
| | | | | | | Gly-53 to Leu-60. | | |
| 114 | HGBHI35 | 570262 | 124 | 87-965 | 640 | Pro-10 to Arg-15, | | |
| | | | | | | Leu-96 to Ser-103, | | |
| | | | | | | Gly-172 to Pro-178, | | |
| | | | | | | Gln-213 to Asp-218, | | |
| | | | | | | Asn-268 to Leu-275, | | |
| | | | | | | Arg-282 to Phe-289. | | |
| 115 | HGBIB74 | 837220 | 125 | 14-1144 | 641 | Ser-67 to Glu-74, | | |
| | | | | | | Arg-81 to Val-86, | | |
| | | | | | | Tyr-147 to Asp-160. | | |
| | HGBIB74 | 838602 | 405 | 28-540 | 921 | Ser-67 to Glu-74, | | |
| | | | | | | Arg-81 to Val-86, | | |
| | | | | | | Tyr-147 to Asp-160. | | |
| | HGBIB74 | 899864 | 406 | 2-454 | 922 | Ser-3 to Gln-10, | | |
| | | | | | | Val-14 to Gln-19, | | |
| | | | | | | Asp-32 to His-40, | | |
| | | | | | | Gly-50 to His-55, | | |
| | | | | | | Pro-76 to Ser-87. | | |
| 116 | HGLAF75 | 566838 | 126 | 231-596 | 642 | Ser-40 to Gly-45, | | |
| | | | | | | Leu-73 to Arg-80. | | |
| 117 | HGLAL82 | 520261 | 127 | 144-224 | 643 | | | |
| 118 | HHEMA59 | 823100 | 128 | 239-469 | 644 | | | |
| 119 | HHENV10 | 562772 | 129 | 143-295 | 645 | Asp-26 to Leu-36, | | |
| | | | | | | Leu-42 to Phe-50. | | |
| 120 | HHEPM33 | 877639 | 130 | 269-517 | 646 | Met-1 to Thr-13, | | |
| | | | | | | Ser-27 to Phe-34, | | |
| | | | | | | Arg-53 to Pro-59, | | |
| | | | | | | Ser-77 to Ser-82. | | |
| 121 | HHFBY53 | 821330 | 131 | 172-366 | 647 | Arg-22 to Asn-32. | | |
| 122 | HHFGR93 | 865581 | 132 | 132-1304 | 648 | Ser-61 to Trp-66, | | |
| | | | | | | Lys-76 to Asp-82, | | |
| | | | | | | Leu-116 to Tyr-124, | | |
| | | | | | | Gln-131 to His-140, | | |
| | | | | | | Gln-175 to Pro-181, | | |
| | | | | | | Trp-187 to Ser-193, | | |
| | | | | | | Arg-273 to Leu-278, | | |
| | | | | | | Glu-280 to Lys-286, | | |
| | | | | | | Pro-296 to Ile-304, | | |
| | | | | | | Arg-320 to Gly-329, | | |
| | | | | | | Pro-345 to Pro-357. | | |
| | HHFGR93 | 691402 | 407 | 130-840 | 923 | | | |
| 123 | HHGCG53 | 340818 | 133 | 230-361 | 649 | | 8 | |
| 124 | HHGCM76 | 662329 | 134 | 270-536 | 650 | | 17 | |
| | HHGCM76 | 383547 | 408 | 270-302 | 924 | | | |
| 125 | HHGDF16 | 579890 | 135 | 253-411 | 651 | | | |
| 126 | HHPDX20 | 610321 | 136 | 174-374 | 652 | Gly-43 to Gly-48. | | |
| 127 | HHPEN62 | 695134 | 137 | 183-1709 | 653 | Met-98 to Gln-107, | | |
| | | | | | | Gly-120 to Gly-126, | | |
| | | | | | | Pro-138 to Trp-145, | | |
| | | | | | | Leu-159 to Gly-169, | | |
| | | | | | | Val-211 to Arg-217, | | |
| | | | | | | Cys-256 to His-262, | | |
| | | | | | | Glu-320 to Val-327, | | |
| | | | | | | Phe-399 to Asn-406, | | |
| | | | | | | Asp-444 to Ser-450, | | |
| | | | | | | Asp-475 to Trp-488. | | |
| 128 | HHPGO40 | 1299927 | 138 | 116-1000 | 654 | | | |
| | HHPGO40 | 753270 | 409 | 68-973 | 925 | | | |
| | HHPGO40 | 560969 | 410 | 74-745 | 926 | | | |
| 129 | HHSDX28 | 553494 | 139 | 90-260 | 655 | | | |
| 130 | HILCF66 | 636025 | 140 | 331-465 | 656 | Gln-23 to Asn-28, | | |
| | | | | | | Gly-38 to Ile-43. | | |
| 131 | HJABB94 | 456466 | 141 | 74-307 | 657 | Ala-28 to His-41, | | |
| | | | | | | Pro-43 to Gln-64. | | |
| 132 | HJACG02 | 1307789 | 142 | 66-392 | 658 | Val-54 to Asp-59. | | |
| | HJACG02 | 509948 | 411 | 47-373 | 927 | Val-54 to Asp-59. | | |
| 133 | HJACG30 | 895505 | 143 | 291-425 | 659 | Thr-26 to Asn-39. | 15, X | |
| | HJACG30 | 821341 | 412 | 50-439 | 928 | Pro-57 to Pro-64. | | |
| | HJACG30 | 774300 | 413 | 350-715 | 929 | Lys-1 to Gly-8. | | |
| 134 | HJBCY35 | 719729 | 144 | 232-1215 | 660 | Glu-35 to His-41, | | |
| | | | | | | Ser-62 to Ala-67, | | |
| | | | | | | Pro-145 to Leu-155, | | |
| | | | | | | Glu-157 to Ser-163, | | |
| | | | | | | Arg-190 to Val-197, | | |
| | | | | | | Asp-208 to Pro-215, | | |
| | | | | | | Ser-247 to Pro-252. | | |
| 135 | HJMBI18 | 545492 | 145 | 574-816 | 661 | Thr-26 to Met-33. | | |
| 136 | HJMBM38 | 545752 | 146 | 387-725 | 662 | | | |
| 137 | HJPAD75 | 651337 | 147 | 60-335 | 663 | Pro-42 to Cys-50, | | |
| | | | | | | Leu-61 to Ala-66. | | |
| 138 | HJPCP42 | 1040297 | 148 | 156-827 | 664 | Asp-77 to Leu-82, | | |
| | | | | | | Gln-185 to Gln-192. | | |
| | HJPCP42 | 844091 | 414 | 134-805 | 930 | Asp-77 to Leu-82. | | |
| | HJPCP42 | 852573 | 415 | 468-494 | 931 | | | |
| | HJPCP42 | 824612 | 416 | 1-249 | 932 | Thr-21 to Thr-29, | | |
| | | | | | | Gln-51 to Arg-57. | | |
| 139 | HKABI84 | 565078 | 149 | 274-417 | 665 | Phe-25 to Ser-30. | | |
| 140 | HKABZ65 | 862030 | 150 | 77-808 | 666 | Ser-25 to Ala-31, | | |
| | | | | | | Gln-146 to Ser-151, | | |
| | | | | | | His-231 to Asn-236. | | |
| | HKABZ65 | 665424 | 417 | 69-800 | 933 | Ser-25 to Ala-31, | | |
| | | | | | | Gln-146 to Ser-151, | | |
| | | | | | | His-231 to Asn-236. | | |
| 141 | HKACB56 | 554616 | 151 | 27-269 | 667 | Tyr-39 to Lys-58. | | |
| 142 | HKACD58 | 1352202 | 152 | 38-940 | 668 | Thr-42 to Pro-53, | | |
| | | | | | | Val-78 to Glu-86, | | |
| | | | | | | Glu-103 to Met-112, | | |
| | | | | | | Ala-124 to Gly-131, | | |
| | | | | | | Trp-158 to Glu-168, | | |
| | | | | | | Gln-189 to Phe-210, | | |
| | | | | | | Ala-221 to Gly-226, | | |
| | | | | | | Arg-274 to Asp-284, | | |
| | | | | | | Ala-294 to Gly-299. | | |
| | HKACD58 | 552465 | 418 | 35-499 | 934 | Thr-42 to Pro-53, | | |
| | | | | | | Val-78 to Glu-86, | | |
| | | | | | | Glu-103 to Met-112, | | |
| | | | | | | Ala-124 to Gly-131. | | |
| 143 | HKACH44 | 545015 | 153 | 375-509 | 669 | Cys-25 to Trp-30. | | |
| 144 | HKAEV06 | 1352263 | 154 | 501-1814 | 670 | Thr-6 to Trp-13, | | |
| | | | | | | Thr-75 to Gln-80, | | |
| | | | | | | Thr-112 to Tyr-117, | | |
| | | | | | | Leu-133 to Pro-138, | | |
| | | | | | | Ala-146 to Phe-153, | | |
| | | | | | | Gln-319 to Ser-325, | | |
| | | | | | | Val-354 to His-372, | | |
| | | | | | | Pro-391 to Gly-396, | | |
| | | | | | | Val-405 to Thr-412, | | |
| | | | | | | Ile-425 to Asp-437. | | |
| | HKAEV06 | 638238 | 419 | 197-370 | 935 | Thr-6 to Trp-13. | | |
| 145 | HKAFT66 | 946512 | 155 | 508-831 | 671 | Ser-51 to Thr-57. | | |
| | HKAFT66 | 889258 | 420 | 508-831 | 936 | Ser-51 to Thr-57. | | |
| | HKAFT66 | 904790 | 421 | 234-347 | 937 | Gln-23 to Asp-28. | | |
| 146 | HKBIE57 | 876571 | 156 | 178-879 | 672 | Ser-7 to Pro-14, | | |
| | | | | | | Arg-47 to Arg-52, | | |
| | | | | | | His-117 to Val-123, | | |
| | | | | | | Glu-142 to Thr-149, | | |
| | | | | | | Leu-162 to Ala-167, | | |
| | | | | | | Gly-172 to Asn-177, | | |
| | | | | | | Thr-226 to Ala-232. | | |
| | HKBIE57 | 654871 | 422 | 30-170 | 938 | Met-1 to Tyr-6, | | |
| | | | | | | Thr-38 to Ala-44. | | |
| 147 | HKFBC53 | 1352286 | 157 | 64-1473 | 673 | Arg-52 to Ala-58, | | |
| | | | | | | Thr-121 to Lys-126, | | |
| | | | | | | Gly-156 to Gln-164, | | |
| | | | | | | Gly-201 to Glu-215, | | |
| | | | | | | Thr-432 to Gly-450, | | |
| | | | | | | Glu-461 to Gly-466. | | |
| | HKFBC53 | 701893 | 423 | 41-1369 | 939 | Ala-28 to Ala-33, | | |
| | | | | | | Arg-38 to Leu-48, | | |
| | | | | | | Thr-120 to Lys-125, | | |
| | | | | | | Gly-155 to Gln-163, | | |
| | | | | | | Gly-200 to Glu-214. | | |
| | HKFBC53 | 513190 | 424 | 3-929 | 940 | Ala-1 to Gly-6, | | |
| | | | | | | Ala-10 to Tyr-18. | | |
| | HKFBC53 | 383426 | 425 | 3-731 | 941 | Ala-1 to Gly-6, | | |
| | | | | | | Ala-10 to Tyr-18. | | |
| 148 | HKGDL36 | 877489 | 158 | 53-835 | 674 | Pro-36 to Gly-42, | | |
| | | | | | | Gly-54 to Arg-65, | | |
| | | | | | | Ala-85 to Ala-91, | | |
| | | | | | | Ala-95 to Gln-102, | | |
| | | | | | | Ala-115 to Pro-121, | | |
| | | | | | | Pro-166 to Asp-191, | | |
| | | | | | | Lys-243 to Ala-249. | | |
| | HKGDL36 | 704088 | 426 | 55-501 | 942 | Pro-36 to Gly-42, | | |
| | | | | | | Pro-64 to Ala-76, | | |
| | | | | | | Gly-83 to Ala-90, | | |
| | | | | | | Ser-100 to Cys-108, | | |
| | | | | | | Thr-126 to Ser-135. | | |
| 149 | HKISB57 | 625956 | 159 | 130-417 | 675 | Ala-23 to Arg-36, | | |
| | | | | | | His-38 to Ala-46, | | |
| | | | | | | Pro-50 to Gly-56, | | |
| | | | | | | Arg-85 to Val-94. | | |
| 150 | HKMLM11 | 514788 | 160 | 82-474 | 676 | Ala-59 to Thr-68, | | |
| | | | | | | Glu-72 to Ser-108, | | |
| | | | | | | Glu-115 to Lys-126. | | |
| 151 | HKMLP68 | 1037919 | 161 | 130-372 | 677 | Gln-27 to Trp-33, | | |
| | | | | | | Gly-53 to Trp-61. | | |
| | HKMLP68 | 880047 | 427 | 153-395 | 943 | Gln-27 to Trp-33, | | |
| | | | | | | Gly-53 to Trp-61. | | |
| | HKMLP68 | 583524 | 428 | 471-611 | 944 | Lys-17 to Ser-47. | | |
| 152 | HKMMD13 | 604751 | 162 | 342-491 | 678 | | | |
| 153 | HKMMW74 | 581399 | 163 | 202-327 | 679 | | | |
| 154 | HKMND01 | 527402 | 164 | 23-175 | 680 | | | |
| 155 | HLDBE54 | 836041 | 165 | 155-1108 | 681 | Glu-39 to Gly-45, | | |
| | | | | | | Thr-51 to Gly-60, | | |
| | | | | | | Ala-63 to Gln-77, | | |
| | | | | | | Gly-122 to Asn-129, | | |
| | | | | | | Leu-175 to Ser-181, | | |
| | | | | | | Thr-193 to Pro-199, | | |
| | | | | | | Thr-236 to Gly-241, | | |
| | | | | | | Asn-256 to Lys-279, | | |
| | | | | | | Glu-311 to Leu-317. | | |
| | HLDBE54 | 600362 | 429 | 130-399 | 945 | Glu-39 to Gly-45, | | |
| | | | | | | Thr-51 to Gly-60, | | |
| | | | | | | Ala-63 to Gln-82. | | |
| | HLDBE54 | 800678 | 430 | 133-1590 | 946 | Thr-36 to Arg-41, | | |
| | | | | | | Pro-55 to Pro-60, | | |
| | | | | | | Pro-67 to Leu-72, | | |
| | | | | | | Asn-111 to Ser-118, | | |
| | | | | | | Cys-138 to Asp-144, | | |
| | | | | | | Asn-290 to Pro-296, | | |
| | | | | | | Gly-350 to Phe-358, | | |
| | | | | | | Gly-379 to Glu-384, | | |
| | | | | | | Gln-399 to Cys-426, | | |
| | | | | | | Ser-428 to Ser-438. | | |
| 156 | HLDBX13 | 815665 | 166 | 303-470 | 682 | | | |
| 157 | HLDON23 | 636083 | 167 | 368-709 | 683 | Arg-28 to Gln-36. | | |
| 158 | HLDQC46 | 847397 | 168 | 163-426 | 684 | Lys-76 to Asp-87. | | |
| 159 | HLDQR62 | 753742 | 169 | 520-1005 | 685 | Arg-122 to Ser-139, | | |
| | | | | | | Met-144 to Glu-149. | | |
| 160 | HLDQU79 | 740755 | 170 | 99-1142 | 686 | Leu-68 to Lys-74, | | |
| | | | | | | Tyr-109 to Lys-115, | | |
| | | | | | | Gln-200 to Val-205, | | |
| | | | | | | Lys-207 to Lys-214, | | |
| | | | | | | Glu-237 to Ile-244, | | |
| | | | | | | Ala-271 to Thr-279, | | |
| | | | | | | Ser-317 to Ser-329, | | |
| | | | | | | Gln-342 to Gly-348. | | |
| 161 | HLDRM43 | 846330 | 171 | 24-479 | 687 | Trp-35 to Trp-45, | | |
| | | | | | | Pro-52 to Asp-57, | | |
| | | | | | | Thr-73 to Arg-82, | | |
| | | | | | | Pro-105 to Leu-112, | | |
| | | | | | | Pro-115 to Arg-127, | | |
| | | | | | | Pro-140 to Gln-151. | | |
| | HLDRM43 | 638939 | 431 | 164-619 | 947 | Trp-35 to Trp-45, | | |
| | | | | | | Pro-52 to Asp-57, | | |
| | | | | | | Thr-73 to Arg-82, | | |
| | | | | | | Pro-105 to Leu-112, | | |
| | | | | | | Pro-115 to Arg-127, | | |
| | | | | | | Pro-140 to Gln-151. | | |
| 162 | HLDRP33 | 647430 | 172 | 215-340 | 688 | Ser-31 to Gln-41. | | |
| 163 | HLHAL68 | 684216 | 173 | 30-164 | 689 | Leu-32 to His-38. | | |
| 164 | HLHFP03 | 460467 | 174 | 224-574 | 690 | Tyr-28 to Phe-34, | | |
| | | | | | | Thr-54 to Val-60, | | |
| | | | | | | Tyr-73 to Thr-82. | | |
| 165 | HLIBD68 | 778073 | 175 | 186-338 | 691 | Met-37 to Ser-43. | | |
| 166 | HLICQ90 | 791828 | 176 | 249-869 | 692 | Pro-55 to Gly-66, | | |
| | | | | | | Phe-92 to Leu-103. | | |
| 167 | HLMBO76 | 626831 | 177 | 43-366 | 693 | | | |
| 168 | HLTEJ06 | 543017 | 178 | 197-364 | 694 | Gln-25 to Phe-43. | | |
| 169 | HLTHR66 | 699812 | 179 | 5-232 | 695 | | | |
| 170 | HLTIP94 | 1087335 | 180 | 226-516 | 696 | Gly-4 to Glu-9, | 17 | |
| | | | | | | Asp-22 to Cys-28, | | |
| | | | | | | Glu-39 to Leu-44, | | |
| | | | | | | Phe-88 to Phe-94. | | |
| | HLTIP94 | 1035443 | 432 | 226-423 | 948 | Gly-4 to Glu-9. | | |
| | HLTIP94 | 1047690 | 433 | 3-899 | 949 | Gly-1 to Glu-8, | | |
| | | | | | | Gly-37 to Gly-61, | | |
| | | | | | | Gln-71 to Phe-81, | | |
| | | | | | | Asp-95 to Gly-103, | | |
| | | | | | | Leu-126 to Ile-131, | | |
| | | | | | | Val-166 to Glu-171. | | |
| 171 | HLWAA17 | 629552 | 181 | 436-996 | 697 | Lys-17 to Glu-27, | | |
| | | | | | | Gln-40 to Gly-47. | | |
| 172 | HLWAA88 | 588485 | 182 | 35-376 | 698 | Ala-43 to Trp-57, | | |
| | | | | | | Ser-81 to Ser-97, | | |
| | | | | | | Pro-102 to Cys-113. | | |
| | HLWAA88 | 769166 | 434 | 51-1514 | 950 | Ala-43 to Trp-57, | | |
| | | | | | | Ser-81 to Gly-88, | | |
| | | | | | | Tyr-125 to Asp-134, | | |
| | | | | | | Pro-141 to Gly-154, | | |
| | | | | | | Val-172 to Glu-178, | | |
| | | | | | | Lys-296 to Gly-305, | | |
| | | | | | | Leu-307 to Arg-314, | | |
| | | | | | | Thr-335 to His-341. | | |
| 173 | HLWAD77 | 653513 | 183 | 326-748 | 699 | | | |
| 174 | HLWAE11 | 783071 | 184 | 28-861 | 700 | Asp-55 to Asp-67, | 22q13.1 | 103050, 103050, |
| | | | | | | Ser-76 to His-81, | | 124030, 124030, |
| | | | | | | Lys-96 to Gly-103, | | 138981, 182380, |
| | | | | | | Met-111 to Gly-133, | | 188826, 190040, |
| | | | | | | Gln-222 to Ile-228, | | 190040, 190040, |
| | | | | | | Lys-250 to Tyr-258. | | 218040, 602049, |
| | | | | | | | | 603590 |
| 175 | HLWAO22 | 587270 | 185 | 212-1276 | 701 | Cys-126 to Thr-138, | | |
| | | | | | | Glu-165 to Gly-172, | | |
| | | | | | | Thr-189 to Leu-200, | | |
| | | | | | | Gly-222 to Gly-229, | | |
| | | | | | | Pro-346 to Lys-354. | | |
| 176 | HLWBH18 | 1045194 | 186 | 107-289 | 702 | Arg-18 to Trp-33, | | |
| | | | | | | Pro-36 to Ser-47. | | |
| | HLWBH18 | 889277 | 435 | 67-249 | 951 | Arg-18 to Trp-33, | | |
| | | | | | | Pro-36 to Ser-47. | | |
| 177 | HLWBY76 | 797609 | 187 | 432-1130 | 703 | | | |
| 178 | HLYAC95 | 778075 | 188 | 92-232 | 704 | | | |
| 179 | HMADK33 | 561941 | 189 | 161-619 | 705 | Gly-43 to Gly-55. | | |
| 180 | HMADS41 | 596831 | 190 | 267-533 | 706 | | | |
| 181 | HMAMI15 | 1352406 | 191 | 4-1023 | 707 | Gly-33 to Lys-41, | | |
| | | | | | | Pro-52 to Lys-60, | | |
| | | | | | | Asn-81 to Ala-86, | | |
| | | | | | | Lys-156 to Met-164, | | |
| | | | | | | Gln-283 to Lys-292, | | |
| | | | | | | Glu-303 to Gly-308. | | |
| | HMAMI15 | 1049263 | 436 | 3-923 | 952 | Gly-33 to Lys-41, | | |
| | | | | | | Pro-52 to Lys-60, | | |
| | | | | | | Asn-81 to Ala-86. | | |
| 182 | HMCFY13 | 635301 | 192 | 175-369 | 708 | | | |
| 183 | HMDAB56 | 560676 | 193 | 273-407 | 709 | | | |
| 184 | HMDAM24 | 514394 | 194 | 109-171 | 710 | | | |
| 185 | HMEAI48 | 1352290 | 195 | 36-299 | 711 | Arg-48 to Lys-55, | | |
| | | | | | | Gly-61 to Glu-70. | | |
| | HMEAI48 | 709671 | 437 | 95-217 | 953 | Gln-34 to Lys-40. | | |
| 186 | HMEED18 | 560775 | 196 | 34-699 | 712 | Gln-85 to Lys-91, | | |
| | | | | | | Pro-106 to Ser-117, | | |
| | | | | | | Pro-124 to Ala-130, | | |
| | | | | | | Trp-154 to Trp-160. | | |
| 187 | HMEFT54 | 520307 | 197 | 332-451 | 713 | | | |
| 188 | HMEGF92 | 520304 | 198 | 92-280 | 714 | Ser-34 to Ser-39. | | |
| 189 | HMSDL37 | 973996 | 199 | 531-725 | 715 | Ser-31 to Lys-45, | 3, 3p | |
| | | | | | | Pro-47 to Pro-53, | | |
| | | | | | | Ser-58 to Arg-63. | | |
| | HMSDL37 | 895429 | 438 | 528-722 | 954 | Ser-31 to Lys-45, | | |
| | | | | | | Pro-47 to Pro-53, | | |
| | | | | | | Ser-58 to Arg-63. | | |
| | HMSDL37 | 904241 | 439 | 565-645 | 955 | | | |
| | HMSDL37 | 750927 | 440 | 2-151 | 956 | | | |
| 190 | HMSFI26 | 560229 | 200 | 120-308 | 716 | | | |
| 191 | HMSGT42 | 383470 | 201 | 40-315 | 717 | Pro-65 to Cys-71. | | |
| 192 | HMSHM14 | 461897 | 202 | 103-240 | 718 | Met-1 to Ser-6, | | |
| | | | | | | Pro-29 to Ser-34. | | |
| 193 | HMSHS36 | 1127691 | 203 | 134-445 | 719 | Thr-28 to Arg-49, | | |
| | | | | | | Ser-57 to Arg-64, | | |
| | | | | | | Pro-72 to His-78. | | |
| | HMSHS36 | 1028961 | 441 | 162-473 | 957 | Thr-28 to Arg-49, | | |
| | | | | | | Ser-57 to Arg-64. | | |
| 194 | HMSKC04 | 799540 | 204 | 133-354 | 720 | Thr-27 to Arg-33, | | |
| | | | | | | Gly-37 to Ser-42, | | |
| | | | | | | Pro-52 to Arg-72. | | |
| 195 | HMUAP70 | 872208 | 205 | 183-845 | 721 | Cys-15 to Gly-36. | | |
| | HMUAP70 | 723302 | 442 | 413-724 | 958 | Lys-83 to Thr-90. | | |
| | HMUAP70 | 778820 | 443 | 251-844 | 959 | | | |
| | HMUAP70 | 674913 | 444 | 62-379 | 960 | | | |
| | HMUAP70 | 646810 | 445 | 60-263 | 961 | | | |
| | HMUAP70 | 381964 | 446 | 60-128 | 962 | | | |
| 196 | HMVBS81 | 639203 | 206 | 34-453 | 722 | | | |
| 197 | HMWDC28 | 460487 | 207 | 124-252 | 723 | | | |
| 198 | HMWFT65 | 562063 | 208 | 72-437 | 724 | | | |
| 199 | HMWGY65 | 1308287 | 209 | 42-1514 | 725 | Pro-18 to Gly-30, | | |
| | | | | | | Arg-98 to Cys-103, | | |
| | | | | | | Glu-106 to Arg-111, | | |
| | | | | | | Ser-117 to Gly-122, | | |
| | | | | | | Glu-132 to Ala-140, | | |
| | | | | | | Pro-247 to Arg-252, | | |
| | | | | | | Val-301 to Ala-308, | | |
| | | | | | | Pro-334 to Ser-339, | | |
| | | | | | | Arg-348 to Thr-354, | | |
| | | | | | | Glu-427 to Gly-439, | | |
| | | | | | | Gly-442 to Glu-448, | | |
| | | | | | | Ala-457 to Gly-463. | | |
| | HMWGY65 | 794987 | 447 | 42-608 | 963 | Pro-18 to Gly-30. | | |
| 200 | HNEAC05 | 519340 | 210 | 101-418 | 726 | Met-1 to Gly-8, | | |
| | | | | | | Thr-33 to Cys-38, | | |
| | | | | | | Arg-79 to Arg-89. | | |
| 201 | HNEEB45 | 1036397 | 211 | 139-312 | 727 | Thr-43 to Arg-51. | | |
| | HNEEB45 | 842650 | 448 | 226-399 | 964 | | | |
| 202 | HNEEE24 | 553558 | 212 | 213-428 | 728 | | | |
| 203 | HNFFC43 | 753337 | 213 | 488-691 | 729 | Asp-21 to Ser-29. | | |
| 204 | HNFIY77 | 634551 | 214 | 228-929 | 730 | Pro-47 to Met-53, | | |
| | | | | | | Ser-130 to Ser-138. | | |
| 205 | HNFJF07 | 577013 | 215 | 86-286 | 731 | Val-25 to Gly-33. | | |
| 206 | HNGAK47 | 561488 | 216 | 89-211 | 732 | | | |
| 207 | HNGBC07 | 1037631 | 217 | 81-830 | 733 | Glu-30 to Arg-44, | 22 | |
| | | | | | | Asp-58 to Cys-67, | | |
| | | | | | | Pro-70 to Pro-75. | | |
| | HNGBC07 | 904311 | 449 | 122-256 | 965 | Gly-27 to Ser-42. | | |
| | HNGBC07 | 904812 | 450 | 55-189 | 966 | Gly-27 to Ser-42. | | |
| 208 | HNGDG40 | 532617 | 218 | 13-393 | 734 | Gln-2 to Gly-10, | | |
| | | | | | | Asp-77 to Phe-82. | | |
| 209 | HNGEP09 | 499076 | 219 | 72-320 | 735 | Asp-45 to Thr-50. | | |
| 210 | HNGFR31 | 553552 | 220 | 108-380 | 736 | | | |
| 211 | HNGIJ31 | 519120 | 221 | 135-245 | 737 | Pro-18 to Glu-25. | | |
| 212 | HNGJE50 | 561568 | 222 | 77-217 | 738 | | | |
| 213 | HNGJT54 | 498272 | 223 | 172-276 | 739 | | | |
| 214 | HNGND37 | 839224 | 224 | 388-636 | 740 | Asn-46 to Ser-54. | | |
| 215 | HNGOI12 | 1041375 | 225 | 27-200 | 741 | Met-1 to Gly-9. | 11 | |
| | HNGOI12 | 838184 | 451 | 27-200 | 967 | Met-1 to Gly-9. | | |
| | HNGOI12 | 839283 | 452 | 596-877 | 968 | | | |
| 216 | HNGOM56 | 836064 | 226 | 391-558 | 742 | Pro-25 to Glu-40, | | |
| | | | | | | Lys-50 to His-55. | | |
| 217 | HNGOU56 | 843515 | 227 | 317-496 | 743 | Ser-34 to Thr-40. | | |
| 218 | HNGOW62 | 892160 | 228 | 167-331 | 744 | Ser-22 to His-40. | | |
| 219 | HNHEU93 | 634851 | 229 | 57-302 | 745 | | | |
| 220 | HNHFM14 | 664507 | 230 | 38-280 | 746 | Glu-67 to Ala-74. | 1 | |
| 221 | HNHFO29 | 463568 | 231 | 160-699 | 747 | Lys-97 to Gln-106, | | |
| | | | | | | Gln-112 to Pro-118, | | |
| | | | | | | Pro-123 to Lys-130, | | |
| | | | | | | Arg-153 to Gly-158. | | |
| 222 | HNHNB29 | 895462 | 232 | 40-201 | 748 | Glu-17 to Lys-30, | | |
| | | | | | | Val-43 to Asn-53. | | |
| 223 | HNHOD46 | 843488 | 233 | 12-251 | 749 | | | |
| 224 | HNHOG73 | 835026 | 234 | 342-497 | 750 | Ala-35 to Leu-43. | | |
| 225 | HNTBI26 | 1310821 | 235 | 28-990 | 751 | Pro-56 to Pro-63, | | |
| | | | | | | Met-92 to Thr-98, | | |
| | | | | | | Ser-112 to Pro-120, | | |
| | | | | | | Pro-162 to Glu-173, | | |
| | | | | | | Ala-200 to Ser-210, | | |
| | | | | | | Lys-311 to Asn-320. | | |
| | HNTBI26 | 796807 | 453 | 32-547 | 969 | Pro-56 to Pro-63, | | |
| | | | | | | Met-92 to Thr-98, | | |
| | | | | | | Ser-112 to Pro-120, | | |
| | | | | | | Pro-162 to Ser-169. | | |
| | HNTBI26 | 590738 | 454 | 16-411 | 970 | Pro-56 to Pro-63, | | |
| | | | | | | Met-92 to Thr-98, | | |
| | | | | | | Arg-107 to Pro-120. | | |
| 226 | HNTBL27 | 545534 | 236 | 100-447 | 752 | Arg-45 to Thr-52, | | |
| | | | | | | Tyr-60 to Gly-66, | | |
| | | | | | | Ala-87 to Trp-92, | | |
| | | | | | | Leu-105 to Ser-115. | | |
| 227 | HNTCE26 | 1160395 | 237 | 111-1316 | 753 | Tyr-2 to Gly-15, | | |
| | | | | | | Trp-192 to Asp-199, | | |
| | | | | | | Lys-248 to Leu-253, | | |
| | | | | | | Arg-330 to Lys-336, | | |
| | | | | | | Gln-354 to Val-364, | | |
| | | | | | | Val-383 to Ser-392. | | |
| | HNTCE26 | 853373 | 455 | 57-422 | 971 | Arg-75 to Lys-81, | | |
| | | | | | | Gln-99 to Asp-109. | | |
| 228 | HNTNI01 | 1352285 | 238 | 307-534 | 754 | Lys-71 to Trp-76. | | |
| | HNTNI01 | 699848 | 456 | 306-455 | 972 | | | |
| 229 | HODDF13 | 684307 | 239 | 46-171 | 755 | Thr-28 to Ser-40. | | |
| 230 | HODDN92 | 422913 | 240 | 434-541 | 756 | | | |
| 231 | HODFN71 | 1194866 | 241 | 1-477 | 757 | Lys-50 to Phe-57, | | |
| | | | | | | Ser-70 to Arg-77, | | |
| | | | | | | Tyr-81 to Ser-87, | | |
| | | | | | | Pro-112 to Thr-117. | | |
| | HODFN71 | 834999 | 457 | 27-473 | 973 | Lys-39 to Phe-46, | | |
| | | | | | | Ser-59 to Arg-66, | | |
| | | | | | | Tyr-70 to Ser-76, | | |
| | | | | | | Pro-101 to Thr-106. | | |
| 232 | HODGE68 | 834907 | 242 | 87-266 | 758 | Leu-2 to Gln-7. | | |
| 233 | HOEDB32 | 634994 | 243 | 104-784 | 759 | Pro-34 to Ser-43, | | |
| | | | | | | Glu-54 to Ser-60. | | |
| 234 | HOFMQ33 | 1184465 | 244 | 49-1503 | 760 | Leu-37 to Gly-44, | | |
| | | | | | | Thr-137 to Leu-144, | | |
| | | | | | | Ala-178 to Asn-184, | | |
| | | | | | | Asp-194 to Val-201, | | |
| | | | | | | Leu-252 to Glu-258, | | |
| | | | | | | Asp-280 to Tyr-293, | | |
| | | | | | | Asn-296 to Thr-301, | | |
| | | | | | | Asp-322 to Asp-348, | | |
| | | | | | | Asn-363 to Ser-368, | | |
| | | | | | | His-370 to Thr-378, | | |
| | | | | | | Asn-380 to Cys-386, | | |
| | | | | | | Glu-391 to Cys-399, | | |
| | | | | | | Leu-421 to Arg-426, | | |
| | | | | | | Glu-454 to Tyr-459. | | |
| | HOFMQ33 | 919896 | 458 | 48-1502 | 974 | Leu-37 to Gly-44, | | |
| | | | | | | Pro-46 to Gly-51, | | |
| | | | | | | Thr-137 to Leu-144, | | |
| | | | | | | Ala-178 to Asn-184, | | |
| | | | | | | Asp-194 to Val-201, | | |
| | | | | | | Leu-252 to Glu-258, | | |
| | | | | | | Asp-280 to Tyr-293, | | |
| | | | | | | Asn-296 to Thr-301, | | |
| | | | | | | Asp-322 to Asp-348, | | |
| | | | | | | Asn-363 to Ser-368, | | |
| | | | | | | His-370 to Thr-378, | | |
| | | | | | | Asn-380 to Cys-386, | | |
| | | | | | | Glu-391 to Cys-399, | | |
| | | | | | | Leu-421 to Arg-426, | | |
| | | | | | | Glu-454 to Tyr-459. | | |
| | HOFMQ33 | 906694 | 459 | 78-875 | 975 | Leu-37 to Gly-43. | | |
| | HOFMQ33 | 902639 | 460 | 724-741 | 976 | | | |
| | HOFMQ33 | 702186 | 461 | 123-374 | 977 | Met-2 to Ser-9. | | |
| 235 | HOFMT75 | 911180 | 245 | 83-1315 | 761 | Thr-30 to Met-36, | | |
| | | | | | | His-121 to Thr-136, | | |
| | | | | | | Leu-231 to Gly-236, | | |
| | | | | | | Thr-248 to Pro-256, | | |
| | | | | | | Gly-342 to Thr-353. | | |
| | HOFMT75 | 905365 | 462 | 83-427 | 978 | Thr-30 to Met-36. | | |
| | HOFMT75 | 892308 | 463 | 1225-1500 | 979 | | | |
| | HOFMT75 | 892291 | 464 | 129-1232 | 980 | Thr-30 to Met-36, | | |
| | | | | | | Pro-51 to Ser-56, | | |
| | | | | | | His-121 to Thr-136, | | |
| | | | | | | Leu-233 to Gly-243, | | |
| | | | | | | Thr-250 to Ser-258, | | |
| | | | | | | Thr-265 to Trp-270. | | |
| 236 | HOFNY91 | 847425 | 246 | 64-312 | 762 | Ser-15 to Thr-31. | | |
| 237 | HOFOC73 | 931871 | 247 | 18-407 | 763 | Pro-22 to Cys-30, | | |
| | | | | | | Gly-43 to Tyr-53, | | |
| | | | | | | Ser-55 to Trp-65, | | |
| | | | | | | Ala-76 to His-81, | | |
| | | | | | | Pro-101 to Gly-108, | | |
| | | | | | | Pro-121 to Gly-127. | | |
| | HOFOC73 | 907073 | 465 | 23-226 | 981 | Thr-47 to Pro-55. | | |
| | HOFOC73 | 907072 | 466 | 127-171 | 982 | Pro-1 to Val-7. | | |
| | HOFOC73 | 878863 | 467 | 142-162 | 983 | | | |
| 238 | HOGAW62 | 579891 | 248 | 259-426 | 764 | Met-1 to Gly-6, | | |
| | | | | | | Trp-23 to Arg-29, | | |
| | | | | | | Ala-38 to Ser-45. | | |
| 239 | HOHCH55 | 827481 | 249 | 221-1702 | 765 | Met-1 to Phe-6, | | |
| | | | | | | Arg-44 to Arg-52, | | |
| | | | | | | His-64 to Cys-69, | | |
| | | | | | | Tyr-99 to Gln-147, | | |
| | | | | | | His-158 to Gly-169, | | |
| | | | | | | Phe-177 to Asp-182, | | |
| | | | | | | Cys-194 to Cys-202, | | |
| | | | | | | Gly-213 to Phe-218, | | |
| | | | | | | Pro-224 to Gly-236, | | |
| | | | | | | Asp-254 to Trp-261, | | |
| | | | | | | Asp-263 to Ala-303, | | |
| | | | | | | Trp-305 to Cys-316, | | |
| | | | | | | Lys-326 to Asp-332, | | |
| | | | | | | Pro-334 to Cys-343, | | |
| | | | | | | Pro-350 to Asp-370, | | |
| | | | | | | Thr-407 to Asn-413, | | |
| | | | | | | Gly-425 to Cys-431, | | |
| | | | | | | Asp-449 to Asp-459, | | |
| | | | | | | Gly-472 to Asn-483. | | |
| | HOHCH55 | 815682 | 468 | 230-1636 | 984 | Met-1 to Phe-6, | | |
| | | | | | | Arg-44 to Arg-52, | | |
| | | | | | | His-64 to Cys-69, | | |
| | | | | | | Tyr-99 to Gln-147, | | |
| | | | | | | His-158 to Gly-169, | | |
| | | | | | | Phe-177 to Asp-182, | | |
| | | | | | | Cys-194 to Cys-202, | | |
| | | | | | | Gly-213 to Phe-218, | | |
| | | | | | | Pro-224 to Gly-236, | | |
| | | | | | | Asp-254 to Trp-261, | | |
| | | | | | | Asp-263 to Ala-303, | | |
| | | | | | | Trp-305 to Cys-316, | | |
| | | | | | | Lys-326 to Asp-332, | | |
| | | | | | | Pro-334 to Cys-343, | | |
| | | | | | | Pro-350 to Asp-370, | | |
| | | | | | | Thr-407 to Asn-413, | | |
| | | | | | | Gly-425 to Cys-431, | | |
| | | | | | | Asp-449 to Gly-460. | | |
| 240 | HOQBJ82 | 1352356 | 250 | 361-852 | 766 | Ser-30 to Met-36, | | |
| | | | | | | Ile-38 to Pro-46, | | |
| | | | | | | Gln-78 to Gly-88, | | |
| | | | | | | Thr-98 to Pro-105, | | |
| | | | | | | Gly-110 to Ser-122, | | |
| | | | | | | Ser-136 to Trp-144. | | |
| | HOQBJ82 | 858338 | 469 | 102-584 | 985 | Ser-30 to Met-36, | | |
| | | | | | | Ile-38 to Pro-46, | | |
| | | | | | | Gln-78 to Gly-88, | | |
| | | | | | | Thr-98 to Pro-105, | | |
| | | | | | | Gly-110 to Ser-122. | | |
| | HOQBJ82 | 857453 | 470 | 55-1029 | 986 | | | |
| 241 | HOSBY40 | 589431 | 251 | 89-259 | 767 | | | |
| 242 | HOSDJ25 | 854234 | 252 | 1076-1195 | 768 | Gly-18 to Lys-23, | | |
| | | | | | | Pro-31 to Gly-38. | | |
| | HOSDJ25 | 566845 | 471 | 146-268 | 987 | Gly-18 to Lys-23, | | |
| | | | | | | Pro-31 to Gly-38. | | |
| 243 | HOSFD58 | 614040 | 253 | 56-1927 | 769 | Asn-15 to Trp-20, | | |
| | | | | | | Ser-36 to Gly-41, | | |
| | | | | | | Pro-103 to Val-110, | | |
| | | | | | | Pro-134 to Arg-143, | | |
| | | | | | | Leu-173 to Arg-178, | | |
| | | | | | | Ser-190 to Ala-197, | | |
| | | | | | | His-314 to Arg-319, | | |
| | | | | | | Arg-354 to Asn-362, | | |
| | | | | | | Asp-391 to Arg-397, | | |
| | | | | | | Glu-402 to Asp-409, | | |
| | | | | | | Asp-434 to Leu-439, | | |
| | | | | | | Glu-441 to Arg-446, | | |
| | | | | | | Gly-455 to Asp-462, | | |
| | | | | | | Pro-528 to His-541, | | |
| | | | | | | Asn-566 to Arg-571, | | |
| | | | | | | Tyr-574 to Glu-581, | | |
| | | | | | | Thr-589 to Glu-603. | | |
| | HOSFD58 | 383513 | 472 | 477-659 | 988 | Gly-28 to Leu-42, | | |
| | | | | | | Met-52 to Leu-58. | | |
| 244 | HPDDC77 | 1306899 | 254 | 51-446 | 770 | Arg-29 to Pro-37, | | |
| | | | | | | Gln-46 to Val-56. | | |
| | HPDDC77 | 422936 | 473 | 510-905 | 989 | Arg-29 to Pro-37, | | |
| | | | | | | Gln-46 to Val-56. | | |
| 245 | HPEAD79 | 520202 | 255 | 51-176 | 771 | Lys-16 to Ser-21, | | |
| | | | | | | Gly-36 to Asp-41. | | |
| 246 | HPFCL43 | 535710 | 256 | 21-260 | 772 | Pro-14 to Asp-25, | | |
| | | | | | | Leu-51 to Val-63. | | |
| 247 | HPIBO15 | 1310868 | 257 | 128-763 | 773 | Asp-40 to Glu-50, | | |
| | | | | | | Ser-59 to Gly-69, | | |
| | | | | | | Leu-109 to Lys-117, | | |
| | | | | | | Tyr-130 to Leu-137, | | |
| | | | | | | Leu-140 to Glu-160, | | |
| | | | | | | Gly-202 to Tyr-208. | | |
| | HPIBO15 | 590741 | 474 | 127-648 | 990 | Asp-40 to Glu-50, | | |
| | | | | | | Ser-59 to Gly-69, | | |
| | | | | | | Ala-98 to His-105, | | |
| | | | | | | Arg-108 to Glu-114, | | |
| | | | | | | Pro-124 to Ser-138, | | |
| | | | | | | Ala-143 to Gly-154. | | |
| 248 | HPICB53 | 1042309 | 258 | 170-325 | 774 | | 11, 12 | |
| | HPICB53 | 867835 | 475 | 163-318 | 991 | | | |
| 249 | HPJBI33 | 685699 | 259 | 236-397 | 775 | Arg-30 to Gln-36. | | |
| 250 | HPJBK12 | 1011467 | 260 | 126-272 | 776 | | 4, 8 | |
| | HPJBK12 | 525375 | 476 | 119-265 | 992 | | | |
| | HPJBK12 | 796925 | 477 | 969-1001 | 993 | | | |
| | HPJBK12 | 699587 | 478 | 509-523 | 994 | | | |
| 251 | HPMDK28 | 846357 | 261 | 64-669 | 777 | Ala-55 to Asn-60, | | |
| | | | | | | Lys-65 to Met-71, | | |
| | | | | | | Leu-75 to Asn-86, | | |
| | | | | | | Asp-93 to Asp-110, | | |
| | | | | | | Leu-130 to Cys-138, | | |
| | | | | | | Gln-149 to Glu-154, | | |
| | | | | | | Thr-172 to Ile-179, | | |
| | | | | | | Glu-185 to Arg-192. | | |
| | HPMDK28 | 639118 | 479 | 58-663 | 995 | Ala-55 to Asn-60, | | |
| | | | | | | Lys-65 to Met-71, | | |
| | | | | | | Leu-75 to Asn-86, | | |
| | | | | | | Asp-93 to Asp-110, | | |
| | | | | | | Leu-130 to Cys-138, | | |
| | | | | | | Gln-149 to Glu-154, | | |
| | | | | | | Thr-172 to Ile-179, | | |
| | | | | | | Glu-185 to Arg-192. | | |
| 252 | HPMFP40 | 638165 | 262 | 37-171 | 778 | | | |
| 253 | HPRAL78 | 1352342 | 263 | 62-1321 | 779 | Pro-31 to Thr-48, | 3 | |
| | | | | | | Arg-62 to Gly-70, | | |
| | | | | | | Ala-74 to Glu-87, | | |
| | | | | | | Lys-123 to Asp-129, | | |
| | | | | | | Pro-162 to Gly-167, | | |
| | | | | | | Glu-170 to Gly-189, | | |
| | | | | | | Arg-220 to Asn-228, | | |
| | | | | | | Glu-248 to Ala-258, | | |
| | | | | | | Gly-285 to Gly-300, | | |
| | | | | | | Pro-315 to Gly-327, | | |
| | | | | | | Ser-406 to Arg-411. | | |
| | HPRAL78 | 844216 | 480 | 70-1245 | 996 | Pro-31 to Thr-48, | | |
| | | | | | | Arg-62 to Gly-70, | | |
| | | | | | | Ala-74 to Glu-87, | | |
| | | | | | | Lys-123 to Asp-129, | | |
| | | | | | | Pro-162 to Gly-167, | | |
| | | | | | | Glu-170 to Gly-189, | | |
| | | | | | | Arg-220 to Asn-228. | | |
| | HPRAL78 | 484735 | 481 | 148-339 | 997 | Ser-49 to Arg-54. | | |
| 254 | HPRBC80 | 829136 | 264 | 94-1254 | 780 | Asp-6 to His-13, | | |
| | | | | | | Asp-114 to Gly-131, | | |
| | | | | | | Thr-166 to Gln-181, | | |
| | | | | | | Val-210 to Thr-216, | | |
| | | | | | | Pro-222 to Tyr-227. | | |
| | HPRBC80 | 720095 | 482 | 404-613 | 998 | | | |
| 255 | HPTTG19 | 635033 | 265 | 215-364 | 781 | | | |
| 256 | HPZAB47 | 585702 | 266 | 34-177 | 782 | Lys-32 to Lys-38. | | |
| 257 | HRAAB15 | 658717 | 267 | 35-514 | 783 | Asn-49 to Gln-54, | | |
| | | | | | | Glu-150 to Asp-159. | | |
| 258 | HRABA80 | 882176 | 268 | 144-452 | 784 | Ala-30 to Gly-36, | | |
| | | | | | | Asp-45 to Trp-50, | | |
| | | | | | | Lys-65 to Cys-71, | | |
| | | | | | | Pro-80 to Cys-87. | | |
| | HRABA80 | 588460 | 483 | 130-438 | 999 | Ala-30 to Gly-36, | | |
| | | | | | | Asp-45 to Trp-50, | | |
| | | | | | | Lys-65 to Cys-71, | | |
| | | | | | | Pro-80 to Cys-87. | | |
| 259 | HRACD15 | 871221 | 269 | 252-410 | 785 | | | |
| | HRACD15 | 706332 | 484 | 252-413 | 1000 | | | |
| 260 | HRACJ35 | 877666 | 270 | 132-1550 | 786 | Arg-31 to Lys-37, | | |
| | | | | | | Lys-58 to Glu-65, | | |
| | | | | | | Asp-157 to Gly-168, | | |
| | | | | | | Ile-219 to Gly-225, | | |
| | | | | | | Ala-260 to Ser-268, | | |
| | | | | | | Thr-276 to Glu-282. | | |
| | HRACJ35 | 730504 | 485 | 99-1517 | 1001 | Arg-31 to Lys-37, | | |
| | | | | | | Lys-58 to Glu-65, | | |
| | | | | | | Asp-157 to Gly-168, | | |
| | | | | | | Ile-219 to Gly-225, | | |
| | | | | | | Ala-260 to Ser-268, | | |
| | | | | | | Thr-276 to Glu-282. | | |
| | HRACJ35 | 470546 | 486 | 1-534 | 1002 | Ile-9 to Gly-15, | | |
| | | | | | | Ala-50 to Ser-58, | | |
| | | | | | | Thr-66 to Glu-72. | | |
| 261 | HRDFD27 | 567004 | 271 | 82-333 | 787 | | | |
| 262 | HRGBL78 | 910133 | 272 | 30-1109 | 788 | Thr-48 to Arg-56, | 1 | |
| | | | | | | Pro-122 to Glu-127, | | |
| | | | | | | Lys-135 to Cys-143, | | |
| | | | | | | Ala-180 to Gly-185, | | |
| | | | | | | Ala-230 to Tyr-238, | | |
| | | | | | | Thr-244 to Gln-255, | | |
| | | | | | | Pro-274 to Ser-279, | | |
| | | | | | | Thr-284 to Phe-306, | | |
| | | | | | | Leu-345 to Thr-354. | | |
| | HRGBL78 | 904040 | 487 | 30-626 | 1003 | Thr-48 to Arg-56, | | |
| | | | | | | Pro-122 to Glu-127, | | |
| | | | | | | Ala-136 to Tyr-141. | | |
| | HRGBL78 | 904621 | 488 | 11-19 | 1004 | | | |
| | HRGBL78 | 863802 | 489 | 1048-1146 | 1005 | Pro-24 to Arg-32. | | |
| 263 | HROAJ03 | 567005 | 273 | 19-597 | 789 | Lys-41 to Arg-47, | | |
| | | | | | | Asp-125 to Lys-139, | | |
| | | | | | | Ser-177 to Glu-185. | | |
| 264 | HROAJ39 | 1181699 | 274 | 10-1146 | 790 | Ile-4 to Tyr-10, | | |
| | | | | | | Arg-119 to Pro-126, | | |
| | | | | | | Glu-152 to Gly-158, | | |
| | | | | | | Thr-209 to Phe-215. | | |
| | HROAJ39 | 1114849 | 490 | 31-879 | 1006 | Arg-40 to Pro-47, | | |
| | | | | | | Glu-73 to Gly-79, | | |
| | | | | | | Thr-130 to Phe-136, | | |
| | | | | | | Lys-277 to Lys-283. | | |
| | HROAJ39 | 1027712 | 491 | 247-1104 | 1007 | Arg-40 to Pro-47, | | |
| | | | | | | Glu-73 to Gly-79, | | |
| | | | | | | Thr-130 to Phe-136. | | |
| 265 | HROBD68 | 827306 | 275 | 122-268 | 791 | Thr-19 to Thr-25. | | |
| 266 | HSATR82 | 531973 | 276 | 74-199 | 792 | | | |
| 267 | HSAVH65 | 545459 | 277 | 104-406 | 793 | Ser-58 to His-64. | | |
| 268 | HSAWD74 | 460527 | 278 | 142-570 | 794 | Leu-51 to Gly-77, | 7 | |
| | | | | | | Ile-117 to Pro-125. | | |
| | HSAWD74 | 371416 | 492 | 122-256 | 1008 | Thr-25 to Cys-30, | | |
| | | | | | | Pro-35 to Arg-42. | | |
| 269 | HSAWZ41 | 580872 | 279 | 98-271 | 795 | Ile-46 to Tyr-56. | | |
| 270 | HSAXA83 | 545051 | 280 | 92-316 | 796 | | | |
| 271 | HSAYB43 | 604143 | 281 | 89-226 | 797 | Asp-29 to Tyr-34. | | |
| 272 | HSDEK49 | 1352253 | 282 | 60-1256 | 798 | Val-29 to Val-37, | | |
| | | | | | | Asp-71 to His-76, | | |
| | | | | | | Gln-78 to Gly-84, | | |
| | | | | | | Met-105 to His-110, | | |
| | | | | | | Trp-117 to Asn-123, | | |
| | | | | | | Lys-179 to Pro-187, | | |
| | | | | | | Gly-218 to Asp-224, | | |
| | | | | | | Leu-237 to Ala-243, | | |
| | | | | | | Thr-256 to Asp-268, | | |
| | | | | | | Ser-275 to Lys-280, | | |
| | | | | | | Arg-308 to Glu-314, | | |
| | | | | | | Glu-326 to Glu-332, | | |
| | | | | | | Cys-343 to Asp-359. | | |
| | HSDEK49 | 625998 | 493 | 126-1043 | 1009 | Val-29 to Val-37, | | |
| | | | | | | Asp-71 to His-76, | | |
| | | | | | | Gln-78 to Gly-84, | | |
| | | | | | | Met-105 to His-110, | | |
| | | | | | | Trp-117 to Gly-122, | | |
| | | | | | | Gln-136 to Lys-141, | | |
| | | | | | | Leu-143 to Ala-149, | | |
| | | | | | | Thr-162 to Asp-174, | | |
| | | | | | | Ser-181 to Lys-186, | | |
| | | | | | | Arg-214 to Glu-220, | | |
| | | | | | | Glu-232 to Glu-238, | | |
| | | | | | | Cys-249 to Asp-265. | | |
| 273 | HSDFJ26 | 834619 | 283 | 99-767 | 799 | Ala-21 to Glu-31, | | |
| | | | | | | Thr-37 to Cys-43, | | |
| | | | | | | Asp-62 to Ser-79, | | |
| | | | | | | Lys-134 to Gly-146, | | |
| | | | | | | Leu-164 to Met-169, | | |
| | | | | | | Glu-171 to Lys-201. | | |
| | HSDFJ26 | 836071 | 494 | 99-317 | 1010 | Ala-21 to Glu-31, | | |
| | | | | | | Thr-37 to Cys-43, | | |
| | | | | | | Pro-64 to Asp-69. | | |
| 274 | HSDJJ82 | 460602 | 284 | 79-237 | 800 | Pro-45 to Gln-52. | | |
| 275 | HSDSB09 | 1301498 | 285 | 16-423 | 801 | Glu-33 to Glu-56, | | |
| | | | | | | Thr-75 to Cys-81. | | |
| | HSDSB09 | 463645 | 495 | 22-387 | 1011 | Glu-33 to Glu-56, | | |
| | | | | | | Thr-75 to Cys-81. | | |
| 276 | HSDSE75 | 545057 | 286 | 160-705 | 802 | Tyr-15 to Leu-59, | | |
| | | | | | | Ala-68 to Asp-85, | | |
| | | | | | | Pro-87 to Asn-96, | | |
| | | | | | | His-120 to Lys-129, | | |
| | | | | | | Ser-153 to Gln-170. | | |
| 277 | HSDZR57 | 651375 | 287 | 27-212 | 803 | Glu-50 to Glu-61. | | |
| 278 | HSIDJ81 | 589447 | 288 | 8-184 | 804 | Glu-37 to Gly-45. | | |
| 279 | HSKDA27 | 1352409 | 289 | 786-3635 | 805 | Gly-31 to Arg-36, | | |
| | | | | | | Thr-55 to Glu-62, | | |
| | | | | | | Ser-64 to Ser-79, | | |
| | | | | | | Arg-87 to Asp-96, | | |
| | | | | | | Arg-103 to Ala-109, | | |
| | | | | | | Asp-120 to Arg-126, | | |
| | | | | | | Gly-294 to Gly-302, | | |
| | | | | | | Ser-305 to Ala-318, | | |
| | | | | | | Val-320 to Arg-327, | | |
| | | | | | | Pro-344 to Thr-351, | | |
| | | | | | | Thr-383 to Thr-399, | | |
| | | | | | | Leu-414 to Lys-435, | | |
| | | | | | | Thr-449 to Ala-457, | | |
| | | | | | | Gly-461 to Asn-479, | | |
| | | | | | | Gly-483 to Gln-498, | | |
| | | | | | | Ser-503 to Arg-514, | | |
| | | | | | | Lys-532 to Ala-559, | | |
| | | | | | | Leu-563 to Ser-611, | | |
| | | | | | | Lys-632 to Tyr-638, | | |
| | | | | | | Asn-667 to Lys-672, | | |
| | | | | | | Leu-701 to Met-707, | | |
| | | | | | | Ser-745 to Lys-755, | | |
| | | | | | | Lys-761 to Leu-768, | | |
| | | | | | | Pro-787 to Trp-792, | | |
| | | | | | | Lys-871 to Met-883, | | |
| | | | | | | Pro-914 to Tyr-923, | | |
| | | | | | | Ser-925 to Arg-939, | | |
| | | | | | | Glu-942 to Tyr-950. | | |
| | HSKDA27 | 1074734 | 496 | 127-1653 | 1012 | Gly-31 to Arg-36, | | |
| | | | | | | Thr-55 to Glu-62, | | |
| | | | | | | Ser-64 to Ser-79, | | |
| | | | | | | Arg-87 to Asp-96, | | |
| | | | | | | Arg-103 to Ala-109, | | |
| | | | | | | Asp-120 to Arg-126, | | |
| | | | | | | Gly-294 to Gly-302, | | |
| | | | | | | Ser-305 to Ala-318, | | |
| | | | | | | Val-320 to Arg-327, | | |
| | | | | | | Pro-342 to Thr-351, | | |
| | | | | | | Thr-383 to Thr-399, | | |
| | | | | | | Leu-414 to Lys-435, | | |
| | | | | | | Thr-449 to Ala-457, | | |
| | | | | | | Gly-461 to Asn-479, | | |
| | | | | | | Gly-483 to Gln-498, | | |
| | | | | | | Asn-504 to Val-509. | | |
| | HSKDA27 | 872570 | 497 | 12-1673 | 1013 | Gly-27 to Arg-32, | | |
| | | | | | | Thr-51 to Glu-58, | | |
| | | | | | | Ser-60 to Ser-75, | | |
| | | | | | | Arg-83 to Asp-92, | | |
| | | | | | | Arg-99 to Ala-105, | | |
| | | | | | | Asp-116 to Arg-122, | | |
| | | | | | | Gly-290 to Ala-314, | | |
| | | | | | | Val-316 to Arg-323, | | |
| | | | | | | Pro-338 to Arg-345, | | |
| | | | | | | Thr-358 to His-375, | | |
| | | | | | | Arg-403 to Ser-408, | | |
| | | | | | | Ser-420 to Ser-436, | | |
| | | | | | | Thr-447 to Ala-455, | | |
| | | | | | | Gly-459 to Asn-477, | | |
| | | | | | | Gly-481 to Gln-496, | | |
| | | | | | | Ser-501 to Arg-512, | | |
| | | | | | | Lys-530 to Lys-554. | | |
| 280 | HSKGN81 | 676075 | 290 | 353-1132 | 806 | Ile-60 to Asn-69, | | |
| | | | | | | Leu-106 to Asp-112, | | |
| | | | | | | Glu-130 to Gly-136, | | |
| | | | | | | Phe-160 to Glu-167, | | |
| | | | | | | Pro-184 to Cys-190, | | |
| | | | | | | Glu-197 to Ser-202, | | |
| | | | | | | Arg-215 to Glu-221, | | |
| | | | | | | Thr-237 to Pro-242. | | |
| | HSKGN81 | 409905 | 498 | 537-608 | 1014 | Thr-11 to Pro-22. | | |
| 281 | HSLCQ82 | 1352226 | 291 | 226-477 | 807 | | | |
| | HSLCQ82 | 589526 | 499 | 233-406 | 1015 | | | |
| 282 | HSNAD72 | 467397 | 292 | 220-327 | 808 | | | |
| 283 | HSNMC45 | 1352201 | 293 | 225-389 | 809 | Glu-23 to Asn-31, | | |
| | | | | | | Thr-38 to Gly-48. | | |
| | HSNMC45 | 545060 | 500 | 232-309 | 1016 | | | |
| 284 | HSQFP66 | 460537 | 294 | 96-332 | 810 | Ser-6 to Arg-15. | | |
| 285 | HSRFZ57 | 892171 | 295 | 82-207 | 811 | | | |
| 286 | HSSFT08 | 589978 | 296 | 125-301 | 812 | | | |
| 287 | HSSGD52 | 1352343 | 297 | 344-2161 | 813 | Pro-7 to Cys-12, | | |
| | | | | | | Lys-48 to Tyr-62, | | |
| | | | | | | Arg-182 to His-187, | | |
| | | | | | | Leu-189 to Glu-196, | | |
| | | | | | | Thr-211 to Gly-226, | | |
| | | | | | | Leu-270 to Thr-275, | | |
| | | | | | | Gly-278 to Gly-289, | | |
| | | | | | | Pro-444 to Asn-449, | | |
| | | | | | | Glu-453 to Lys-461, | | |
| | | | | | | Gly-491 to Thr-496, | | |
| | | | | | | Ser-525 to Trp-532. | | |
| | HSSGD52 | 845666 | 501 | 338-2155 | 1017 | Pro-7 to Cys-12, | | |
| | | | | | | Lys-48 to Tyr-62, | | |
| | | | | | | Arg-182 to His-187, | | |
| | | | | | | Leu-189 to Glu-196, | | |
| | | | | | | Thr-211 to Gly-226, | | |
| | | | | | | Leu-270 to Thr-275, | | |
| | | | | | | Gly-278 to Gly-289, | | |
| | | | | | | Pro-444 to Asn-449, | | |
| | | | | | | Glu-453 to Lys-461, | | |
| | | | | | | Gly-491 to Thr-496, | | |
| | | | | | | Ser-525 to Trp-532. | | |
| 288 | HSSGG82 | 618535 | 298 | 203-391 | 814 | | | |
| 289 | HSUBW09 | 413246 | 299 | 153-323 | 815 | Asp-23 to Gly-29. | | |
| 290 | HSVBU91 | 596868 | 300 | 256-528 | 816 | Asp-26 to Asn-31, | | |
| | | | | | | Ser-37 to His-49, | | |
| | | | | | | Ala-65 to Ser-73. | | |
| 291 | HSYAV50 | 847358 | 301 | 155-2173 | 817 | Cys-28 to Pro-33, | | |
| | | | | | | Arg-41 to Pro-52, | | |
| | | | | | | Glu-118 to Glu-127, | | |
| | | | | | | Tyr-130 to Arg-135, | | |
| | | | | | | Ser-224 to Arg-230, | | |
| | | | | | | Ser-322 to His-329, | | |
| | | | | | | Glu-388 to Ala-396, | | |
| | | | | | | Pro-404 to Pro-411, | | |
| | | | | | | Ser-443 to Thr-454, | | |
| | | | | | | Val-456 to Arg-462, | | |
| | | | | | | Asn-500 to Arg-507. | | |
| 292 | HTAEE28 | 1018291 | 302 | 319-1167 | 818 | Pro-255 to Leu-264. | | |
| | HTAEE28 | 882919 | 502 | 372-737 | 1018 | | | |
| | HTAEE28 | 864120 | 503 | 124-771 | 1019 | | | |
| 293 | HTECC05 | 1352365 | 303 | 13-546 | 819 | Gly-41 to Leu-46, | | |
| | | | | | | Asp-67 to Thr-75, | | |
| | | | | | | Ile-114 to Gly-122, | | |
| | | | | | | Pro-156 to Trp-161. | | |
| | HTECC05 | 877448 | 504 | 21-404 | 1020 | Gly-41 to Leu-46, | | |
| | | | | | | Asp-67 to Thr-75, | | |
| | | | | | | Ile-114 to Pro-127. | | |
| | HTECC05 | 666743 | 505 | 27-518 | 1021 | Gly-41 to Leu-46, | | |
| | | | | | | Asp-67 to Thr-75, | | |
| | | | | | | Ile-114 to Ala-123. | | |
| 294 | HTEEB42 | 206980 | 304 | 59-952 | 820 | Met-1 to His-7. | | |
| 295 | HTEFU65 | 543396 | 305 | 231-371 | 821 | Gly-35 to Gly-40. | | |
| 296 | HTEGA76 | 381995 | 306 | 90-284 | 822 | | | |
| 297 | HTELM16 | 834058 | 307 | 121-375 | 823 | Ser-38 to Tyr-48, | | |
| | | | | | | Gly-67 to Trp-74, | | |
| | | | | | | Tyr-76 to Pro-84. | | |
| 298 | HTELP17 | 836072 | 308 | 164-298 | 824 | | | |
| 299 | HTELS08 | 847090 | 309 | 15-491 | 825 | Pro-98 to Gln-106. | | |
| 300 | HTEPG70 | 834931 | 310 | 365-634 | 826 | Arg-71 to Ala-82. | | |
| 301 | HTGEP89 | 410582 | 311 | 285-569 | 827 | | | |
| 302 | HTHBG43 | 919911 | 312 | 47-166 | 828 | | 1 | |
| | HTHBG43 | 906282 | 506 | 149-268 | 1022 | | | |
| 303 | HTHDS25 | 772559 | 313 | 70-339 | 829 | | | |
| 304 | HTLEP53 | 634852 | 314 | 73-378 | 830 | Ser-33 to Lys-43. | | |
| 305 | HTLGE31 | 1035130 | 315 | 51-311 | 831 | Val-31 to Gly-49. | | |
| 306 | HTLHY14 | 838460 | 316 | 36-776 | 832 | His-22 to Tyr-32, | | |
| | | | | | | Trp-56 to Lys-62, | | |
| | | | | | | Ile-72 to Leu-77, | | |
| | | | | | | Ile-126 to Gly-136, | | |
| | | | | | | Tyr-187 to Ala-193, | | |
| | | | | | | Ile-206 to Thr-214. | | |
| 307 | HTLIV19 | 1046341 | 317 | 110-364 | 833 | | 3 | |
| 308 | HTOAK16 | 560744 | 318 | 87-419 | 834 | Asp-27 to Ser-36. | | |
| 309 | HTOGR42 | 838160 | 319 | 14-181 | 835 | Pro-35 to Ser-40. | | |
| | HTOGR42 | 570751 | 507 | 13-195 | 1023 | | | |
| 310 | HTOHT18 | 628300 | 320 | 433-594 | 836 | Leu-39 to Ser-47. | | |
| 311 | HTOIZ02 | 826312 | 321 | 243-395 | 837 | Arg-20 to Val-29. | 17 | |
| | HTOIZ02 | 847904 | 508 | 2-721 | 1024 | Gly-1 to Glu-11, | | |
| | | | | | | His-16 to Pro-24, | | |
| | | | | | | Gly-31 to Arg-37, | | |
| | | | | | | Asp-43 to Leu-49. | | |
| 312 | HTOJK60 | 545067 | 322 | 217-315 | 838 | | | |
| 313 | HTPCS72 | 854941 | 323 | 2365-2577 | 839 | | 1 | |
| | HTPCS72 | 566683 | 509 | 530-745 | 1025 | | | |
| 314 | HTPIH83 | 919916 | 324 | 118-810 | 840 | Ser-29 to Ser-34, | X | |
| | | | | | | Ser-186 to Asp-196, | | |
| | | | | | | Arg-206 to Ser-225. | | |
| | HTPIH83 | 895024 | 510 | 111-530 | 1026 | Ser-29 to Ser-34. | | |
| | HTPIH83 | 898088 | 511 | 96-353 | 1027 | | | |
| 315 | HTSEW17 | 460579 | 325 | 170-283 | 841 | | | |
| 316 | HTTBI76 | 637725 | 326 | 133-534 | 842 | Glu-55 to Arg-61, | | |
| | | | | | | Gln-84 to Ser-92, | | |
| | | | | | | Ser-99 to Ser-104. | | |
| 317 | HTTBS64 | 1008159 | 327 | 95-223 | 843 | Leu-37 to Asn-42. | | |
| | HTTBS64 | 863187 | 512 | 100-228 | 1028 | Leu-37 to Asn-42. | | |
| | HTTBS64 | 754125 | 513 | 175-402 | 1029 | Lys-41 to Arg-46. | | |
| 318 | HTWDF76 | 714344 | 328 | 316-570 | 844 | | | |
| 319 | HTXCV12 | 1352213 | 329 | 175-480 | 845 | Gln-29 to Gly-38, | | |
| | | | | | | Lys-57 to Asp-62. | | |
| | HTXCV12 | 567006 | 514 | 183-458 | 1030 | Gln-29 to Gly-38, | | |
| | | | | | | Lys-57 to Asp-62. | | |
| 320 | HTXFL30 | 620001 | 330 | 30-338 | 846 | Met-1 to Gly-6, | | |
| | | | | | | Arg-11 to Gly-21. | | |
| 321 | HTXJM03 | 603918 | 331 | 328-498 | 847 | Asp-51 to His-56. | | |
| 322 | HTXON32 | 838288 | 332 | 72-230 | 848 | Ala-45 to Gly-50. | | |
| 323 | HUFBY15 | 1352349 | 333 | 49-525 | 849 | Ser-44 to Leu-51, | | |
| | | | | | | Arg-81 to Cys-94, | | |
| | | | | | | Thr-132 to Tyr-140, | | |
| | | | | | | Arg-143 to Ile-154. | | |
| | HUFBY15 | 846380 | 515 | 74-508 | 1031 | Ser-44 to Leu-51, | | |
| | | | | | | Arg-81 to Cys-94, | | |
| | | | | | | Thr-118 to Tyr-126, | | |
| | | | | | | Arg-129 to Ile-140. | | |
| 324 | HUFCJ30 | 638402 | 334 | 123-275 | 850 | Pro-31 to Ala-37. | | |
| 325 | HUKAH51 | 1352424 | 335 | 286-738 | 851 | Trp-35 to Trp-45, | | |
| | | | | | | Pro-52 to Asp-57, | | |
| | | | | | | Thr-73 to Arg-82, | | |
| | | | | | | Pro-105 to Leu-112, | | |
| | | | | | | Pro-115 to Arg-127, | | |
| | | | | | | Pro-140 to Gln-151. | | |
| | HUKAH51 | 1300737 | 516 | 144-572 | 1032 | Trp-35 to Trp-45, | | |
| | | | | | | Pro-52 to Asp-57, | | |
| | | | | | | Thr-73 to Thr-80, | | |
| | | | | | | Pro-96 to Leu-103, | | |
| | | | | | | Pro-106 to Arg-118, | | |
| | | | | | | Pro-131 to Gln-142. | | |
| | HUKAH51 | 603538 | 517 | 55-414 | 1033 | Trp-35 to Trp-45, | | |
| | | | | | | Pro-52 to Asp-57, | | |
| | | | | | | Thr-73 to Thr-80, | | |
| | | | | | | Pro-96 to Leu-103, | | |
| | | | | | | Pro-106 to Leu-119. | | |
| 326 | HUSXS50 | 1352367 | 336 | 280-1845 | 852 | Gly-39 to Thr-44, | | |
| | | | | | | Asn-51 to Thr-62, | | |
| | | | | | | Pro-88 to Pro-104, | | |
| | | | | | | Ser-109 to Phe-124, | | |
| | | | | | | Ala-190 to Asn-196, | | |
| | | | | | | Gln-388 to Glu-394, | | |
| | | | | | | Gln-402 to Gly-409, | | |
| | | | | | | Asn-427 to Leu-439, | | |
| | | | | | | Glu-447 to Thr-453, | | |
| | | | | | | Pro-468 to Gln-474, | | |
| | | | | | | Pro-476 to Phe-482, | | |
| | | | | | | Arg-498 to Arg-504, | | |
| | | | | | | Arg-508 to Arg-518. | | |
| | HUSXS50 | 883176 | 518 | 281-1666 | 1034 | Gly-39 to Thr-44, | | |
| | | | | | | Asn-51 to Thr-62, | | |
| | | | | | | Pro-88 to Pro-104, | | |
| | | | | | | Ser-109 to Ser-114. | | |
| | HUSXS50 | 655372 | 519 | 179-703 | 1035 | Gln-54 to Gly-61, | | |
| | | | | | | Asn-79 to Leu-91, | | |
| | | | | | | Glu-99 to Thr-105, | | |
| | | | | | | Pro-120 to Gln-126, | | |
| | | | | | | Pro-128 to Phe-134, | | |
| | | | | | | Arg-150 to Arg-156, | | |
| | | | | | | Arg-160 to Arg-170. | | |
| 327 | HUVEB53 | 571200 | 337 | 14-151 | 853 | | | |
| 328 | HWAAD63 | 838626 | 338 | 322-825 | 854 | Pro-53 to Trp-61. | | |
| | HWAAD63 | 833089 | 520 | 322-483 | 1036 | | | |
| | HWAAD63 | 793875 | 521 | 312-818 | 1037 | | | |
| 329 | HWABY10 | 768334 | 339 | 263-766 | 855 | Pro-67 to Ser-73. | | |
| 330 | HWADJ89 | 799506 | 340 | 581-709 | 856 | | | |
| 331 | HWBCB89 | 1093347 | 341 | 37-600 | 857 | Gln-20 to Phe-25, | | |
| | | | | | | Gly-58 to Ala-66, | | |
| | | | | | | Gln-69 to Leu-74, | | |
| | | | | | | Asn-87 to Ile-100, | | |
| | | | | | | Thr-135 to Trp-142. | | |
| | HWBCB89 | 886210 | 522 | 35-598 | 1038 | Gln-20 to Phe-25, | | |
| | | | | | | Gly-58 to Ala-66, | | |
| | | | | | | Gln-69 to Leu-74, | | |
| | | | | | | Asn-87 to Ile-100, | | |
| | | | | | | Thr-135 to Trp-142. | | |
| 332 | HWBFX31 | 799427 | 342 | 271-426 | 858 | | | |
| 333 | HWDAH38 | 1028519 | 343 | 255-377 | 859 | | | |
| | HWDAH38 | 889281 | 523 | 319-441 | 1039 | | | |
| 334 | HWHGZ51 | 886212 | 344 | 33-1073 | 860 | Lys-39 to Cys-44, | | |
| | | | | | | Pro-87 to Gly-93, | | |
| | | | | | | Gln-107 to Ala-115, | | |
| | | | | | | Glu-130 to Val-138, | | |
| | | | | | | Glu-149 to Ser-155, | | |
| | | | | | | Asn-163 to Tyr-169, | | |
| | | | | | | Gln-217 to Phe-231, | | |
| | | | | | | Pro-265 to Pro-273, | | |
| | | | | | | Pro-275 to Val-284, | | |
| | | | | | | Ala-288 to Arg-295, | | |
| | | | | | | Gln-304 to Gly-325. | | |
| 335 | HWLIH65 | 793713 | 345 | 129-626 | 861 | | | |
| 336 | HTEAM34 | 898364 | 346 | 136-504 | 862 | Leu-26 to Glu-52, | | |
| | | | | | | Gln-71 to Lys-79. | | |
| | HTEAM34 | 570049 | 524 | 63-431 | 1040 | Leu-26 to Glu-52, | | |
| | | | | | | Gln-71 to Lys-79. | | |
| 337 | HTEJN13 | 1352272 | 347 | 156-779 | 863 | Tyr-37 to Cys-49, | | |
| | | | | | | Gly-51 to Tyr-56, | | |
| | | | | | | Lys-88 to Trp-93, | | |
| | | | | | | Phe-125 to Lys-140, | | |
| | | | | | | Lys-147 to Thr-153, | | |
| | | | | | | Ala-203 to Met-208. | | |
| | HTEJN13 | 658744 | 525 | 163-639 | 1041 | Tyr-37 to Cys-49, | | |
| | | | | | | Gly-51 to Tyr-56, | | |
| | | | | | | Lys-88 to Trp-93, | | |
| | | | | | | Leu-130 to Glu-136. | | |
| | HTEJN13 | 381941 | 526 | 155-367 | 1042 | | | |

[0095] TABLE 1B.2

| Gene | cDNA Clone | | SEQ ID | Tissue Distribution Library Code: Count |
|---|---|---|---|---|
| No: | ID | Contig ID: | NO: X | (see Table 4 for Library Codes) |
| 1 | H2CBU83 | 884134 | 11 | AR182: 8, AR314: 7, AR271: 7, AR280: 6, AR315: 6, AR216: 6, AR052: 6, AR224: 6, AR225: 5, AR164: 5, AR215: 5, AR270: 5, AR165: 5, AR162: 5, AR310: 5, |
| | | | | AR245: 5, AR166: 5, AR161: 5, AR169: 5, AR223: 5, AR266: 5, AR172: 5, AR039: 5, AR192: 5, AR163: 4, AR193: 4, AR207: 4, AR176: 4, AR269: 4, AR175: 4, |
| | | | | AR226: 4, AR243: 4, AR217: 4, AR273: 4, AR168: 4, AR282: 4, AR204: 4, AR291: 4, AR265: 4, AR183: 4, AR274: 4, AR299: 4, AR214: 4, AR205: 4, AR206: 4, |
| | | | | AR194: 4, AR060: 4, AR272: 4, AR238: 4, AR186: 4, AR222: 4, AR053: 4, AR197: 4, AR089: 3, AR257: 3, AR295: 3, AR289: 3, AR311: 3, AR221: 3, AR171: 3, |
| | | | | AR191: 3, AR250: 3, AR235: 3, AR252: 3, AR275: 3, AR309: 3, AR177: 3, AR180: 3, AR173: 3, AR178: 3, AR246: 3, AR312: 3, AR188: 3, AR292: 3, AR298: 3, |
| | | | | AR284: 3, AR212: 3, AR201: 3, AR285: 3, AR189: 3, AR296: 3, AR181: 3, AR300: 3, AR185: 3, AR253: 3, AR202: 3, AR281: 3, AR237: 3, AR184: 3, AR268: 3, |
| | | | | AR233: 3, AR286: 3, AR232: 3, AR308: 3, AR277: 3, AR267: 3, AR228: 3, AR288: 3, AR316: 3, AR239: 3, AR195: 2, AR242: 2, AR263: 2, AR033: 2, AR287: 2, |
| | | | | AR196: 2, AR210: 2, AR259: 2, AR174: 2, AR294: 2, AR096: 2, AR234: 2, AR293: 2, AR290: 2, AR190: 2, AR255: 2, AR055: 2, AR213: 2, AR264: 2, AR231: 2, |
| | | | | AR313: 2, AR297: 2, AR258: 2, AR170: 2, AR218: 2, AR247: 2, AR061: 2, AR236: 2, AR219: 2, AR198: 2, AR230: 2, AR254: 2, AR256: 2, AR261: 2, AR104: 2, |
| | | | | AR240: 2, AR262: 2, AR283: 2, AR229: 2, AR227: 2, AR260: 2, AR200: 1, AR203: 1, AR179: 1, AR244: 1, AR199: 1, S0414: 9, S0422: 7, L0662: 7, S0444: 6, |
| | | | | L0748: 4, L0581: 4, S0442: 3, H0031: 3, L0666: 3, L0754: 3, H0656: 2, S0358: 2, S0360: 2, H0013: 2, S0438: 2, S0440: 2, L0598: 2, L0803: 2, L0540: 2, L0756: 2, |
| | | | | L0752: 2, L0758: 2, L0759: 2, S0242: 2, H0624: 1, S0282: 1, H0742: 1, H0393: 1, H0586: 1, H0574: 1, H0036: 1, H0004: 1, T0103: 1, T0110: 1, H0571: 1, H0569: 1, |
| | | | | H0123: 1, L0471: 1, H0594: 1, S6028: 1, H0622: 1, UNKWN: 1, L0649: 1, L0381: 1, L0776: 1, L0659: 1, L0528: 1, L0792: 1, L0793: 1, L0663: 1, L0664: 1, |
| | | | | L0665: 1, L2257: 1, H0144: 1, S0374: 1, H0547: 1, H0593: 1, H0690: 1, H0670: 1, H0648: 1, H0672: 1, H0651: 1, H0539: 1, S0378: 1, S0380: 1, H0521: 1, S0406: 1, |
| | | | | H0555: 1, H0478: 1, L0744: 1, L0731: 1 and S0276: 1. |
| | H2CBU83 | 745366 | 347 | |
| 2 | H2MAC30 | 544957 | 12 | AR096: 11, AR039: 10, AR313: 10, AR299: 10, AR250: 9, AR240: 8, AR254: 8, AR055: 8, AR242: 8, AR060: 7, AR089: 7, AR162: 7, AR316: 6, AR161: 6, |
| | | | | AR163: 6, AR213: 6, AR269: 6, AR252: 5, AR268: 5, AR169: 5, AR200: 5, AR204: 5, AR215: 5, AR165: 5, AR053: 5, AR196: 5, AR166: 5, AR164: 5, AR199: 5, |
| | | | | AR104: 5, AR282: 5, AR176: 5, AR266: 5, AR180: 4, AR264: 4, AR261: 4, AR277: 4, AR300: 4, AR229: 4, AR183: 4, AR181: 4, AR190: 4, AR173: 4, AR263: 4, |
| | | | | AR247: 4, AR309: 4, AR197: 4, AR274: 4, AR178: 4, AR214: 4, AR205: 4, AR212: 4, AR243: 4, AR312: 4, AR191: 4, AR253: 4, AR182: 4, AR236: 4, AR170: 4, |
| | | | | AR245: 3, AR185: 3, AR272: 3, AR217: 3, AR171: 3, AR267: 3, AR175: 3, AR308: 3, AR192: 3, AR290: 3, AR271: 3, AR193: 3, AR291: 3, AR219: 3, AR237: 3, |
| | | | | AR233: 3, AR188: 3, AR201: 3, AR216: 3, AR311: 3, AR270: 3, AR177: 3, AR174: 3, AR218: 3, AR234: 3, AR283: 3, AR179: 3, AR293: 3, AR207: 3, AR231: 3, |
| | | | | AR221: 3, AR228: 3, AR203: 3, AR285: 3, AR262: 3, AR255: 2, AR224: 2, AR288: 2, AR238: 2, AR195: 2, AR287: 2, AR257: 2, AR239: 2, AR168: 2, AR286: 2, |
| | | | | AR189: 2, AR296: 2, AR230: 2, AR223: 2, AR275: 2, AR289: 2, AR297: 1, AR222: 1, AR232: 1, AR033: 1, AR260: 1, AR061: 1, AR227: 1, AR295: 1, AR235: 1, |
| | | | | AR294: 1, AR225: 1, AR258: 1, AR172: 1, AR226: 1, AR210: 1, AR211: 1, L0766: 16, L0743: 11, H0692: 8, L0769: 7, L0518: 6, L0748: 6, L0771: 4, L0745: 4, |
| | | | | L0779: 4, H0265: 3, S0358: 3, H0494: 3, L0755: 3, L3814: 2, H0550: 2, H0486: 2, H0581: 2, H0135: 2, L0761: 2, L0804: 2, L0774: 2, L0438: 2, L0777: 2, H0685: 1, |
| | | | | S0114: 1, H0583: 1, S0116: 1, S0212: 1, H0254: 1, S0408: 1, S0476: 1, H0772: 1, T0104: 1, H0586: 1, H0587: 1, H0331: 1, T0109: 1, H0599: 1, L0738: 1, H0150: 1, |
| | | | | H0012: 1, H0264: 1, S0438: 1, L0770: 1, L0374: 1, L0764: 1, L0768: 1, L0803: 1, L0653: 1, L0776: 1, L0788: 1, L0792: 1, L0663: 1, S0428: 1, S0053: 1, S0216: 1, |
| | | | | H0783: 1, L3811: 1, S0152: 1, H0522: 1, H0555: 1, S0432: 1, L0744: 1, L0751: 1, L0749: 1, L0756: 1, L0758: 1, S0436: 1, L0601: 1, H0543: 1, H0423: 1, S0424: 1 |
| | | | | and H0506: 1. |
| 3 | H6EDC19 | 543259 | 13 | AR235: 21, AR197: 20, AR222: 17, AR261: 13, AR309: 11, AR195: 11, AR176: 9, AR201: 9, AR264: 9, AR295: 9, AR162: 9, AR271: 9, AR242: 9, AR161: 9, |
| | | | | AR163: 9, AR177: 9, AR165: 9, AR089: 9, AR236: 8, AR164: 8, AR283: 8, AR252: 8, AR196: 8, AR166: 8, AR296: 8, AR229: 8, AR198: 8, AR263: 7, AR297: 7, |
| | | | | AR181: 7, AR269: 7, AR287: 7, AR289: 7, AR288: 7, AR245: 7, AR285: 7, AR253: 7, AR060: 7, AR204: 7, AR183: 7, AR266: 7, AR268: 6, AR240: 6, AR180: 6, |
| | | | | AR312: 6, AR246: 6, AR192: 6, AR199: 6, AR055: 6, AR316: 6, AR247: 6, AR272: 6, AR178: 6, AR193: 6, AR233: 6, AR299: 6, AR212: 6, AR228: 6, AR275: 5, |
| | | | | AR293: 5, AR096: 5, AR313: 5, AR291: 5, AR179: 5, AR238: 5, AR239: 5, AR053: 5, AR182: 5, AR286: 5, AR237: 5, AR231: 5, AR308: 5, AR274: 5, AR250: 5, |
| | | | | AR185: 5, AR226: 5, AR205: 5, AR270: 5, AR104: 5, AR255: 5, AR257: 5, AR218: 5, AR175: 5, AR190: 4, AR061: 4, AR219: 4, AR191: 4, AR262: 4, AR203: 4, |
| | | | | AR217: 4, AR213: 4, AR174: 4, AR267: 4, AR243: 4, AR039: 4, AR230: 4, AR033: 4, AR188: 4, AR311: 4, AR232: 4, AR234: 4, AR254: 4, AR300: 4, AR189: 4, |
| | | | | AR168: 4, AR214: 4, AR207: 3, AR227: 3, AR277: 3, AR173: 3, AR294: 3, AR211: 3, AR258: 3, AR256: 3, AR170: 3, AR282: 3, AR171: 3, AR200: 3, AR225: 3, |
| | | | | AR223: 3, AR290: 3, AR260: 2, AR224: 2, AR216: 2, AR210: 2, AR172: 2, AR215: 1, AR169: 1, L0805: 4, H0559: 3, L0803: 3, H0545: 2, L0664: 2, L0748: 2, |
| | | | | L0777: 2, L0758: 2, L3643: 1, H0295: 1, H0657: 1, S0444: 1, H0734: 1, H0550: 1, S0222: 1, T0048: 1, H0318: 1, H0052: 1, H0231: 1, H0041: 1, H0620: 1, |
| | | | | H0606: 1, H0316: 1, H0077: 1, L0769: 1, L0761: 1, L0766: 1, L0774: 1, L0789: 1, H0672: 1, H0539: 1, S0146: 1, L0751: 1, L0780: 1, L0731: 1, S0434: 1 and |
| | | | | S0196: 1. |
| 4 | HACBD91 | 637482 | 14 | AR055: 116, AR283: 103, AR060: 91, AR089: 55, AR235: 53, AR299: 52, AR185: 51, AR104: 49, AR096: 34, AR039: 30, AR282: 30, AR316: 29, AR261: 29, |
| | | | | AR196: 24, AR218: 23, AR219: 21, AR272: 20, AR300: 20, AR313: 19, AR277: 19, AR240: 19, AR309: 17, AR236: 17, AR295: 16, AR252: 15, AR271: 15, |
| | | | | AR191: 15, AR285: 14, AR246: 13, AR165: 13, AR291: 13, AR264: 13, AR311: 13, AR164: 13, AR166: 13, AR308: 12, AR275: 12, AR174: 12, AR287: 11, |
| | | | | AR263: 11, AR286: 11, AR177: 11, AR161: 10, AR162: 10, AR200: 10, AR201: 10, AR163: 10, AR195: 10, AR262: 10, AR188: 10, AR207: 10, AR288: 10, |
| | | | | AR267: 10, AR197: 9, AR181: 9, AR266: 9, AR312: 9, AR227: 9, AR257: 9, AR175: 9, AR289: 9, AR232: 9, AR189: 8, AR297: 8, AR053: 8, AR033: 8, AR190: 8, |
| | | | | AR245: 8, AR296: 8, AR193: 8, AR258: 8, AR255: 8, AR239: 7, AR260: 7, AR173: 7, AR198: 7, AR293: 7, AR199: 7, AR250: 7, AR243: 6, AR247: 6, AR274: 6, |
| | | | | AR211: 6, AR205: 6, AR203: 6, AR213: 6, AR178: 6, AR226: 5, AR256: 5, AR231: 5, AR294: 5, AR270: 5, AR204: 5, AR176: 5, AR238: 5, AR210: 5, AR230: 4, |
| | | | | AR237: 4, AR253: 4, AR170: 4, AR212: 4, AR061: 4, AR183: 4, AR242: 4, AR254: 3, AR169: 3, AR182: 3, AR290: 3, AR268: 3, AR179: 3, AR217: 3, AR221: 2, |
| | | | | AR216: 2, AR168: 2, AR224: 2, AR229: 2, AR214: 2, AR223: 1, AR228: 1, AR172: 1, AR192: 1, L0748: 8, L0439: 4, L0749: 3, H0171: 2, L3659: 2, L0438: 2, |
| | | | | S6024: 1, S0360: 1, H0640: 1, S0278: 1, L3655: 1, S0280: 1, H0012: 1, L0055: 1, H0032: 1, H0647: 1, L0807: 1, L0665: 1, H0659: 1, L0355: 1, S0328: 1, H0754: 1, |
| | | | | H0710: 1, L0756: 1, L0780: 1, L0759: 1, S0260: 1, S0452: 1 and H0721: 1. |
| 5 | HAGAQ26 | 561996 | 15 | AR242: 9, AR192: 9, AR162: 8, AR161: 8, AR197: 8, AR163: 8, AR198: 7, AR204: 7, AR176: 7, AR201: 7, AR165: 7, AR089: 6, AR164: 6, AR166: 6, AR252: 6, |
| | | | | AR269: 6, AR180: 6, AR207: 6, AR182: 6, AR250: 6, AR271: 5, AR173: 5, AR243: 5, AR291: 5, AR229: 5, AR212: 5, AR312: 5, AR295: 5, AR272: 5, AR288: 5, |
| | | | | AR268: 5, AR313: 5, AR205: 5, AR178: 5, AR193: 5, AR053: 5, AR264: 5, AR175: 5, AR239: 5, AR293: 5, AR060: 5, AR263: 5, AR246: 4, AR270: 4, AR235: 4, |
| | | | | AR195: 4, AR181: 4, AR096: 4, AR267: 4, AR238: 4, AR183: 4, AR218: 4, AR309: 4, AR213: 4, AR228: 4, AR289: 4, AR285: 4, AR104: 4, AR290: 4, AR311: 4, |
| | | | | AR231: 4, AR237: 4, AR174: 4, AR296: 4, AR266: 4, AR211: 4, AR316: 4, AR297: 4, AR177: 3, AR226: 3, AR230: 3, AR308: 3, AR287: 3, AR233: 3, AR179: 3, |
| | | | | AR219: 3, AR185: 3, AR286: 3, AR055: 3, AR294: 3, AR240: 3, AR247: 3, AR169: 3, AR253: 3, AR224: 3, AR275: 3, AR215: 3, AR282: 3, AR274: 3, AR232: 3, |
| | | | | AR227: 3, AR061: 3, AR039: 2, AR234: 2, AR168: 2, AR300: 2, AR260: 2, AR256: 2, AR033: 2, AR236: 2, AR200: 2, AR189: 2, AR210: 2, AR258: 2, AR283: 2, |
| | | | | AR214: 2, AR277: 2, AR299: 2, AR199: 2, AR190: 2, AR261: 1, AR172: 1, AR262: 1, AR257: 1, AR191: 1, AR216: 1, L0603: 4, H0031: 3, S0010: 2, T0010: 2, |
| | | | | H0644: 2, L0438: 2, H0038: 1, H0616: 1, H0264: 1, S0426: 1, H0539: 1, L0439: 1 and S0260: 1. |
| 6 | HAGBZ81 | 456414 | 16 | AR219: 618, AR218: 563, AR274: 387, AR253: 355, AR210: 339, AR270: 324, AR254: 310, AR312: 287, AR205: 286, AR308: 285, AR272: 256, AR271: 246, |
| | | | | AR173: 243, AR213: 238, AR313: 237, AR096: 235, AR269: 228, AR250: 228, AR212: 219, AR183: 215, AR290: 208, AR245: 198, AR175: 191, AR039: 182, |
| | | | | AR178: 182, AR309: 180, AR264: 177, AR180: 176, AR268: 171, AR282: 171, AR211: 163, AR263: 158, AR246: 156, AR053: 156, AR267: 150, AR089: 150, |
| | | | | AR174: 147, AR179: 145, AR311: 144, AR176: 143, AR182: 142, AR162: 141, AR293: 140, AR192: 134, AR252: 132, AR060: 130, AR247: 127, AR166: 126, |
| | | | | AR165: 126, AR161: 124, AR164: 121, AR163: 120, AR316: 117, AR198: 112, AR216: 111, AR185: 107, AR288: 106, AR256: 106, AR275: 100, AR297: 98, |
| | | | | AR240: 98, AR193: 96, AR197: 96, AR299: 96, AR243: 95, AR181: 92, AR177: 90, AR172: 89, AR266: 87, AR217: 87, AR300: 86, AR201: 86, AR222: 83, |
| | | | | AR277: 81, AR189: 78, AR242: 78, AR237: 73, AR289: 73, AR231: 71, AR104: 68, AR291: 66, AR195: 66, AR238: 65, AR224: 61, AR230: 60, AR296: 60, |
| | | | | AR226: 59, AR169: 59, AR294: 58, AR171: 55, AR229: 55, AR204: 54, AR033: 53, AR190: 53, AR260: 52, AR295: 52, AR188: 51, AR239: 46, AR225: 46, |
| | | | | AR214: 46, AR232: 43, AR287: 41, AR168: 40, AR191: 40, AR061: 40, AR285: 34, AR221: 32, AR234: 32, AR283: 30, AR227: 27, AR170: 25, AR255: 25, |
| | | | | AR233: 24, AR286: 22, AR236: 21, AR199: 20, AR262: 20, AR258: 20, AR228: 19, AR215: 17, AR200: 17, AR203: 16, AR207: 14, AR223: 14, AR257: 12, |
| | | | | AR196: 12, AR055: 11, AR261: 10, AR235: 4, S6026: 1, S0010: 1, H0399: 1, L0435: 1, L0438: 1 and S0031: 1. |
| 7 | HAGDG59 | 534165 | 17 | AR299: 24, AR251: 24, AR206: 23, AR205: 21, AR248: 20, AR252: 20, AR244: 19, AR039: 18, AR238: 18, AR186: 18, AR254: 16, AR263: 14, AR207: 14, |
| | | | | AR250: 14, AR275: 13, AR249: 13, AR264: 13, AR246: 12, AR181: 12, AR241: 12, AR204: 11, AR274: 11, AR269: 11, AR202: 11, AR185: 10, AR253: 10, |
| | | | | AR243: 10, AR292: 10, AR052: 9, AR265: 9, AR310: 9, AR060: 9, AR309: 9, AR191: 9, AR190: 9, AR273: 8, AR161: 8, AR268: 8, AR316: 8, AR162: 8, |
| | | | | AR270: 8, AR189: 8, AR163: 8, AR240: 8, AR053: 8, AR312: 8, AR089: 8, AR226: 8, AR096: 7, AR033: 7, AR290: 7, AR183: 7, AR237: 7, AR194: 7, AR177: 7, |
| | | | | AR198: 7, AR174: 7, AR313: 7, AR201: 7, AR271: 7, AR104: 7, AR192: 7, AR175: 6, AR272: 6, AR213: 6, AR291: 6, AR239: 6, AR179: 6, AR235: 6, AR165: 6, |
| | | | | AR061: 6, AR296: 6, AR055: 6, AR308: 6, AR164: 5, AR267: 5, AR188: 5, AR284: 5, AR227: 5, AR166: 5, AR298: 5, AR176: 5, AR266: 5, AR178: 5, AR182: 5, |
| | | | | AR234: 5, AR212: 5, AR300: 5, AR277: 5, AR295: 4, AR193: 4, AR282: 4, AR293: 4, AR232: 4, AR229: 4, AR285: 4, AR311: 4, AR196: 4, AR231: 4, AR247: 4, |
| | | | | AR173: 3, AR184: 3, AR245: 3, AR218: 3, AR233: 3, AR283: 3, AR203: 3, AR197: 3, AR289: 3, AR257: 3, AR261: 3, AR294: 3, AR297: 2, AR219: 2, AR242: 2, |
| | | | | AR217: 2, AR288: 2, AR286: 2, AR255: 2, AR195: 2, AR259: 2, AR256: 2, AR200: 2, AR180: 2, AR228: 2, AR210: 2, AR199: 2, AR224: 1, AR211: 1, AR230: 1, |
| | | | | AR236: 1, AR287: 1, S0422: 22, S0408: 9, L0659: 9, S0438: 8, S0354: 6, L0754: 6, S0126: 5, H0543: 5, S0358: 4, S0444: 4, S0406: 4, H0436: 4, L0740: 4, |
| | | | | L0777: 4, H0144: 3, S0374: 3, L0750: 3, L0599: 3, H0170: 2, H0717: 2, H0740: 2, S0360: 2, S0410: 2, H0747: 2, H0749: 2, H0587: 2, H0574: 2, H0486: 2, |
| | | | | H0575: 2, H0036: 2, S0003: 2, H0622: 2, L0475: 2, H0509: 2, L0667: 2, L0771: 2, L0662: 2, L0766: 2, L0804: 2, L0809: 2, L0790: 2, L3667: 2, H0710: 2, L0748: 2, |
| | | | | L0745: 2, L0749: 2, L0731: 2, S0026: 2, H0422: 2, H0171: 1, H0686: 1, S0040: 1, H0716: 1, L0785: 1, L2991: 1, S0212: 1, L0946: 1, S0442: 1, L1446: 1, H0393: 1, |
| | | | | L0717: 1, H0441: 1, H0497: 1, H0427: 1, H0590: 1, S0346: 1, S0474: 1, H0581: 1, H0746: 1, H0050: 1, H0239: 1, H0510: 1, H0266: 1, H0553: 1, H0169: 1, |
| | | | | H0264: 1, H0494: 1, S0450: 1, S0440: 1, H0654: 1, H0652: 1, S0344: 1, H0529: 1, H0026: 1, L0371: 1, L0372: 1, L0764: 1, L0521: 1, L0768: 1, L0649: 1, L0652: 1, |
| | | | | L0653: 1, L0661: 1, L0367: 1, L0663: 1, L0665: 1, S0428: 1, L2258: 1, L2260: 1, H0699: 1, H0547: 1, H0670: 1, H0660: 1, S0330: 1, S0378: 1, H0518: 1, H0521: 1, |
| | | | | H0522: 1, S0028: 1, L0744: 1, L0439: 1, L0751: 1, S0031: 1, S0260: 1, L0581: 1, L0362: 1, H0136: 1, S0276: 1, H0506: 1 and H0721: 1. |
| 8 | HAGDS35 | 1352199 | 18 | AR089: 13, AR299: 12, AR060: 11, AR096: 8, AR055: 7, AR039: 7, AR185: 7, AR283: 6, AR313: 6, AR316: 5, AR309: 5, AR282: 4, AR263: 4, AR240: 4, |
| | | | | AR250: 4, AR218: 4, AR300: 4, AR161: 4, AR162: 4, AR104: 4, AR196: 4, AR163: 4, AR274: 3, AR297: 3, AR277: 3, AR296: 3, AR308: 3, AR293: 3, AR175: 3, |
| | | | | AR287: 3, AR221: 3, AR257: 3, AR291: 3, AR165: 3, AR262: 3, AR285: 3, AR193: 3, AR166: 3, AR197: 3, AR169: 3, AR203: 3, AR254: 3, AR200: 3, AR164: 2, |
| | | | | AR053: 2, AR294: 2, AR243: 2, AR198: 2, AR295: 2, AR229: 2, AR176: 2, AR174: 2, AR188: 2, AR269: 2, AR312: 2, AR231: 2, AR182: 2, AR033: 2, AR219: 2, |
| | | | | AR255: 2, AR225: 2, AR311: 2, AR268: 2, AR201: 2, AR189: 2, AR288: 2, AR272: 2, AR226: 2, AR183: 2, AR181: 2, AR191: 2, AR261: 2, AR258: 2, AR212: 2, |
| | | | | AR190: 2, AR224: 2, AR179: 1, AR210: 1, AR239: 1, AR178: 1, AR204: 1, AR195: 1, AR275: 1, AR177: 1, AR264: 1, AR234: 1, AR247: 1, AR267: 1, AR168: 1, |
| | | | | AR233: 1, AR290: 1, AR286: 1, AR228: 1, AR217: 1, L0748: 8, L0777: 5, H0013: 3, S0356: 2, H0622: 2, L0794: 2, L0803: 2, L0665: 2, L0438: 2, H0436: 2, |
| | | | | L0743: 2, L0740: 2, H0170: 1, S0354: 1, S0376: 1, H0749: 1, H0586: 1, S0010: 1, S6028: 1, H0188: 1, H0616: 1, S0422: 1, L0764: 1, L0521: 1, L0804: 1, L0774: 1, |
| | | | | L0776: 1, L0655: 1, L0659: 1, L5623: 1, H0520: 1, H0435: 1, L0439: 1, L0754: 1, L0747: 1, L0779: 1, L0758: 1, L0759: 1, S0026: 1, H0543: 1 and H0423: 1. |
| | HAGDS35 | 543617 | 348 | |
| 9 | HAGFG51 | 823509 | 19 | AR176: 8, AR250: 6, AR233: 6, AR269: 5, AR223: 5, AR182: 5, AR267: 5, AR228: 5, AR173: 5, AR236: 5, AR237: 5, AR181: 5, AR180: 4, AR196: 4, AR161: 4, |
| | | | | AR162: 4, AR257: 4, AR177: 4, AR229: 4, AR163: 4, AR266: 4, AR239: 4, AR178: 4, AR179: 4, AR183: 4, AR216: 4, AR294: 4, AR270: 4, AR191: 4, AR300: 4, |
| | | | | AR262: 4, AR261: 4, AR175: 4, AR060: 4, AR255: 4, AR199: 4, AR055: 4, AR297: 3, AR235: 3, AR238: 3, AR096: 3, AR234: 3, AR174: 3, AR200: 3, AR291: 3, |
| | | | | AR288: 3, AR231: 3, AR247: 3, AR203: 3, AR293: 3, AR170: 3, AR287: 3, AR168: 3, AR252: 3, AR226: 3, AR215: 3, AR286: 3, AR268: 3, AR258: 3, AR275: 3, |
| | | | | AR290: 3, AR197: 3, AR039: 3, AR299: 3, AR061: 3, AR296: 3, AR230: 3, AR188: 3, AR282: 3, AR240: 3, AR214: 3, AR285: 3, AR171: 3, AR313: 3, AR227: 3, |
| | | | | AR232: 2, AR295: 2, AR311: 2, AR264: 2, AR089: 2, AR190: 2, AR272: 2, AR185: 2, AR289: 2, AR172: 2, AR217: 2, AR192: 2, AR189: 2, AR263: 2, AR316: 2, |
| | | | | AR242: 2, AR210: 2, AR277: 2, AR225: 2, AR271: 2, AR260: 2, AR218: 1, AR256: 1, AR219: 1, AR104: 1, AR033: 1, S0010: 1 |
| 10 | HAIBO71 | 490848 | 20 | AR253: 6, AR263: 4, AR309: 4, AR252: 4, AR228: 4, AR195: 4, AR243: 3, AR169: 3, AR261: 3, AR311: 3, AR254: 3, AR226: 3, AR219: 3, AR213: 3, AR218: 3, |
| | | | | AR205: 3, AR264: 3, AR233: 3, AR297: 3, AR296: 3, AR165: 3, AR288: 3, AR291: 3, AR163: 3, AR275: 3, AR161: 3, AR217: 3, AR166: 3, AR197: 3, AR250: 3, |
| | | | | AR055: 3, AR282: 3, AR236: 3, AR162: 3, AR060: 3, AR164: 3, AR239: 3, AR168: 2, AR207: 2, AR290: 2, AR175: 2, AR293: 2, AR196: 2, AR268: 2, AR271: 2, |
| | | | | AR269: 2, AR215: 2, AR189: 2, AR201: 2, AR266: 2, AR185: 2, AR033: 2, AR183: 2, AR214: 2, AR212: 2, AR191: 2, AR274: 2, AR289: 2, AR270: 2, AR223: 2, |
| | | | | AR177: 2, AR287: 2, AR257: 2, AR272: 2, AR316: 2, AR178: 2, AR295: 2, AR173: 2, AR199: 2, AR277: 2, AR238: 2, AR286: 2, AR312: 2, AR255: 2, AR267: 2, |
| | | | | AR229: 1, AR179: 1, AR200: 1, AR231: 1, AR089: 1, AR096: 1, AR176: 1, AR262: 1, AR313: 1, AR240: 1, AR258: 1, AR285: 1, AR237: 1, AR193: 1, AR230: 1, |
| | | | | AR039: 1, AR190: 1, AR299: 1, AR260: 1, AR104: 1, AR188: 1, AR300: 1, AR225: 1, AR283: 1, AR232: 1, AR308: 1, H0657: 1, S0212: 1, S0360: 1, S0132: 1, |
| | | | | H0628: 1, L0766: 1, L0803: 1, L0776: 1, H0539: 1, L0731: 1 and H0422: 1. |
| 11 | HAIFL18 | 676933 | 21 | AR052: 33, AR259: 29, AR184: 29, AR292: 27, AR249: 26, AR310: 25, AR309: 22, AR265: 21, AR298: 20, AR314: 20, AR313: 19, AR315: 18, AR284: 18, |
| | | | | AR280: 18, AR269: 17, AR293: 17, AR312: 16, AR247: 15, AR229: 15, AR218: 15, AR294: 14, AR061: 14, AR183: 14, AR219: 14, AR039: 14, AR258: 14, |
| | | | | AR233: 14, AR227: 13, AR226: 13, AR033: 13, AR182: 13, AR248: 13, AR281: 13, AR186: 13, AR300: 13, AR231: 12, AR237: 12, AR175: 12, AR266: 12, |
| | | | | AR096: 12, AR238: 12, AR296: 11, AR267: 11, AR299: 11, AR053: 11, AR295: 11, AR270: 11, AR285: 11, AR055: 10, AR290: 10, AR286: 10, AR232: 10, |
| | | | | AR283: 10, AR213: 10, AR256: 10, AR177: 10, AR282: 10, AR185: 9, AR234: 9, AR291: 9, AR268: 9, AR263: 8, AR289: 8, AR316: 8, AR273: 8, AR089: 7, |
| | | | | AR104: 6, AR179: 6, AR251: 6, AR194: 6, AR277: 5, AR245: 5, AR240: 4, AR253: 4, AR060: 4, AR271: 4, AR206: 4, AR192: 3, AR274: 3, AR198: 3, AR170: 2, |
| | | | | AR275: 2, AR168: 2, AR205: 2, AR225: 2, AR178: 2, AR204: 2, AR216: 2, AR172: 2, AR243: 2, AR217: 1, AR241: 1, AR214: 1, AR287: 1, AR288: 1, AR224: 1, |
| | | | | AR193: 1, AR162: 1, H0265: 1, H0159: 1, S0132: 1, H0574: 1, H0075: 1, T0042: 1, H0509: 1 and S0434: 1. |
| 12 | HAJAF57 | 823516 | 22 | AR254: 4, AR171: 3, AR207: 3, AR170: 3, AR169: 3, AR053: 3, AR213: 2, AR225: 2, AR271: 2, AR165: 2, AR198: 2, AR201: 2, AR166: 2, AR176: 2, AR264: 2, |
| | | | | AR282: 2, AR272: 2, AR089: 2, AR297: 2, AR288: 2, AR257: 2, AR188: 2, AR224: 2, AR175: 1, AR163: 1, AR283: 1, AR196: 1, AR162: 1, AR246: 1, AR308: 1, |
| | | | | AR226: 1, AR161: 1, AR193: 1, AR164: 1, AR183: 1, AR285: 1, AR173: 1, AR286: 1, AR255: 1, H0561: 1 |
| 13 | HAJAN23 | 1352364 | 23 | AR192: 7, AR169: 6, AR207: 6, AR170: 6, AR168: 5, AR214: 5, AR161: 5, AR162: 5, AR165: 5, AR172: 5, AR163: 5, AR223: 5, AR311: 5, AR195: 5, AR164: 5, |
| | | | | AR166: 5, AR196: 5, AR224: 4, AR222: 4, AR171: 4, AR217: 4, AR264: 4, AR308: 4, AR216: 4, AR277: 4, AR282: 4, AR271: 4, AR291: 4, AR213: 4, AR197: 4, |
| | | | | AR193: 3, AR235: 3, AR309: 3, AR212: 3, AR205: 3, AR283: 3, AR250: 3, AR253: 3, AR261: 3, AR225: 3, AR188: 3, AR089: 3, AR245: 3, AR316: 3, AR312: 3, |
| | | | | AR299: 3, AR215: 3, AR177: 3, AR055: 3, AR247: 3, AR268: 2, AR295: 2, AR288: 2, AR221: 2, AR313: 2, AR199: 2, AR262: 2, AR033: 2, AR230: 2, AR285: 2, |
| | | | | AR039: 2, AR297: 2, AR229: 2, AR198: 2, AR300: 2, AR257: 2, AR286: 2, AR287: 2, AR104: 2, AR274: 2, AR060: 2, AR173: 2, AR246: 2, AR272: 2, AR096: 2, |
| | | | | AR227: 2, AR232: 2, AR237: 2, AR176: 2, AR182: 2, AR226: 2, AR185: 2, AR238: 2, AR266: 2, AR181: 2, AR240: 2, AR231: 2, AR211: 2, AR258: 2, AR289: 2, |
| | | | | AR191: 2, AR239: 2, AR175: 1, AR189: 1, AR270: 1, AR219: 1, AR234: 1, AR061: 1, AR183: 1, AR200: 1, AR263: 1, AR203: 1, AR228: 1, AR236: 1, AR296: 1, |
| | | | | AR201: 1, AR210: 1, S0408: 2, H0619: 2, S0438: 2, L0803: 2, L0804: 2, L3643: 1, H0686: 1, H0650: 1, H0730: 1, T0110: 1, H0233: 1, S0003: 1, H0674: 1, |
| | | | | H0623: 1, H0561: 1, H0509: 1, S0422: 1, L0770: 1, L0766: 1, L0518: 1, L5622: 1, S0374: 1, H0593: 1, H0555: 1, L0748: 1 and L0755: 1. |
| | HAJAN23 | 872551 | 349 | |
| 14 | HAJBR69 | 638516 | 24 | AR309: 4, AR242: 3, AR217: 3, AR235: 3, AR225: 3, AR170: 2, AR252: 2, AR263: 2, AR180: 2, AR171: 2, AR282: 2, AR221: 2, AR197: 2, AR200: 2, AR196: 2, |
| | | | | AR308: 2, AR277: 2, AR165: 1, AR164: 1, AR215: 1, AR192: 1, AR166: 1, AR268: 1, AR168: 1, AR211: 1, AR207: 1, AR283: 1, AR216: 1, AR204: 1, AR311: 1, |
| | | | | AR240: 1, AR182: 1, S0040: 4, T0010: 4, H0560: 4, L0794: 4, S0420: 3, L0455: 3, L3905: 3, H0656: 2, S0212: 2, H0619: 2, H0497: 2, H0052: 2, H0012: 2, |
| | | | | H0429: 2, L0766: 2, L5623: 2, L0439: 2, H0665: 2, H0556: 1, H0717: 1, H0650: 1, S0418: 1, H0580: 1, H0728: 1, H0735: 1, H0734: 1, H0370: 1, H0392: 1, |
| | | | | H0333: 1, H0013: 1, H0635: 1, H0505: 1, H0581: 1, H0569: 1, H0050: 1, H0373: 1, S0250: 1, S0022: 1, H0553: 1, L0370: 1, H0561: 1, L2263: 1, L2261: 1, |
| | | | | H0520: 1, H0593: 1, S0126: 1, H0435: 1, H0518: 1, H0521: 1, H0626: 1, L0748: 1, S0436: 1, L0591: 1, H0542: 1, S0424: 1 and H0677: 1. |
| 15 | HAMFE15 | 905695 | 25 | AR235: 3, AR275: 3, AR221: 3, AR282: 2, AR207: 2, AR291: 2, AR180: 2, AR286: 2, AR173: 2, AR178: 2, AR225: 2, AR243: 2, AR272: 1, AR176: 1, AR181: 1, |
| | | | | AR163: 1, AR161: 1, AR285: 1, AR168: 1, AR257: 1, AR277: 1, AR261: 1, AR191: 1, AR311: 1, AR196: 1, AR216: 1, AR296: 1, AR297: 1, AR269: 1, AR169: 1, |
| | | | | AR266: 1, AR247: 1, AR199: 1, AR175: 1, L0748: 10, L0754: 9, L0731: 9, L0766: 8, L0439: 7, L0803: 6, H0624: 5, L0759: 5, S0356: 4, H0486: 4, H0090: 4, |
| | | | | L0789: 4, L0438: 4, L0740: 4, L0749: 4, L0756: 4, L0777: 4, L0599: 4, S0360: 3, H0013: 3, S0003: 3, L0369: 3, L0794: 3, L0659: 3, L0809: 3, L0665: 3, H0539: 3, |
| | | | | L0362: 3, S0114: 2, S0358: 2, S0278: 2, H0441: 2, H0586: 2, H0333: 2, H0581: 2, H0328: 2, H0553: 2, H0529: 2, L0770: 2, L0662: 2, L0804: 2, L0666: 2, L0663: 2, |
| | | | | H0547: 2, H0519: 2, H0659: 2, H0670: 2, S0330: 2, L0747: 2, L0750: 2, L0755: 2, L0758: 2, L0589: 2, L0592: 2, L0581: 2, L0593: 2, S0276: 2, S0424: 2, H0170: 1, |
| | | | | H0171: 1, S0040: 1, S0116: 1, H0664: 1, H0458: 1, H0638: 1, H0192: 1, S0418: 1, S0354: 1, S0410: 1, H0580: 1, S0046: 1, H0393: 1, L0717: 1, H0411: 1, S6022: 1, |
| | | | | S0222: 1, H0587: 1, T0114: 1, L0021: 1, H0318: 1, H0421: 1, H0052: 1, H0251: 1, H0544: 1, H0572: 1, H0566: 1, L0471: 1, H0057: 1, H0051: 1, H0510: 1, |
| | | | | S6028: 1, H0271: 1, S0334: 1, H0622: 1, S0368: 1, H0031: 1, L0142: 1, H0032: 1, H0124: 1, H0316: 1, H0591: 1, H0616: 1, L0060: 1, H0551: 1, H0264: 1, |
| | | | | H0412: 1, H0413: 1, L0564: 1, H0560: 1, S0150: 1, H0646: 1, S0144: 1, H0538: 1, L0598: 1, L0638: 1, L0372: 1, L0764: 1, L0771: 1, L0521: 1, L0650: 1, L0805: 1, |
| | | | | L0655: 1, L0656: 1, L0664: 1, H0144: 1, S0374: 1, H0691: 1, H0520: 1, H0689: 1, H0658: 1, H0672: 1, S0152: 1, S0332: 1, H0521: 1, H0134: 1, H0631: 1, S0206: 1, |
| | | | | L0751: 1, L0779: 1, L0753: 1, H0445: 1, S0394: 1, L0608: 1, S0026: 1, H0653: 1, H0665: 1, S0242: 1, S0194: 1, H0542: 1, H0423: 1 and H0422: 1. |
| | HAMFE15 | 823350 | 350 | |
| 16 | HAMGG68 | 731859 | 26 | AR313: 34, AR275: 32, AR104: 32, AR165: 29, AR039: 27, AR033: 27, AR164: 27, AR196: 26, AR161: 25, AR162: 24, AR089: 24, AR163: 23, AR271: 23, |
| | | | | AR096: 22, AR240: 21, AR312: 21, AR174: 20, AR250: 20, AR205: 19, AR180: 19, AR264: 19, AR282: 18, AR175: 18, AR185: 18, AR183: 18, AR179: 18, |
| | | | | AR269: 18, AR238: 18, AR193: 18, AR308: 17, AR300: 17, AR182: 17, AR173: 17, AR270: 17, AR192: 17, AR247: 16, AR191: 16, AR198: 16, AR299: 16, |
| | | | | AR242: 16, AR268: 16, AR188: 16, AR309: 16, AR311: 15, AR211: 15, AR219: 15, AR207: 14, AR178: 14, AR316: 14, AR212: 14, AR060: 14, AR285: 14, |
| | | | | AR201: 14, AR213: 14, AR199: 14, AR218: 14, AR181: 14, AR189: 13, AR295: 13, AR258: 13, AR262: 13, AR290: 13, AR229: 13, AR254: 12, AR177: 12, |
| | | | | AR195: 12, AR176: 12, AR171: 12, AR168: 12, AR234: 12, AR231: 12, AR263: 12, AR296: 12, AR291: 12, AR253: 12, AR257: 12, AR169: 11, AR226: 11, |
| | | | | AR172: 11, AR210: 11, AR288: 11, AR245: 11, AR246: 11, AR053: 11, AR252: 10, AR197: 10, AR235: 10, AR203: 10, AR190: 10, AR221: 10, AR260: 10, |
| | | | | AR297: 10, AR293: 10, AR236: 10, AR287: 10, AR294: 10, AR274: 9, AR277: 9, AR223: 9, AR224: 9, AR225: 9, AR233: 9, AR272: 9, AR216: 9, AR255: 9, |
| | | | | AR261: 9, AR215: 9, AR200: 9, AR267: 9, AR214: 8, AR237: 8, AR286: 8, AR170: 8, AR239: 8, AR217: 8, AR243: 8, AR232: 8, AR230: 8, AR266: 8, AR222: 7, |
| | | | | AR256: 7, AR204: 6, AR228: 6, AR289: 6, AR283: 6, AR227: 6, AR055: 4, AR061: 4, L0805: 7, L0666: 3, L0439: 3, H0052: 2, L0773: 2, L0794: 2, L0740: 2, |
| | | | | L0779: 2, H0685: 1, S0418: 1, L3388: 1, S0222: 1, H0050: 1, H0320: 1, H0252: 1, H0030: 1, H0059: 1, H0560: 1, H0773: 1, L3815: 1, L0520: 1, L0770: 1, L0646: 1, |
| | | | | L0771: 1, L0662: 1, L0363: 1, L0803: 1, L0774: 1, L0375: 1, L0776: 1, L0655: 1, L0659: 1, H0670: 1, S0378: 1, H0753: 1, S0406: 1, L0748: 1, L0757: 1, L0758: 1, |
| | | | | S0436: 1, L0597: 1, L0591: 1, L0366: 1 and S0412: 1. |
| 17 | HAMGR28 | 892971 | 27 | AR271: 8, AR184: 7, AR060: 7, AR240: 6, AR089: 6, AR219: 5, AR104: 5, AR183: 5, AR282: 5, AR052: 5, AR275: 5, AR266: 5, AR316: 5, AR274: 5, AR249: 5, |
| | | | | AR192: 4, AR053: 4, AR267: 4, AR096: 4, AR247: 4, AR277: 4, AR309: 4, AR312: 4, AR283: 4, AR248: 4, AR253: 4, AR186: 4, AR182: 4, AR185: 4, AR238: 4, |
| | | | | AR299: 4, AR310: 3, AR289: 3, AR285: 3, AR313: 3, AR213: 3, AR218: 3, AR291: 3, AR241: 3, AR039: 3, AR251: 3, AR286: 3, AR033: 3, AR256: 3, AR061: 3, |
| | | | | AR292: 3, AR234: 3, AR258: 3, AR202: 3, AR231: 3, AR268: 3, AR295: 3, AR294: 3, AR293: 3, AR300: 3, AR055: 3, AR243: 3, AR315: 3, AR198: 2, AR296: 2, |
| | | | | AR270: 2, AR284: 2, AR259: 2, AR298: 2, AR290: 2, AR226: 2, AR237: 2, AR233: 2, AR273: 2, AR269: 2, AR229: 2, AR206: 2, AR232: 2, AR227: 1, AR314: 1, |
| | | | | AR179: 1, AR175: 1, L0666: 11, H0046: 9, H0556: 5, L0809: 5, L0747: 4, L0770: 3, L0769: 3, L0783: 3, H0520: 3, L0439: 3, L0731: 3, H0664: 2, S0045: 2, |
| | | | | H0123: 2, H0424: 2, L0637: 2, L0775: 2, S0328: 2, S0146: 2, L0777: 2, L0601: 2, H0542: 2, L0411: 1, H0265: 1, H0740: 1, H0294: 1, H0583: 1, H0650: 1, H0662: 1, |
| | | | | S0420: 1, S0444: 1, H0637: 1, H0735: 1, S0476: 1, S0278: 1, H0370: 1, H0586: 1, H0587: 1, H0497: 1, H0486: 1, H0013: 1, H0069: 1, H0575: 1, H0253: 1, |
| | | | | H0581: 1, H0251: 1, H0150: 1, T0010: 1, H0083: 1, H0239: 1, H0594: 1, H0288: 1, H0290: 1, H0604: 1, H0553: 1, H0040: 1, H0087: 1, H0494: 1, H0560: 1, |
| | | | | L0065: 1, S0438: 1, S0440: 1, H0641: 1, H0633: 1, H0646: 1, L3815: 1, S0422: 1, S0002: 1, H0529: 1, L0763: 1, L0646: 1, L0800: 1, L0764: 1, L0767: 1, L0649: 1, |
| | | | | L0803: 1, L0806: 1, L0653: 1, L0659: 1, L0518: 1, L0789: 1, L0791: 1, S0053: 1, H0144: 1, H0701: 1, H0725: 1, S0148: 1, L0438: 1, H0519: 1, H0593: 1, S0406: 1, |
| | | | | L0748: 1, L0745: 1, L0749: 1, L0750: 1, L0779: 1, L0752: 1, L0758: 1, S0031: 1, S0436: 1, S0460: 1 and L0600: 1. |
| | HAMGR28 | 748223 | 351 | |
| 18 | HAPOM49 | 769555 | 28 | AR089: 5, AR169: 5, AR060: 5, AR282: 4, AR283: 4, AR055: 3, AR218: 3, AR096: 3, AR171: 3, AR104: 3, AR277: 3, AR313: 3, AR217: 3, AR039: 2, AR240: 2, |
| | | | | AR316: 2, AR221: 2, AR163: 2, AR180: 2, AR183: 2, AR170: 2, AR172: 2, AR165: 2, AR299: 2, AR166: 2, AR242: 2, AR195: 2, AR168: 2, AR300: 2, AR275: 2, |
| | | | | AR162: 2, AR164: 1, AR216: 1, AR193: 1, AR205: 1, AR264: 1, AR185: 1, AR173: 1, AR266: 1, AR161: 1, AR272: 1, AR214: 1, AR257: 1, AR196: 1, AR270: 1, |
| | | | | AR268: 1, AR289: 1, AR245: 1, AR312: 1, AR223: 1, AR212: 1, AR261: 1, AR219: 1, AR297: 1, AR192: 1, S0406: 5, L0750: 5, L0777: 4, L0749: 3, L0779: 3, |
| | | | | H0662: 2, S0440: 2, L0770: 2, L0794: 2, L0776: 2, L0657: 2, L0783: 2, L0740: 2, L0747: 2, L0780: 2, S0420: 1, S0442: 1, S0444: 1, S0045: 1, L3316: 1, H0599: 1, |
| | | | | H0575: 1, S0474: 1, T0115: 1, H0083: 1, H0510: 1, H0644: 1, H0551: 1, S0386: 1, H0494: 1, H0561: 1, H0538: 1, S0422: 1, L0646: 1, L0804: 1, L0774: 1, L0809: 1, |
| | | | | L0530: 1, L0663: 1, L0664: 1, L0665: 1, H0593: 1, S0380: 1, S0027: 1, L0748: 1, L0439: 1, L0756: 1, L0755: 1, L0758: 1, L0485: 1, H0542: 1 and H0423: 1. |
| | HAPOM49 | 722386 | 352 | |
| 19 | HAPPW30 | 1352278 | 29 | AR174: 24, AR235: 23, AR196: 23, AR177: 22, AR191: 19, AR175: 19, AR233: 19, AR288: 19, AR179: 18, AR190: 17, AR203: 17, AR257: 17, AR178: 17, |
| | | | | AR182: 17, AR188: 17, AR060: 17, AR176: 17, AR181: 16, AR295: 16, AR261: 16, AR236: 16, AR185: 15, AR287: 15, AR255: 15, AR161: 15, AR162: 15, |
| | | | | AR163: 15, AR199: 14, AR286: 14, AR033: 14, AR165: 14, AR260: 14, AR285: 14, AR294: 14, AR231: 14, AR164: 14, AR258: 14, AR104: 14, AR061: 13, |
| | | | | AR267: 13, AR293: 13, AR238: 13, AR166: 13, AR226: 13, AR189: 13, AR232: 13, AR269: 13, AR291: 13, AR262: 12, AR173: 12, AR200: 12, AR240: 12, |
| | | | | AR247: 12, AR299: 12, AR230: 12, AR282: 11, AR270: 11, AR227: 11, AR296: 11, AR234: 11, AR055: 11, AR300: 11, AR228: 11, AR089: 11, AR316: 11, |
| | | | | AR275: 10, AR297: 10, AR211: 10, AR289: 10, AR239: 9, AR274: 9, AR183: 9, AR268: 9, AR237: 9, AR180: 9, AR229: 9, AR308: 8, AR266: 8, AR256: 8, |
| | | | | AR201: 8, AR309: 7, AR290: 7, AR311: 7, AR225: 7, AR193: 7, AR277: 7, AR242: 7, AR169: 7, AR263: 7, AR213: 6, AR264: 6, AR171: 6, AR272: 6, AR039: 6, |
| | | | | AR223: 6, AR170: 5, AR224: 5, AR210: 5, AR312: 5, AR053: 5, AR168: 5, AR096: 5, AR216: 5, AR195: 5, AR219: 5, AR245: 5, AR218: 5, AR253: 5, AR214: 5, |
| | | | | AR283: 5, AR222: 5, AR313: 4, AR246: 4, AR172: 4, AR217: 4, AR212: 4, AR250: 4, AR215: 4, AR221: 3, AR205: 3, AR197: 3, AR243: 3, AR254: 3, AR198: 2, |
| | | | | AR271: 2, AR192: 1, L0748: 12, S0474: 5, L0777: 5, L0758: 5, H0424: 4, H0038: 4, L0752: 4, L0774: 3, L0742: 3, L0779: 3, L0755: 3, H0616: 2, L0770: 2, |
| | | | | L0764: 2, L0776: 2, H0539: 2, L0753: 2, L0599: 2, H0663: 1, H0722: 1, H0728: 1, H0208: 1, S0045: 1, L3388: 1, L3484: 1, L3491: 1, T0040: 1, H0575: 1, S0010: 1, |
| | | | | S0049: 1, H0052: 1, H0545: 1, H0009: 1, H0103: 1, H0012: 1, L0163: 1, H0266: 1, H0188: 1, H0292: 1, H0213: 1, H0169: 1, H0388: 1, H0708: 1, H0135: 1, |
| | | | | H0412: 1, T0041: 1, T0042: 1, H0538: 1, L0769: 1, L0638: 1, L0772: 1, L0767: 1, L0775: 1, L0809: 1, L0665: 1, L2263: 1, H0547: 1, H0672: 1, H0521: 1, S0392: 1, |
| | | | | S0027: 1, L0747: 1, L0786: 1, L0731: 1, L0757: 1, L0759: 1, L0591: 1 and H0653: 1. |
| | HAPPW30 | 684272 | 353 | |
| 20 | HATBR65 | 635514 | 30 | AR313: 46, AR173: 29, AR258: 29, AR096: 29, AR229: 29, AR300: 26, AR218: 26, AR240: 26, AR247: 26, AR214: 26, AR196: 24, AR223: 23, AR175: 23, |
| | | | | AR257: 22, AR174: 22, AR178: 22, AR165: 21, AR217: 21, AR162: 21, AR183: 21, AR161: 21, AR089: 21, AR293: 20, AR163: 20, AR264: 20, AR164: 20, |
| | | | | AR033: 20, AR309: 20, AR216: 19, AR181: 19, AR262: 19, AR166: 19, AR185: 19, AR299: 19, AR180: 18, AR312: 18, AR179: 18, AR238: 18, AR290: 18, |
| | | | | AR297: 18, AR189: 18, AR188: 18, AR269: 17, AR270: 17, AR199: 17, AR294: 17, AR261: 16, AR224: 16, AR191: 16, AR316: 16, AR285: 16, AR225: 16, |
| | | | | AR203: 16, AR235: 15, AR182: 15, AR263: 15, AR219: 15, AR177: 15, AR212: 15, AR274: 14, AR236: 14, AR226: 14, AR234: 14, AR053: 14, AR231: 14, |
| | | | | AR287: 14, AR233: 14, AR296: 14, AR275: 14, AR176: 14, AR193: 14, AR171: 13, AR286: 13, AR282: 13, AR267: 13, AR255: 13, AR210: 13, AR268: 13, |
| | | | | AR308: 13, AR190: 13, AR060: 13, AR291: 13, AR222: 13, AR260: 13, AR200: 12, AR104: 12, AR211: 12, AR237: 12, AR295: 11, AR266: 11, AR252: 11, |
| | | | | AR213: 11, AR168: 11, AR288: 11, AR254: 11, AR215: 11, AR228: 11, AR221: 10, AR272: 10, AR230: 10, AR250: 10, AR204: 10, AR039: 10, AR242: 10, |
| | | | | AR239: 9, AR245: 9, AR289: 9, AR195: 9, AR256: 9, AR170: 9, AR169: 9, AR172: 9, AR283: 9, AR246: 8, AR205: 8, AR227: 8, AR198: 8, AR277: 8, AR271: 8, |
| | | | | AR311: 8, AR192: 8, AR197: 8, AR243: 7, AR253: 7, AR201: 7, AR232: 6, AR207: 6, AR061: 5, AR055: 5, L0534: 4, L0562: 3, L0527: 3, H0254: 2, S0045: 2, |
| | | | | H0156: 2, L0589: 2, H0255: 1, H0402: 1, L0539: 1, T0060: 1, H0328: 1, H0615: 1, H0598: 1, H0264: 1, L0766: 1, L0493: 1, L0666: 1, S0052: 1, H0539: 1, L0747: 1, |
| | | | | L0752: 1 and L0366: 1. |
| 21 | HATCB92 | 603948 | 31 | AR242: 8, AR245: 5, AR170: 5, AR161: 5, AR162: 5, AR163: 5, AR309: 5, AR204: 4, AR205: 4, AR053: 4, AR275: 4, AR165: 4, AR164: 4, AR177: 4, AR193: 4, |
| | | | | AR271: 4, AR166: 3, AR282: 3, AR270: 3, AR243: 3, AR235: 3, AR233: 3, AR168: 3, AR197: 3, AR089: 3, AR311: 3, AR192: 3, AR207: 3, AR300: 3, AR183: 3, |
| | | | | AR171: 3, AR252: 3, AR274: 3, AR228: 3, AR174: 2, AR201: 2, AR198: 2, AR312: 2, AR239: 2, AR061: 2, AR264: 2, AR185: 2, AR299: 2, AR229: 2, AR096: 2, |
| | | | | AR297: 2, AR308: 2, AR039: 2, AR182: 2, AR277: 2, AR293: 2, AR231: 2, AR178: 2, AR313: 2, AR195: 2, AR230: 2, AR266: 2, AR316: 2, AR060: 2, AR240: 2, |
| | | | | AR176: 2, AR272: 2, AR172: 2, AR289: 2, AR267: 1, AR283: 1, AR223: 1, AR247: 1, AR181: 1, AR257: 1, AR261: 1, AR238: 1, AR234: 1, AR269: 1, AR290: 1, |
| | | | | AR226: 1, AR199: 1, AR262: 1, AR217: 1, AR287: 1, AR294: 1, AR268: 1, AR210: 1, H0156: 1 |
| 22 | HATEE46 | 565618 | 32 | AR296: 15, AR266: 6, AR176: 6, AR291: 6, AR289: 6, AR255: 5, AR257: 5, AR183: 5, AR182: 5, AR269: 5, AR252: 4, AR253: 4, AR290: 4, AR294: 4, AR309: 4, |
| | | | | AR297: 4, AR178: 3, AR060: 3, AR055: 3, AR221: 3, AR175: 3, AR288: 3, AR270: 3, AR181: 3, AR177: 3, AR256: 3, AR260: 3, AR267: 3, AR293: 3, AR286: 3, |
| | | | | AR268: 3, AR223: 3, AR287: 3, AR272: 3, AR162: 3, AR224: 3, AR238: 3, AR262: 3, AR165: 3, AR173: 3, AR161: 3, AR295: 3, AR179: 3, AR163: 3, AR277: 3, |
| | | | | AR164: 3, AR217: 3, AR166: 2, AR299: 2, AR258: 2, AR205: 2, AR236: 2, AR243: 2, AR228: 2, AR226: 2, AR229: 2, AR168: 2, AR285: 2, AR191: 2, AR283: 2, |
| | | | | AR231: 2, AR300: 2, AR174: 2, AR172: 2, AR204: 2, AR201: 2, AR104: 2, AR214: 2, AR239: 2, AR233: 2, AR089: 2, AR200: 2, AR246: 2, AR316: 2, AR190: 2, |
| | | | | AR237: 2, AR240: 2, AR271: 2, AR312: 1, AR264: 1, AR189: 1, AR096: 1, AR213: 1, AR196: 1, AR215: 1, AR199: 1, AR218: 1, AR170: 1, AR203: 1, AR313: 1, |
| | | | | AR033: 1, AR247: 1, AR039: 1, AR180: 1, AR242: 1, AR282: 1, AR311: 1, AR235: 1, AR185: 1, AR061: 1, AR211: 1, L0731: 3, L0662: 2, S0212: 1, S0418: 1, |
| | | | | S0358: 1, H0734: 1, H0411: 1, H0486: 1, H0156: 1, H0266: 1, S0022: 1, H0551: 1, T0041: 1, L0640: 1, L0641: 1, L0804: 1, L0805: 1, L0776: 1, L0659: 1, L0517: 1, |
| | | | | L0790: 1, H0520: 1, S0126: 1, S3014: 1, L0740: 1, L0747: 1, L0750: 1, L0756: 1, L0752: 1, L0759: 1, L0599: 1 and S0026: 1. |
| 23 | HAUA183 | 639009 | 33 | H0294: 2 |
| | HAUA183 | 383592 | 354 | |
| 24 | HBAMB15 | 671835 | 34 | AR245: 4, AR213: 3, AR176: 3, AR224: 3, AR252: 3, AR168: 3, AR165: 2, AR164: 2, AR183: 2, AR197: 2, AR204: 2, AR238: 2, AR266: 2, AR282: 2, AR162: 2, |
| | | | | AR171: 2, AR271: 2, AR289: 2, AR270: 2, AR291: 2, AR205: 2, AR274: 2, AR096: 2, AR268: 2, AR297: 2, AR296: 2, AR225: 2, AR161: 1, AR311: 1, AR192: 1, |
| | | | | AR269: 1, AR261: 1, AR179: 1, AR182: 1, AR234: 1, AR191: 1, AR277: 1, AR181: 1, AR237: 1, AR313: 1, AR300: 1, AR089: 1, H0410: 1, H0530: 1, H0328: 1, |
| | | | | L0455: 1 and L0740: 1. |
| 25 | HBGBA69 | 1352289 | 35 | AR196: 22, AR089: 21, AR275: 21, AR188: 20, AR240: 19, AR096: 19, AR177: 18, AR060: 18, AR104: 18, AR282: 18, AR269: 17, AR238: 17, AR195: 17, |
| | | | | AR176: 17, AR189: 16, AR199: 15, AR283: 15, AR185: 15, AR183: 15, AR244: 15, AR218: 15, AR219: 15, AR186: 14, AR299: 14, AR248: 14, AR247: 14, |
| | | | | AR211: 14, AR197: 14, AR173: 14, AR254: 14, AR174: 14, AR268: 14, AR310: 13, AR290: 13, AR203: 13, AR052: 13, AR289: 13, AR033: 13, AR191: 13, |
| | | | | AR316: 13, AR165: 13, AR300: 13, AR055: 13, AR164: 12, AR266: 12, AR243: 12, AR249: 12, AR271: 12, AR190: 12, AR166: 12, AR273: 12, AR270: 12, |
| | | | | AR241: 12, AR178: 12, AR253: 12, AR061: 12, AR175: 12, AR232: 12, AR246: 11, AR181: 11, AR267: 11, AR313: 11, AR261: 11, AR274: 11, AR239: 11, |
| | | | | AR198: 11, AR182: 11, AR250: 11, AR309: 10, AR280: 10, AR200: 10, AR234: 10, AR229: 10, AR180: 10, AR291: 10, AR184: 10, AR255: 10, AR272: 10, |
| | | | | AR235: 10, AR245: 10, AR192: 9, AR161: 9, AR296: 9, AR039: 9, AR221: 9, AR231: 9, AR163: 9, AR251: 9, AR201: 9, AR257: 9, AR236: 9, AR204: 9, |
| | | | | AR162: 9, AR233: 9, AR216: 8, AR210: 8, AR215: 8, AR295: 8, AR315: 8, AR314: 8, AR265: 8, AR284: 8, AR228: 8, AR312: 8, AR277: 8, AR286: 8, AR213: 8, |
| | | | | AR194: 8, AR288: 8, AR226: 8, AR298: 8, AR242: 8, AR256: 7, AR227: 7, AR193: 7, AR217: 7, AR262: 7, AR053: 7, AR264: 7, AR179: 7, AR224: 7, AR237: 6, |
| | | | | AR202: 6, AR293: 6, AR230: 6, AR214: 6, AR297: 6, AR287: 6, AR205: 6, AR292: 6, AR285: 6, AR258: 6, AR263: 6, AR294: 6, AR225: 6, AR281: 6, AR212: 5, |
| | | | | AR170: 5, AR206: 5, AR308: 5, AR172: 5, AR222: 5, AR259: 5, AR169: 4, AR260: 4, AR171: 4, AR252: 4, AR207: 3, AR311: 3, AR168: 2, AR223: 2, S0474: 13, |
| | | | | L0747: 7, S0410: 6, H0617: 5, L0777: 5, H0618: 4, H0521: 4, H0661: 3, H0663: 3, S0360: 3, H0052: 3, H0545: 3, H0038: 3, L0766: 3, S0380: 3, L0740: 3, L0751: 3, |
| | | | | L0757: 3, H0653: 3, S0358: 2, H0733: 2, L0717: 2, S0278: 2, H0318: 2, H0309: 2, H0327: 2, H0150: 2, H0687: 2, H0181: 2, H0413: 2, H0509: 2, L0769: 2, |
| | | | | L0764: 2, L0771: 2, L0662: 2, L0768: 2, L0774: 2, L0776: 2, L5622: 2, L0666: 2, L0663: 2, L2261: 2, S0126: 2, H0658: 2, S0406: 2, L0744: 2, L0758: 2, L0588: 2, |
| | | | | L3643: 1, S0342: 1, H0713: 1, H0740: 1, T0049: 1, H0657: 1, S0116: 1, S0282: 1, H0255: 1, H0402: 1, H0638: 1, S0418: 1, S0420: 1, S0442: 1, S0444: 1, S0408: 1, |
| | | | | H0730: 1, H0741: 1, H0735: 1, H0776: 1, S0300: 1, L3388: 1, H0370: 1, H0592: 1, H0643: 1, L0623: 1, H0156: 1, L0021: 1, H0253: 1, H0263: 1, L0738: 1, |
| | | | | H0530: 1, H0571: 1, H0081: 1, H0578: 1, H0083: 1, H0266: 1, H0039: 1, H0604: 1, H0031: 1, H0616: 1, H0087: 1, T0004: 1, H0494: 1, S0438: 1, S0142: 1, |
| | | | | H0743: 1, H0529: 1, L0763: 1, L0796: 1, L0761: 1, L0645: 1, L0773: 1, L0364: 1, L0561: 1, L0650: 1, L0651: 1, L0653: 1, L0655: 1, L0661: 1, L0629: 1, L0657: 1, |
| | | | | L0658: 1, L4669: 1, L2258: 1, H0725: 1, H0519: 1, H0670: 1, H0672: 1, H0518: 1, S0044: 1, H0555: 1, H0436: 1, S3014: 1, L0439: 1, L0749: 1, L0731: 1, L0759: 1, |
| | | | | S0260: 1, H0445: 1, S0434: 1, S0196: 1, H0423: 1 and H0506: 1. |
| | HBGBA69 | 709658 | 355 | |
| 26 | HBIAE26 | 514418 | 36 | AR161: 11, AR162: 11, AR163: 11, AR313: 9, AR242: 8, AR165: 8, AR039: 7, AR164: 7, AR166: 7, AR207: 6, AR201: 6, AR204: 6, AR089: 6, AR096: 6, |
| | | | | AR197: 6, AR309: 6, AR053: 5, AR193: 5, AR264: 5, AR299: 5, AR060: 5, AR182: 5, AR173: 5, AR185: 5, AR198: 5, AR236: 5, AR300: 5, AR181: 5, AR228: 5, |
| | | | | AR271: 5, AR176: 5, AR277: 5, AR055: 5, AR262: 5, AR196: 5, AR247: 5, AR250: 4, AR258: 4, AR312: 4, AR257: 4, AR175: 4, AR229: 4, AR178: 4, AR179: 4, |
| | | | | AR316: 4, AR293: 4, AR269: 4, AR274: 4, AR240: 4, AR261: 4, AR246: 4, AR104: 4, AR266: 4, AR177: 4, AR191: 4, AR233: 4, AR275: 4, AR192: 4, AR268: 4, |
| | | | | AR183: 4, AR213: 4, AR205: 4, AR231: 4, AR297: 4, AR288: 4, AR174: 3, AR212: 3, AR294: 3, AR270: 3, AR267: 3, AR238: 3, AR180: 3, AR215: 3, AR255: 3, |
| | | | | AR245: 3, AR199: 3, AR287: 3, AR226: 3, AR296: 3, AR234: 3, AR203: 3, AR218: 3, AR285: 3, AR282: 3, AR311: 3, AR195: 3, AR200: 3, AR239: 3, AR283: 3, |
| | | | | AR263: 3, AR217: 3, AR222: 3, AR272: 3, AR291: 3, AR237: 3, AR033: 3, AR290: 3, AR188: 3, AR243: 3, AR253: 3, AR189: 3, AR225: 3, AR295: 3, AR230: 3, |
| | | | | AR170: 3, AR061: 2, AR219: 2, AR286: 2, AR308: 2, AR227: 2, AR256: 2, AR232: 2, AR216: 2, AR190: 2, AR171: 2, AR289: 2, AR211: 2, AR223: 2, AR235: 1, |
| | | | | AR214: 1, S0049: 1 and S0146: 1. |
| 27 | HBINS58 | 1352386 | 37 | AR222: 31, AR214: 31, AR169: 26, AR223: 23, AR235: 22, AR224: 22, AR283: 21, AR195: 20, AR170: 20, AR168: 20, AR264: 20, AR263: 19, AR212: 19, |
| | | | | AR207: 18, AR282: 18, AR161: 18, AR315: 18, AR311: 18, AR172: 17, AR089: 17, AR162: 16, AR216: 16, AR217: 16, AR316: 16, AR261: 16, AR281: 16, |
| | | | | AR171: 16, AR163: 16, AR277: 16, AR236: 14, AR104: 14, AR309: 14, AR213: 13, AR308: 13, AR096: 13, AR314: 13, AR240: 13, AR055: 12, AR310: 12, |
| | | | | AR299: 12, AR194: 12, AR265: 12, AR053: 12, AR313: 12, AR242: 12, AR272: 12, AR288: 12, AR225: 11, AR205: 11, AR202: 11, AR295: 11, AR280: 11, |
| | | | | AR198: 11, AR245: 11, AR165: 11, AR039: 11, AR166: 11, AR060: 11, AR193: 10, AR297: 10, AR271: 10, AR164: 10, AR252: 10, AR232: 10, AR192: 10, |
| | | | | AR284: 10, AR300: 10, AR177: 10, AR218: 10, AR285: 10, AR312: 9, AR033: 9, AR197: 9, AR246: 9, AR289: 9, AR196: 9, AR201: 9, AR206: 9, AR174: 9, |
| | | | | AR219: 9, AR296: 9, AR221: 9, AR254: 9, AR262: 9, AR181: 8, AR204: 8, AR291: 8, AR275: 8, AR185: 8, AR243: 8, AR274: 8, AR286: 8, AR247: 8, AR241: 8, |
| | | | | AR238: 8, AR266: 8, AR287: 7, AR229: 7, AR292: 7, AR230: 7, AR268: 7, AR251: 7, AR211: 7, AR239: 7, AR178: 7, AR270: 7, AR231: 7, AR226: 7, AR227: 7, |
| | | | | AR183: 7, AR184: 7, AR215: 6, AR293: 6, AR234: 6, AR269: 6, AR253: 6, AR199: 6, AR176: 6, AR210: 6, AR180: 6, AR200: 6, AR298: 6, AR188: 6, AR250: 6, |
| | | | | AR257: 6, AR233: 5, AR294: 5, AR175: 5, AR203: 5, AR267: 5, AR249: 5, AR191: 5, AR189: 5, AR248: 5, AR182: 5, AR290: 5, AR273: 5, AR173: 5, AR228: 5, |
| | | | | AR259: 5, AR258: 5, AR255: 5, AR237: 5, AR052: 5, AR190: 5, AR061: 4, AR179: 4, AR256: 4, AR186: 3, AR260: 3, AR244: 3, H0593: 2, H0617: 1, L0657: 1 |
| | | | | and L0592: 1. |
| | HBINS58 | 961712 | 356 | |
| | HBINS58 | 892924 | 357 | |
| 28 | HBJNC59 | 1125802 | 38 | AR268: 41, AR290: 25, AR267: 21, AR270: 19, AR180: 19, AR245: 17, AR269: 17, AR096: 15, AR183: 15, AR177: 13, AR182: 12, AR271: 12, AR240: 11, |
| | | | | AR242: 11, AR234: 11, AR246: 11, AR283: 11, AR173: 10, AR176: 10, AR192: 10, AR272: 10, AR181: 10, AR229: 9, AR198: 9, AR197: 9, AR275: 9, AR189: 9, |
| | | | | AR179: 8, AR260: 8, AR175: 7, AR190: 7, AR199: 7, AR228: 7, AR309: 7, AR193: 7, AR238: 7, AR191: 7, AR239: 7, AR174: 7, AR231: 7, AR178: 6, AR161: 6, |
| | | | | AR162: 6, AR195: 6, AR055: 6, AR163: 6, AR061: 6, AR258: 6, AR237: 6, AR201: 6, AR188: 6, AR299: 6, AR252: 5, AR282: 5, AR257: 5, AR203: 5, AR039: 5, |
| | | | | AR196: 5, AR274: 5, AR247: 5, AR266: 5, AR226: 5, AR243: 5, AR204: 4, AR255: 4, AR170: 4, AR165: 4, AR230: 4, AR164: 4, AR200: 4, AR166: 4, AR207: 4, |
| | | | | AR295: 4, AR288: 4, AR300: 4, AR313: 4, AR233: 3, AR285: 3, AR294: 3, AR316: 3, AR185: 3, AR168: 3, AR053: 3, AR217: 3, AR277: 3, AR033: 3, AR210: 3, |
| | | | | AR236: 3, AR263: 2, AR232: 2, AR262: 2, AR212: 2, AR312: 2, AR293: 2, AR089: 2, AR261: 2, AR264: 2, AR311: 2, AR222: 2, AR171: 2, AR227: 2, AR205: 2, |
| | | | | AR214: 2, AR211: 2, AR216: 2, AR060: 2, AR291: 2, AR287: 1, AR172: 1, AR308: 1, AR104: 1, AR223: 1, AR219: 1, H0521: 26, H0522: 16, S0360: 13, |
| | | | | H0255: 7, L0775: 7, S0374: 6, H0445: 6, S0408: 5, H0581: 5, L0768: 5, S0404: 5, H0638: 4, H0427: 4, H0575: 4, H0617: 4, L0767: 4, L0806: 4, H0587: 3, H0042: 3, |
| | | | | H0124: 3, H0087: 3, S0438: 3, L0659: 3, H0672: 3, L0749: 3, H0506: 3, S0116: 2, H0254: 2, H0661: 2, S0358: 2, S0376: 2, H0637: 2, L3071: 2, S0280: 2, H0706: 2, |
| | | | | H0120: 2, H0318: 2, H0327: 2, H0045: 2, H0424: 2, H0100: 2, S0440: 2, H0649: 2, L0769: 2, L0774: 2, L0776: 2, L0657: 2, L0547: 2, L0783: 2, S0292: 2, H0555: 2, |
| | | | | L0754: 2, L0747: 2, L0750: 2, L0777: 2, S0436: 2, L0603: 2, H0717: 1, H0716: 1, H0583: 1, H0663: 1, S0356: 1, S0444: 1, L3649: 1, H0741: 1, L2831: 1, L3388: 1, |
| | | | | H0411: 1, S6022: 1, H0550: 1, H0455: 1, H0602: 1, H0632: 1, T0082: 1, H0309: 1, H0009: 1, H0015: 1, H0510: 1, H0375: 1, H0687: 1, H0039: 1, H0030: 1, |
| | | | | H0031: 1, S0294: 1, H0509: 1, H0641: 1, H0647: 1, H0538: 1, L0762: 1, L0763: 1, L5565: 1, L0772: 1, L0644: 1, L0648: 1, L0385: 1, L0375: 1, L0651: 1, L0378: 1, |
| | | | | L0653: 1, L0655: 1, L0629: 1, L0636: 1, L0540: 1, L0545: 1, H0689: 1, S0380: 1, S0332: 1, S0044: 1, S0406: 1, L0755: 1, S0260: 1, S0434: 1, H0653: 1, L2367: 1 |
| | | | | and H0352: 1. |
| | HBJNC59 | 899397 | 358 | |
| | HBJNC59 | 902207 | 359 | |
| 29 | HBNAW17 | 526797 | 39 | AR266: 6, AR245: 3, AR168: 2, AR246: 2, AR217: 2, AR177: 2, AR291: 2, AR264: 2, AR274: 1, AR165: 1, AR267: 1, AR312: 1, AR216: 1, AR311: 1, AR164: 1, |
| | | | | AR261: 1, AR182: 1, AR299: 1, AR257: 1, AR166: 1, AR243: 1, AR309: 1, AR089: 1, AR224: 1, AR175: 1, L0766: 3 and H0188: 1. |
| 30 | HBOEG69 | 793786 | 40 | AR282: 73, AR253: 4, AR221: 3, AR235: 3, AR216: 3, AR171: 2, AR180: 2, AR277: 2, AR316: 2, AR213: 2, AR205: 2, AR272: 2, AR271: 2, AR168: 2, AR289: 1, |
| | | | | AR283: 1, AR240: 1, AR181: 1, AR309: 1, AR257: 1, AR055: 1, AR176: 1, AR173: 1, AR295: 1, AR195: 1, AR183: 1, AR224: 1, L0771: 4, H0556: 3, S0007: 3, |
| | | | | L0766: 3, L0493: 3, L0748: 3, H0265: 2, S0418: 2, H0271: 2, H0422: 2, S0402: 1, H0657: 1, H0656: 1, H0580: 1, L0463: 1, H0592: 1, H0427: 1, H0156: 1, |
| | | | | H0390: 1, H0581: 1, H0194: 1, H0596: 1, H0373: 1, H0687: 1, H0615: 1, S0364: 1, H0413: 1, H0649: 1, S0422: 1, L0457: 1, L0502: 1, L0763: 1, L0776: 1, S0428: 1, |
| | | | | H0658: 1, H0670: 1, S0330: 1, L0602: 1, H0696: 1, H0436: 1, L0754: 1, L0750: 1, L0780: 1 and S0424: 1. |
| 31 | HCACU58 | 625923 | 41 | AR170: 4, AR225: 4, AR197: 3, AR253: 3, AR183: 3, AR242: 3, AR270: 2, AR311: 2, AR266: 2, AR275: 2, AR168: 2, AR172: 2, AR223: 2, AR282: 2, AR291: 2, |
| | | | | AR169: 2, AR272: 2, AR195: 2, AR198: 1, AR096: 1, AR240: 1, AR269: 1, AR283: 1, AR192: 1, AR164: 1, AR300: 1, AR224: 1, AR252: 1, H0341: 1, H0125: 1, |
| | | | | H0580: 1, L0747: 1 and L0749: 1. |
| 32 | HCE2F54 | 634016 | 42 | AR253: 23, AR250: 22, AR271: 21, AR197: 20, AR195: 19, AR199: 18, AR252: 16, AR272: 13, AR254: 12, AR198: 12, AR269: 12, AR211: 12, AR205: 11, |
| | | | | AR180: 11, AR176: 11, AR210: 11, AR200: 11, AR240: 10, AR161: 10, AR266: 10, AR162: 10, AR229: 10, AR177: 10, AR163: 10, AR242: 10, AR243: 10, |
| | | | | AR212: 10, AR309: 10, AR246: 10, AR268: 9, AR181: 9, AR245: 9, AR165: 9, AR183: 9, AR275: 9, AR238: 9, AR291: 9, AR178: 9, AR264: 9, AR164: 9, |
| | | | | AR196: 9, AR204: 9, AR188: 8, AR166: 8, AR182: 8, AR191: 8, AR255: 8, AR175: 8, AR289: 8, AR179: 8, AR290: 8, AR237: 8, AR189: 8, AR225: 8, AR235: 8, |
| | | | | AR193: 8, AR247: 8, AR270: 8, AR234: 7, AR219: 7, AR201: 7, AR263: 7, AR207: 7, AR228: 7, AR267: 7, AR312: 7, AR190: 7, AR308: 7, AR173: 7, AR296: 7, |
| | | | | AR274: 7, AR257: 7, AR297: 7, AR311: 7, AR231: 7, AR213: 7, AR293: 7, AR313: 7, AR287: 6, AR033: 6, AR262: 6, AR300: 6, AR224: 6, AR218: 6, AR288: 6, |
| | | | | AR192: 6, AR295: 6, AR294: 6, AR203: 6, AR285: 6, AR239: 6, AR089: 6, AR282: 6, AR174: 6, AR185: 5, AR233: 5, AR236: 5, AR316: 5, AR096: 5, AR230: 5, |
| | | | | AR286: 5, AR217: 5, AR222: 5, AR261: 5, AR053: 5, AR061: 5, AR221: 5, AR214: 5, AR168: 4, AR223: 4, AR172: 4, AR226: 4, AR169: 4, AR258: 4, AR039: 4, |
| | | | | AR299: 4, AR283: 4, AR216: 4, AR232: 4, AR060: 4, AR227: 4, AR277: 3, AR104: 3, AR256: 3, AR055: 3, AR260: 3, AR171: 2, AR170: 2, AR215: 1, H0052: 9, |
| | | | | L0794: 6, L0758: 6, L0659: 5, L0666: 4, L0438: 4, S0126: 4, L0754: 4, L0779: 4, H0617: 3, L0748: 3, L0751: 3, L0759: 3, H0333: 2, H0013: 2, H0150: 2, H0494: 2, |
| | | | | L0761: 2, L0641: 2, L0649: 2, L0809: 2, L0519: 2, L0663: 2, S0380: 2, L3832: 2, L0439: 2, L0747: 2, L0749: 2, H0685: 1, H0713: 1, H0295: 1, H0341: 1, H0484: 1, |
| | | | | H0255: 1, H0638: 1, S0358: 1, S0046: 1, S0476: 1, H0393: 1, L3388: 1, H0261: 1, S0222: 1, H0592: 1, H0069: 1, H0253: 1, H0596: 1, H0009: 1, H0178: 1, |
| | | | | H0081: 1, H0051: 1, H0266: 1, H0428: 1, H0100: 1, S0112: 1, L0639: 1, L5575: 1, L3905: 1, L0662: 1, L0766: 1, L0804: 1, L0651: 1, L0655: 1, L0787: 1, L0664: 1, |
| | | | | L0665: 1, T0068: 1, H0672: 1, H0539: 1, L0602: 1, S0406: 1, H0436: 1, H0478: 1, L0777: 1, L0755: 1, H0422: 1 and H0506: 1. |
| 33 | HCE3G69 | 728432 | 43 | AR033: 18, AR197: 14, AR195: 13, AR196: 11, AR271: 10, AR242: 10, AR243: 9, AR165: 9, AR201: 9, AR207: 9, AR164: 9, AR182: 9, AR166: 9, AR269: 8, |
| | | | | AR198: 8, AR235: 8, AR161: 8, AR162: 8, AR183: 8, AR272: 8, AR268: 8, AR296: 8, AR163: 8, AR176: 8, AR193: 8, AR238: 7, AR254: 7, AR200: 7, AR247: 7, |
| | | | | AR181: 7, AR291: 7, AR225: 7, AR309: 6, AR178: 6, AR270: 6, AR188: 6, AR173: 6, AR266: 6, AR228: 6, AR282: 6, AR246: 6, AR169: 6, AR213: 6, AR212: 6, |
| | | | | AR192: 6, AR177: 6, AR261: 6, AR250: 6, AR175: 6, AR204: 6, AR239: 6, AR233: 6, AR234: 6, AR255: 6, AR288: 5, AR171: 5, AR267: 5, AR217: 5, AR290: 5, |
| | | | | AR168: 5, AR223: 5, AR236: 5, AR089: 5, AR289: 5, AR191: 5, AR203: 5, AR224: 5, AR245: 5, AR061: 5, AR104: 5, AR308: 5, AR229: 5, AR205: 5, AR060: 5, |
| | | | | AR039: 5, AR231: 5, AR240: 5, AR053: 5, AR274: 5, AR287: 5, AR222: 5, AR216: 5, AR316: 5, AR214: 5, AR215: 5, AR264: 5, AR199: 5, AR174: 5, AR221: 5, |
| | | | | AR297: 5, AR312: 4, AR180: 4, AR313: 4, AR295: 4, AR179: 4, AR170: 4, AR263: 4, AR293: 4, AR253: 4, AR299: 4, AR232: 4, AR257: 4, AR189: 4, AR300: 4, |
| | | | | AR294: 4, AR311: 4, AR237: 4, AR285: 4, AR210: 4, AR275: 4, AR172: 4, AR190: 4, AR226: 4, AR211: 4, AR230: 4, AR185: 3, AR286: 3, AR227: 3, AR262: 3, |
| | | | | AR055: 3, AR256: 3, AR277: 3, AR096: 3, AR258: 3, AR219: 2, AR283: 2, AR260: 2, AR218: 2, AR252: 1, L0439: 9, H0052: 7, L0748: 7, S0440: 5, L0758: 5, |
| | | | | H0046: 4, H0038: 4, L0769: 4, S0442: 3, H0013: 3, H0253: 3, T0010: 3, L0774: 3, L0776: 3, H0144: 3, H0521: 3, S0404: 3, L0752: 3, L0731: 3, H0656: 2, S0358: 2, |
| | | | | S0360: 2, S0222: 2, H0618: 2, H0620: 2, L0351: 2, S0422: 2, L0764: 2, L0771: 2, L0783: 2, L0793: 2, H0658: 2, H0666: 2, L0751: 2, L0754: 2, L0745: 2, L0747: 2, |
| | | | | L0750: 2, H0624: 1, H0265: 1, H0556: 1, H0686: 1, S0134: 1, S0212: 1, S0001: 1, H0254: 1, H0661: 1, L0946: 1, S0354: 1, S0444: 1, S0408: 1, H0734: 1, L3081: 1, |
| | | | | S0300: 1, S0278: 1, H0369: 1, H0370: 1, H0333: 1, H0574: 1, H0486: 1, H0036: 1, H0263: 1, H0597: 1, H0545: 1, H0572: 1, H0024: 1, S0388: 1, S0051: 1, |
| | | | | S0250: 1, H0252: 1, H0428: 1, H0039: 1, H0644: 1, L0055: 1, H0674: 1, H0135: 1, H0087: 1, T0067: 1, H0488: 1, L3154: 1, H0529: 1, L0763: 1, L0770: 1, |
| | | | | L3905: 1, L0761: 1, L0374: 1, L0662: 1, L0768: 1, L0766: 1, L0803: 1, L0775: 1, L0805: 1, L0653: 1, L0661: 1, L0526: 1, L5622: 1, L0666: 1, L0664: 1, L0665: 1, |
| | | | | S0053: 1, L0710: 1, L2654: 1, H0547: 1, H0682: 1, H0435: 1, H0670: 1, H0660: 1, H0648: 1, H0672: 1, S0328: 1, H0539: 1, S0152: 1, H0696: 1, S0044: 1, S0406: 1, |
| | | | | H0631: 1, S3014: 1, S0028: 1, L0742: 1, L0749: 1, L0753: 1, L0759: 1, S0436: 1, S0011: 1, S0192: 1, H0542: 1, H0423: 1, S0398: 1 and H0506: 1. |
| | HCE3G69 | 494346 | 360 | |
| 34 | HCE5F43 | 612796 | 44 | AR060: 280, AR055: 230, AR299: 151, AR089: 139, AR104: 127, AR283: 124, AR185: 112, AR039: 97, AR096: 88, AR316: 79, AR282: 66, AR277: 62, |
| | | | | AR300: 50, AR240: 46, AR218: 40, AR219: 35, AR313: 29, AR215: 8, AR169: 8, AR221: 8, AR217: 8, AR214: 7, AR216: 7, AR225: 7, AR171: 6, AR222: 5, |
| | | | | AR223: 5, AR246: 5, AR188: 5, AR263: 5, AR224: 5, AR245: 5, AR191: 5, AR269: 5, AR168: 5, AR270: 5, AR205: 5, AR183: 5, AR176: 4, AR252: 4, AR166: 4, |
| | | | | AR190: 4, AR175: 4, AR235: 4, AR165: 4, AR178: 4, AR266: 4, AR164: 4, AR170: 4, AR180: 4, AR274: 4, AR179: 4, AR174: 4, AR196: 4, AR192: 4, AR163: 4, |
| | | | | AR161: 4, AR162: 4, AR275: 4, AR309: 4, AR193: 4, AR264: 4, AR257: 4, AR053: 4, AR181: 4, AR201: 4, AR189: 4, AR312: 3, AR271: 3, AR311: 3, AR195: 3, |
| | | | | AR173: 3, AR033: 3, AR177: 3, AR295: 3, AR268: 3, AR210: 3, AR291: 3, AR197: 3, AR288: 3, AR203: 3, AR200: 3, AR182: 3, AR272: 3, AR290: 3, AR308: 3, |
| | | | | AR285: 3, AR236: 3, AR198: 3, AR255: 3, AR243: 3, AR231: 3, AR250: 3, AR294: 3, AR172: 2, AR287: 2, AR286: 2, AR238: 2, AR237: 2, AR226: 2, AR289: 2, |
| | | | | AR254: 2, AR297: 2, AR296: 2, AR204: 2, AR247: 2, AR260: 2, AR262: 2, AR293: 2, AR239: 2, AR261: 2, AR233: 2, AR229: 2, AR232: 2, AR267: 2, AR211: 2, |
| | | | | AR234: 2, AR212: 2, AR256: 1, AR258: 1, L0777: 10, L0756: 4, S0414: 3, L0659: 3, L0740: 3, H0441: 2, S0003: 2, H0616: 2, L0766: 2, H0144: 2, L0439: 2, |
| | | | | L0780: 2, L0759: 2, L0596: 2, S0242: 2, H0542: 2, S0470: 1, S0342: 1, H0341: 1, S0001: 1, S0282: 1, S0408: 1, S0007: 1, T0060: 1, H0427: 1, H0098: 1, H0042: 1, |
| | | | | H0581: 1, S0049: 1, H0052: 1, H0024: 1, H0051: 1, H0647: 1, S0422: 1, L0770: 1, L0769: 1, L0772: 1, L0662: 1, L0794: 1, L0803: 1, L0805: 1, L0666: 1, L0663: 1, |
| | | | | L0664: 1, S0374: 1, S0126: 1, H0648: 1, H0696: 1, L0747: 1, L0752: 1, L0755: 1 and L0591: 1. |
| 35 | HCEFB80 | 1143407 | 45 | H0052: 6, L0439: 5, L0794: 3, L0748: 3, L0415: 2, H0661: 2, H0559: 2, S0049: 2, H0327: 2, S0051: 2, H0399: 2, S0036: 2, L0351: 2, L0770: 2, H0144: 2, |
| | | | | L0758: 2, L0759: 2, S0116: 1, S0110: 1, H0637: 1, H0261: 1, S0222: 1, H0438: 1, H0013: 1, H0569: 1, H0320: 1, S0422: 1, H0529: 1, L0638: 1, L0517: 1, L0438: 1, |
| | | | | S0126: 1, L0749: 1, L0756: 1 and L0592: 1. |
| | HCEFB80 | 1046853 | 361 | |
| 36 | HCENK38 | 658737 | 46 | AR221: 5, AR192: 3, AR254: 2, AR053: 2, AR180: 2, AR266: 2, AR193: 2, AR231: 2, AR261: 2, AR291: 2, AR263: 2, AR269: 2, AR274: 2, AR272: 2, AR255: 2, |
| | | | | AR204: 2, AR257: 2, AR243: 2, AR290: 2, AR282: 1, AR096: 1, AR195: 1, AR182: 1, AR217: 1, AR240: 1, AR222: 1, AR170: 1, AR270: 1, AR181: 1, AR216: 1, |
| | | | | AR247: 1, AR225: 1, AR236: 1, L0747: 15, L0745: 12, L0746: 12, L0754: 9, L0439: 6, S0007: 5, L0740: 5, L0779: 5, H0616: 4, L0768: 4, L0659: 4, L0663: 4, |
| | | | | H0013: 3, L0766: 3, H0144: 3, L0731: 3, L0758: 3, H0556: 2, S0132: 2, S0010: 2, H0052: 2, L0471: 2, H0014: 2, H0031: 2, L0806: 2, L0518: 2, L0666: 2, L0665: 2, |
| | | | | H0547: 2, L0748: 2, L0750: 2, L0757: 2, L0592: 2, H0423: 2, H0624: 1, L3643: 1, S0116: 1, H0663: 1, H0449: 1, S0420: 1, L0005: 1, S0360: 1, S0046: 1, H0749: 1, |
| | | | | H0619: 1, H0411: 1, H0587: 1, H0485: 1, L3653: 1, L0021: 1, S0474: 1, H0581: 1, S0049: 1, H0046: 1, H0050: 1, H0242: 1, H0024: 1, L0163: 1, S0388: 1, |
| | | | | H0328: 1, H0615: 1, H0039: 1, H0644: 1, S0366: 1, H0135: 1, H0090: 1, H0040: 1, H0412: 1, H0102: 1, H0100: 1, L0564: 1, S0440: 1, H0131: 1, H0633: 1, |
| | | | | L0769: 1, L0638: 1, L0667: 1, L0764: 1, L0771: 1, L0521: 1, L0649: 1, L0774: 1, L0775: 1, L0523: 1, L0776: 1, L0655: 1, L0527: 1, L0636: 1, L0519: 1, S0053: 1, |
| | | | | L0438: 1, L0352: 1, H0520: 1, H0689: 1, H0690: 1, H0658: 1, H0660: 1, H0648: 1, H0710: 1, S0350: 1, S0044: 1, S0146: 1, H0436: 1, L0611: 1, L0749: 1, L0786: 1, |
| | | | | S0436: 1, L0362: 1, L0366: 1, S0026: 1, H0667: 1, H0542: 1 and H0422: 1. |
| 37 | HCEWE20 | 543370 | 47 | AR253: 8, AR053: 6, AR196: 6, AR198: 5, AR191: 5, AR313: 5, AR245: 4, AR181: 4, AR174: 4, AR195: 4, AR189: 3, AR096: 3, AR089: 3, AR213: 3, AR177: 3, |
| | | | | AR270: 3, AR254: 3, AR300: 3, AR190: 3, AR269: 3, AR224: 3, AR247: 3, AR188: 2, AR275: 2, AR175: 2, AR226: 2, AR165: 2, AR171: 2, AR312: 2, AR179: 2, |
| | | | | AR162: 2, AR180: 2, AR164: 2, AR299: 2, AR161: 2, AR163: 2, AR257: 2, AR238: 2, AR166: 2, AR240: 2, AR185: 2, AR268: 2, AR207: 2, AR223: 2, AR199: 2, |
| | | | | AR060: 2, AR178: 2, AR316: 2, AR204: 2, AR173: 2, AR295: 2, AR200: 2, AR183: 2, AR212: 2, AR309: 2, AR233: 2, AR216: 2, AR229: 1, AR294: 1, AR237: 1, |
| | | | | AR290: 1, AR235: 1, AR239: 1, AR228: 1, AR288: 1, AR234: 1, AR201: 1, AR168: 1, AR289: 1, AR293: 1, AR286: 1, AR222: 1, AR236: 1, AR258: 1, AR182: 1, |
| | | | | AR033: 1, AR287: 1, AR283: 1, AR282: 1, AR266: 1, AR232: 1, AR262: 1, AR230: 1, H0052: 2, H0261: 1, H0271: 1 and S0458: 1. |
| 38 | HCFNN01 | 430297 | 48 | AR226: 48, AR227: 34, AR232: 34, AR239: 31, AR238: 26, AR207: 22, AR061: 21, AR283: 20, AR263: 18, AR316: 17, AR214: 16, AR055: 16, AR224: 16, |
| | | | | AR089: 15, AR264: 15, AR311: 14, AR277: 14, AR235: 13, AR282: 13, AR104: 13, AR169: 12, AR222: 12, AR165: 12, AR192: 12, AR231: 12, AR164: 12, |
| | | | | AR172: 11, AR166: 11, AR219: 11, AR237: 11, AR313: 11, AR221: 11, AR195: 11, AR168: 11, AR213: 11, AR217: 11, AR223: 11, AR096: 11, AR212: 11, |
| | | | | AR039: 11, AR309: 11, AR252: 10, AR170: 10, AR053: 10, AR198: 10, AR171: 10, AR299: 10, AR216: 10, AR218: 10, AR205: 10, AR242: 10, AR225: 9, |
| | | | | AR271: 9, AR162: 9, AR228: 9, AR308: 9, AR161: 9, AR230: 9, AR245: 8, AR312: 8, AR233: 8, AR163: 8, AR185: 8, AR215: 8, AR253: 8, AR240: 8, AR033: 8, |
| | | | | AR261: 8, AR193: 8, AR197: 8, AR060: 7, AR295: 7, AR300: 7, AR254: 7, AR288: 7, AR274: 7, AR246: 7, AR196: 6, AR177: 6, AR181: 6, AR204: 5, AR210: 5, |
| | | | | AR180: 5, AR234: 5, AR199: 5, AR176: 5, AR275: 5, AR174: 5, AR243: 5, AR236: 5, AR272: 5, AR297: 5, AR285: 5, AR291: 5, AR286: 5, AR296: 4, AR200: 4, |
| | | | | AR191: 4, AR270: 4, AR211: 4, AR247: 4, AR201: 4, AR287: 4, AR258: 4, AR289: 4, AR189: 4, AR293: 4, AR262: 4, AR188: 4, AR203: 4, AR250: 4, AR178: 3, |
| | | | | AR175: 3, AR257: 3, AR229: 3, AR269: 3, AR183: 3, AR173: 3, AR260: 3, AR256: 3, AR255: 3, AR268: 3, AR290: 3, AR294: 3, AR179: 2, AR190: 2, AR267: 2, |
| | | | | AR266: 2, L0754: 7, L0438: 4, L0794: 3, S0356: 1, L3655: 1, S0010: 1, L0646: 1, L0352: 1, L0780: 1, H0542: 1 and H0423: 1. |
| 39 | HCGMD59 | 636078 | 49 | AR214: 5, AR216: 4, AR215: 4, AR269: 4, AR217: 3, AR232: 3, AR193: 3, AR297: 3, AR286: 3, AR245: 3, AR176: 3, AR294: 3, AR264: 3, AR197: 3, AR295: 3, |
| | | | | AR200: 2, AR312: 2, AR096: 2, AR165: 2, AR104: 2, AR263: 2, AR183: 2, AR164: 2, AR243: 2, AR168: 2, AR195: 2, AR238: 2, AR277: 2, AR283: 2, AR033: 1, |
| | | | | AR171: 1, AR296: 1, AR060: 1, AR288: 1, AR172: 1, AR210: 1, AR227: 1, AR224: 1, AR061: 1, AR289: 1, AR309: 1, AR237: 1, AR308: 1, AR293: 1, L0748: 6, |
| | | | | L0750: 4, S0386: 3, L0439: 3, L0777: 3, H0624: 2, H0052: 2, L0435: 2, L0598: 2, L0809: 2, L0751: 2, L0747: 2, L0756: 2, L0753: 2, L0731: 2, H0422: 2, L0718: 2, |
| | | | | H0265: 1, H0381: 1, H0459: 1, S0356: 1, S0360: 1, H0619: 1, H0393: 1, H0411: 1, H0050: 1, L0455: 1, H0412: 1, S0344: 1, L0769: 1, L0638: 1, L0764: 1, L0771: 1, |
| | | | | L0803: 1, L0804: 1, L0805: 1, L0776: 1, L0438: 1, H0689: 1, H0659: 1, H0658: 1, H0660: 1, H0666: 1, L0594: 1 and S0106: 1. |
| 40 | HCHNF25 | 1352270 | 50 | AR199: 83, AR164: 50, AR166: 49, AR250: 49, AR165: 46, AR211: 44, AR248: 43, AR210: 43, AR296: 40, AR272: 40, AR212: 39, AR285: 39, AR273: 38, |
| | | | | AR308: 35, AR195: 35, AR291: 34, AR052: 33, AR255: 32, AR254: 32, AR196: 31, AR312: 31, AR298: 29, AR280: 28, AR189: 28, AR261: 27, AR289: 27, |
| | | | | AR197: 27, AR266: 27, AR188: 26, AR284: 26, AR238: 25, AR314: 24, AR309: 24, AR190: 24, AR311: 24, AR297: 24, AR191: 23, AR161: 23, AR162: 23, |
| | | | | AR282: 23, AR253: 23, AR265: 23, AR163: 22, AR315: 22, AR262: 22, AR286: 21, AR213: 21, AR288: 21, AR173: 21, AR264: 21, AR053: 21, AR290: 21, |
| | | | | AR295: 21, AR184: 20, AR268: 20, AR245: 20, AR219: 20, AR240: 20, AR033: 20, AR257: 20, AR200: 20, AR310: 19, AR249: 19, AR287: 19, AR247: 19, |
| | | | | AR283: 18, AR269: 18, AR256: 18, AR263: 18, AR275: 18, AR260: 18, AR089: 18, AR243: 18, AR270: 17, AR186: 17, AR180: 17, AR235: 17, AR174: 17, |
| | | | | AR178: 17, AR292: 16, AR313: 16, AR203: 16, AR104: 16, AR193: 16, AR182: 16, AR096: 16, AR181: 16, AR299: 16, AR239: 15, AR236: 15, AR258: 15, |
| | | | | AR300: 15, AR218: 15, AR176: 14, AR175: 14, AR267: 14, AR183: 13, AR274: 13, AR316: 13, AR246: 13, AR231: 12, AR185: 12, AR271: 12, AR205: 12, |
| | | | | AR293: 12, AR277: 11, AR198: 11, AR201: 11, AR294: 11, AR061: 11, AR226: 10, AR234: 10, AR177: 10, AR252: 10, AR237: 10, AR232: 10, AR055: 9, |
| | | | | AR215: 9, AR192: 9, AR039: 9, AR221: 9, AR216: 9, AR179: 9, AR229: 9, AR214: 8, AR223: 8, AR225: 8, AR281: 8, AR207: 8, AR217: 8, AR224: 8, AR242: 8, |
| | | | | AR259: 8, AR222: 8, AR060: 7, AR169: 7, AR230: 7, AR170: 7, AR244: 7, AR251: 6, AR194: 6, AR233: 6, AR202: 6, AR241: 6, AR171: 6, AR227: 6, AR168: 6, |
| | | | | AR204: 5, AR172: 5, AR228: 5, AR206: 5, L0514: 16, L0500: 13, L0777: 11, L0499: 10, L0755: 10, L0769: 8, L0493: 8, L0747: 8, L0749: 7, L0766: 6, L0748: 6, |
| | | | | S0360: 5, L0497: 5, L0508: 5, H0457: 4, L0507: 4, L0770: 4, L0805: 4, S0374: 4, H0659: 4, L0779: 4, L0596: 4, L0588: 4, S0356: 3, S0358: 3, S0438: 3, S0440: 3, |
| | | | | S0422: 3, L0505: 3, L0761: 3, L0646: 3, L0771: 3, L0498: 3, L0803: 3, L0774: 3, L0775: 3, L0776: 3, L0655: 3, L0513: 3, L0659: 3, L0666: 3, L0751: 3, L0758: 3, |
| | | | | L0759: 3, H0580: 2, H0431: 2, H0251: 2, H0529: 2, L0504: 2, L0506: 2, L0373: 2, L0764: 2, L0649: 2, L0650: 2, L0375: 2, L0651: 2, L0512: 2, L0663: 2, L0665: 2, |
| | | | | L0710: 2, S0126: 2, H0689: 2, S0330: 2, L0750: 2, L0752: 2, S0434: 2, L0591: 2, L0608: 2, H0170: 1, T0002: 1, H0685: 1, S0040: 1, H0294: 1, S0134: 1, L0785: 1, |
| | | | | H0484: 1, L3659: 1, H0637: 1, H0592: 1, L0623: 1, H0486: 1, H0421: 1, H0052: 1, H0150: 1, H0510: 1, H0375: 1, S0316: 1, H0687: 1, H0252: 1, H0606: 1, |
| | | | | H0169: 1, T0067: 1, H0412: 1, S0038: 1, L0351: 1, H0509: 1, L0796: 1, L0800: 1, L0642: 1, L0374: 1, L0765: 1, L0773: 1, L0388: 1, L0376: 1, L0784: 1, L0806: 1, |
| | | | | L0509: 1, L0653: 1, L0807: 1, L0782: 1, L0809: 1, L0543: 1, L0788: 1, L2260: 1, L2261: 1, H0144: 1, H0690: 1, H0658: 1, H0648: 1, S0378: 1, S0380: 1, H0696: 1, |
| | | | | S0406: 1, S3014: 1, L0740: 1, L0754: 1, L0756: 1, L0753: 1, L0731: 1, L0757: 1, H0445: 1, S0436: 1, L0590: 1, H0542: 1 and H0543: 1. |
| | HCHNF25 | 658672 | 362 | |
| 41 | HCNDR47 | 1016919 | 51 | AR282: 5, AR060: 5, AR309: 4, AR055: 4, AR266: 4, AR162: 4, AR213: 4, AR161: 4, AR163: 4, AR225: 4, AR254: 3, AR270: 3, AR177: 3, AR207: 3, AR300: 3, |
| | | | | AR176: 3, AR089: 3, AR192: 3, AR263: 2, AR221: 2, AR172: 2, AR198: 2, AR104: 2, AR224: 2, AR283: 2, AR240: 2, AR277: 2, AR185: 2, AR165: 2, AR218: 2, |
| | | | | AR164: 2, AR197: 2, AR166: 2, AR096: 2, AR299: 2, AR275: 2, AR269: 2, AR236: 2, AR168: 2, AR316: 2, AR288: 2, AR313: 2, AR171: 2, AR217: 2, AR183: 2, |
| | | | | AR308: 2, AR257: 2, AR039: 2, AR296: 2, AR272: 2, AR264: 1, AR033: 1, AR261: 1, AR311: 1, AR246: 1, AR212: 1, AR286: 1, AR289: 1, AR255: 1, AR231: 1, |
| | | | | AR237: 1, AR061: 1, AR179: 1, AR238: 1, AR297: 1, AR245: 1, AR195: 1, AR215: 1, L0794: 3, L0764: 2, L0439: 2, H0052: 1, H0597: 1, T0006: 1, L0766: 1, |
| | | | | H0648: 1, S0330: 1 and L0753: 1. |
| | HCNDR47 | 863677 | 363 | |
| | HCNDR47 | 874128 | 364 | |
| 42 | HCNSB61 | 526413 | 52 | AR235: 4, AR180: 3, AR282: 3, AR192: 2, AR197: 2, AR295: 2, AR266: 2, AR271: 2, AR060: 2, AR162: 1, AR161: 1, AR163: 1, AR170: 1, AR089: 1, AR169: 1, |
| | | | | AR257: 1, AR261: 1, AR217: 1, AR168: 1, AR277: 1, AR225: 1, AR311: 1, AR164: 1, AR247: 1, AR296: 1, AR245: 1, H0231: 1 and S0216: 1. |
| 43 | HCNSM70 | 637547 | 53 | AR207: 46, AR223: 40, AR281: 39, AR194: 39, AR214: 36, AR169: 35, AR222: 34, AR206: 34, AR202: 33, AR264: 32, AR263: 30, AR195: 30, AR315: 29, |
| | | | | AR308: 29, AR235: 28, AR212: 28, AR172: 28, AR170: 27, AR224: 27, AR246: 27, AR168: 27, AR311: 26, AR171: 26, AR244: 25, AR205: 25, AR165: 25, |
| | | | | AR280: 24, AR198: 24, AR164: 24, AR216: 23, AR192: 23, AR166: 23, AR241: 23, AR213: 23, AR271: 22, AR162: 22, AR314: 22, AR245: 22, AR163: 21, |
| | | | | AR261: 21, AR197: 21, AR265: 21, AR161: 20, AR217: 20, AR215: 20, AR225: 19, AR243: 19, AR309: 19, AR053: 19, AR310: 18, AR221: 18, AR033: 18, |
| | | | | AR295: 17, AR236: 17, AR273: 17, AR204: 17, AR242: 17, AR274: 16, AR196: 16, AR201: 15, AR240: 15, AR288: 15, AR052: 15, AR252: 15, AR282: 15, |
| | | | | AR193: 14, AR177: 14, AR312: 14, AR251: 14, AR174: 14, AR275: 13, AR247: 13, AR211: 13, AR089: 13, AR181: 13, AR297: 13, AR210: 12, AR039: 12, |
| | | | | AR277: 12, AR284: 12, AR299: 12, AR188: 12, AR232: 12, AR283: 12, AR300: 12, AR266: 12, AR272: 12, AR096: 12, AR176: 12, AR289: 11, AR180: 11, |
| | | | | AR229: 11, AR199: 11, AR238: 11, AR313: 11, AR291: 11, AR285: 11, AR191: 11, AR178: 11, AR262: 11, AR292: 10, AR186: 10, AR316: 10, AR239: 10, |
| | | | | AR226: 10, AR230: 10, AR173: 10, AR231: 10, AR250: 9, AR227: 9, AR055: 9, AR286: 9, AR219: 9, AR293: 9, AR185: 9, AR296: 9, AR255: 9, AR104: 9, |
| | | | | AR175: 9, AR200: 9, AR258: 9, AR298: 9, AR253: 9, AR237: 9, AR218: 9, AR190: 9, AR287: 9, AR183: 8, AR268: 8, AR203: 8, AR260: 8, AR234: 8, AR257: 8, |
| | | | | AR179: 8, AR189: 8, AR254: 8, AR269: 8, AR270: 8, AR182: 8, AR061: 8, AR256: 7, AR248: 7, AR233: 7, AR060: 7, AR294: 7, AR228: 7, AR259: 6, AR290: 6, |
| | | | | AR267: 6, AR249: 5, AR184: 5, L0748: 5, H0046: 2, H0012: 2, H0620: 2, L0804: 2, L0747: 2, H0624: 1, H0662: 1, S0356: 1, S0358: 1, H0602: 1, H0592: 1, |
| | | | | H0013: 1, H0042: 1, T0110: 1, H0231: 1, H0622: 1, H0264: 1, H0494: 1, L0771: 1, L0666: 1, S0374: 1, H0693: 1, H0593: 1, H0670: 1, H0672: 1, L0749: 1, |
| | | | | L0779: 1, L0758: 1, L0596: 1 and H0506: 1. |
| | HCNSM70 | 589445 | 365 | |
| 44 | HCUCK44 | 720291 | 54 | AR172: 3, AR245: 3, AR252: 3, AR161: 3, AR164: 3, AR166: 3, AR221: 2, AR162: 2, AR163: 2, AR169: 2, AR311: 2, AR261: 2, AR165: 2, AR214: 2, AR224: 2, |
| | | | | AR296: 2, AR264: 1, AR195: 1, AR277: 1, AR212: 1, AR217: 1, AR096: 1, AR193: 1, AR295: 1, AR287: 1, AR216: 1, AR213: 1, AR257: 1, AR275: 1, AR089: 1, |
| | | | | AR201: 1, AR282: 1, L3450: 19, H0271: 18, S0002: 12, L0794: 12, S0144: 8, L3783: 8, L3807: 8, H0250: 7, L0777: 7, L3119: 6, L3729: 6, L0665: 6, H0518: 6, |
| | | | | S0132: 5, H0264: 5, S0426: 5, S0328: 5, S0330: 5, L0758: 5, S0444: 4, S0344: 4, L0770: 4, L0776: 4, L0659: 4, S0052: 4, S0053: 4, L0743: 4, L0747: 4, S0436: 4, |
| | | | | L0065: 3, L0769: 3, L0766: 3, L0774: 3, L0657: 3, H0521: 3, L0748: 3, L0749: 3, L0731: 3, L2999: 2, H0306: 2, H0402: 2, H0638: 2, S0360: 2, S0408: 2, S0476: 2, |
| | | | | H0393: 2, S0278: 2, L3516: 2, H0050: 2, H0014: 2, H0416: 2, H0617: 2, H0634: 2, H0494: 2, S0440: 2, L0800: 2, L0771: 2, L0648: 2, L0549: 2, L0806: 2, L0805: 2, |
| | | | | L0666: 2, S0428: 2, S0216: 2, L3210: 2, S0404: 2, L0439: 2, L0740: 2, L0750: 2, L0752: 2, L0596: 2, L0599: 2, T0002: 1, H0159: 1, H0650: 1, H0657: 1, L0785: 1, |
| | | | | H0662: 1, L3659: 1, S0442: 1, S0358: 1, S0410: 1, L3646: 1, H0741: 1, L3117: 1, H0619: 1, L2791: 1, H0613: 1, H0600: 1, H0592: 1, H0486: 1, L2504: 1, L3750: 1, |
| | | | | H0069: 1, H0581: 1, H0596: 1, H0044: 1, H0009: 1, H0024: 1, H0057: 1, S0051: 1, H0355: 1, H0615: 1, L0483: 1, S0036: 1, H0090: 1, H0038: 1, H0087: 1, |
| | | | | H0413: 1, H0100: 1, S0448: 1, S0142: 1, S0210: 1, H0529: 1, L3904: 1, L0761: 1, L0772: 1, L0372: 1, L0646: 1, L0645: 1, L0764: 1, L0773: 1, L0662: 1, L0768: 1, |
| | | | | L0387: 1, L0649: 1, L0551: 1, L0550: 1, L0803: 1, L0775: 1, L0653: 1, L0655: 1, L0656: 1, L0782: 1, L0787: 1, L4537: 1, L2257: 1, S0374: 1, H0690: 1, H0659: 1, |
| | | | | H0658: 1, S0378: 1, H0710: 1, S0152: 1, H0696: 1, H0704: 1, S0406: 1, H0436: 1, L0744: 1, L0756: 1, L0779: 1, L0780: 1, L0755: 1, L0759: 1, S0031: 1, L0581: 1, |
| | | | | L0601: 1, L0603: 1, S0196: 1, L3632: 1 and H0352: 1. |
| 45 | HCUEO60 | 499242 | 55 | AR313: 24, AR242: 23, AR192: 19, AR162: 19, AR161: 18, AR163: 17, AR039: 16, AR089: 15, AR165: 15, AR164: 15, AR198: 15, AR300: 15, AR166: 14, |
| | | | | AR252: 14, AR104: 14, AR096: 13, AR250: 13, AR185: 12, AR174: 12, AR053: 12, AR254: 12, AR204: 12, AR270: 12, AR212: 12, AR240: 11, AR233: 11, |
| | | | | AR197: 11, AR205: 11, AR264: 10, AR312: 9, AR193: 9, AR229: 9, AR201: 9, AR234: 9, AR247: 9, AR177: 9, AR253: 9, AR183: 9, AR283: 9, AR245: 8, |
| | | | | AR226: 8, AR275: 8, AR266: 8, AR274: 8, AR243: 8, AR213: 7, AR207: 7, AR263: 7, AR272: 7, AR246: 7, AR239: 7, AR316: 7, AR173: 7, AR262: 7, AR299: 7, |
| | | | | AR060: 7, AR195: 7, AR238: 7, AR179: 6, AR308: 6, AR293: 6, AR271: 6, AR309: 6, AR231: 6, AR282: 6, AR297: 6, AR269: 5, AR176: 5, AR294: 5, AR311: 5, |
| | | | | AR277: 5, AR232: 5, AR237: 5, AR230: 5, AR255: 4, AR295: 4, AR296: 4, AR181: 4, AR033: 4, AR289: 4, AR257: 4, AR267: 4, AR055: 4, AR268: 3, AR224: 3, |
| | | | | AR199: 3, AR061: 3, AR196: 3, AR215: 3, AR288: 3, AR258: 3, AR168: 3, AR236: 3, AR235: 3, AR221: 2, AR290: 2, AR182: 2, AR261: 2, AR175: 2, AR286: 2, |
| | | | | AR214: 2, AR222: 2, AR180: 2, AR178: 1, AR189: 1, AR291: 1, AR216: 1, AR169: 1, H0402: 1 |
| 46 | HCUHK65 | 651313 | 56 | AR313: 16, AR089: 15, AR039: 14, AR096: 11, AR312: 10, AR185: 10, AR104: 9, AR277: 8, AR316: 8, AR299: 8, AR263: 7, AR310: 7, AR240: 6, AR060: 6, |
| | | | | AR309: 5, AR033: 5, AR296: 5, AR300: 5, AR282: 4, AR192: 4, AR186: 4, AR274: 3, AR175: 3, AR219: 3, AR055: 3, AR284: 3, AR218: 3, AR267: 3, AR294: 3, |
| | | | | AR177: 2, AR246: 2, AR182: 2, AR293: 2, AR241: 2, AR268: 2, AR292: 2, AR270: 2, AR266: 2, AR295: 2, AR290: 2, AR285: 2, AR283: 2, AR183: 1, AR232: 1, |
| | | | | AR289: 1, AR052: 1, AR238: 1, AR286: 1, AR053: 1, AR233: 1, AR269: 1, AR061: 1, AR206: 1, AR259: 1, H0543: 18, S0414: 11, L0438: 6, S0412: 6, L0747: 5, |
| | | | | L0439: 4, L0750: 4, L0779: 4, L0759: 4, L0592: 4, H0156: 3, L0758: 3, H0423: 3, H0402: 2, H0251: 2, L0770: 2, L0809: 2, L0777: 2, H0542: 2, H0422: 2, H0624: 1, |
| | | | | H0170: 1, S0114: 1, S0420: 1, S0007: 1, S6026: 1, H0351: 1, S6016: 1, H0013: 1, L0021: 1, H0575: 1, S0346: 1, L0157: 1, T0010: 1, H0354: 1, S6028: 1, S0036: 1, |
| | | | | H0038: 1, L3905: 1, L0794: 1, L0804: 1, L0787: 1, L0666: 1, H0658: 1 and L0742: 1. |
| | HCUHK65 | 880178 | 366 | |
| 47 | HCUIM65 | 550208 | 57 | AR223: 4, AR215: 3, AR268: 3, AR270: 3, AR250: 3, AR161: 3, AR246: 3, AR162: 3, AR166: 2, AR171: 2, AR254: 2, AR217: 2, AR213: 2, AR177: 2, AR089: 2, |
| | | | | AR243: 2, AR290: 2, AR257: 2, AR269: 2, AR281: 1, AR313: 1, AR179: 1, AR205: 1, AR309: 1, AR165: 1, AR163: 1, AR170: 1, AR261: 1, AR225: 1, AR195: 1, |
| | | | | AR240: 1, AR181: 1, AR238: 1, AR193: 1, AR299: 1, L0789: 4, L0809: 2, L0759: 2, L0596: 2, H0306: 1, H0402: 1, H0580: 1, H0550: 1, H0370: 1, H0404: 1, |
| | | | | H0559: 1, H0486: 1, H0031: 1, H0674: 1, H0135: 1, H0100: 1, L0800: 1, L0794: 1, L0804: 1, L0805: 1, L0515: 1, L0783: 1, H0672: 1, L0777: 1, H0444: 1 and |
| | | | | H0352: 1. |
| 48 | HCWDS72 | 707833 | 58 | AR194: 5, AR162: 5, AR241: 4, AR215: 4, AR249: 4, AR313: 3, AR221: 3, AR207: 3, AR310: 3, AR169: 3, AR265: 3, AR229: 3, AR183: 3, AR298: 2, AR282: 2, |
| | | | | AR284: 2, AR291: 2, AR292: 2, AR270: 2, AR312: 2, AR223: 2, AR165: 2, AR273: 2, AR182: 2, AR164: 2, AR227: 2, AR240: 2, AR289: 2, AR166: 2, AR172: 2, |
| | | | | AR266: 2, AR246: 2, AR061: 2, AR222: 2, AR293: 2, AR269: 2, AR053: 2, AR171: 2, AR238: 2, AR295: 2, AR271: 1, AR177: 1, AR163: 1, AR299: 1, AR052: 1, |
| | | | | AR290: 1, AR039: 1, AR231: 1, AR296: 1, AR096: 1, AR178: 1, AR186: 1, AR232: 1, AR294: 1, AR285: 1, AR286: 1, AR192: 1, AR233: 1, AR268: 1, AR247: 1, |
| | | | | AR161: 1, AR230: 1, AR274: 1, AR226: 1, AR210: 1, AR300: 1, AR089: 1, AR311: 1, AR277: 1, AR234: 1, AR237: 1, AR193: 1, AR206: 1, AR259: 1, AR201: 1, |
| | | | | AR168: 1, AR216: 1, L0752: 30, L0754: 17, L0740: 16, H0521: 14, L0439: 14, L0766: 12, S0003: 11, S0214: 11, L0777: 10, S0002: 8, L0770: 8, L0776: 8, |
| | | | | L0748: 8, L0755: 8, S0360: 7, L0665: 7, L0757: 7, T0067: 6, S0440: 6, L0666: 6, L0747: 6, L0774: 5, L0751: 5, S0222: 4, H0575: 4, H0622: 4, L0662: 4, L0775: 4, |
| | | | | H0547: 4, S0126: 4, S0380: 4, L0750: 4, L0758: 4, S0436: 4, L0362: 4, H0638: 3, H0580: 3, H0494: 3, S0422: 3, L0598: 3, S0374: 3, H0710: 3, H0522: 3, H0555: 3, |
| | | | | L0356: 3, L0756: 3, L0780: 3, L0731: 3, L0759: 3, L0594: 3, S0134: 2, S0376: 2, S0046: 2, H0393: 2, S0278: 2, H0438: 2, H0586: 2, L2477: 2, H0156: 2, S0474: 2, |
| | | | | H0581: 2, H0421: 2, T0110: 2, L0471: 2, S6028: 2, S0022: 2, H0090: 2, H0591: 2, H0040: 2, H0551: 2, H0412: 2, L0520: 2, L0764: 2, L0768: 2, L0803: 2, L0655: 2, |
| | | | | L0807: 2, L0659: 2, L0664: 2, L0438: 2, H0648: 2, H0672: 2, S0406: 2, S0028: 2, L0588: 2, L0599: 2, H0667: 2, S0196: 2, H0624: 1, H0171: 1, H0265: 1, S0040: 1, |
| | | | | H0713: 1, S0114: 1, L0811: 1, H0341: 1, S0212: 1, S0001: 1, H0661: 1, H0305: 1, S0418: 1, L3649: 1, H0741: 1, S0045: 1, H0747: 1, S0132: 1, S0476: 1, L3089: 1, |
| | | | | H0619: 1, H0415: 1, H0409: 1, L1942: 1, L2495: 1, L3655: 1, H0013: 1, S0010: 1, S0665: 1, H0327: 1, H0046: 1, L0157: 1, S0051: 1, T0010: 1, H0266: 1, H0179: 1, |
| | | | | H0615: 1, H0096: 1, H0031: 1, H0553: 1, L0055: 1, H0674: 1, H0163: 1, H0038: 1, H0264: 1, H0413: 1, L0564: 1, H0560: 1, H0359: 1, H0509: 1, S0142: 1, |
| | | | | S0344: 1, UNKWN: 1, L0369: 1, L0762: 1, L0371: 1, L0796: 1, L0761: 1, L0373: 1, L0773: 1, L0521: 1, L0794: 1, L0804: 1, L0784: 1, L0518: 1, L0783: 1, |
| | | | | L0647: 1, L5622: 1, L5623: 1, L3391: 1, L2657: 1, L2262: 1, L3636: 1, H0144: 1, H0684: 1, H0659: 1, H0658: 1, S0330: 1, S0152: 1, H0696: 1, S0404: 1, S0037: 1, |
| | | | | L0746: 1, L0779: 1, S0031: 1, H0707: 1, S0434: 1, L0480: 1, L0608: 1, L0604: 1, S0011: 1, S0192: 1, S0456: 1 and H0506: 1. |
| 49 | HCWGU37 | 1042325 | 59 | AR165: 7, AR164: 6, AR166: 6, AR313: 6, AR161: 5, AR162: 5, AR163: 5, AR089: 5, AR263: 5, AR039: 5, AR252: 4, AR173: 4, AR275: 4, AR178: 3, AR185: 3, |
| | | | | AR212: 3, AR240: 3, AR268: 3, AR300: 3, AR193: 3, AR223: 3, AR196: 3, AR096: 3, AR247: 3, AR192: 3, AR262: 3, AR179: 3, AR234: 3, AR195: 3, AR053: 3, |
| | | | | AR312: 3, AR229: 3, AR104: 3, AR222: 3, AR282: 3, AR060: 3, AR297: 3, AR174: 3, AR213: 3, AR269: 2, AR257: 2, AR285: 2, AR308: 2, AR175: 2, AR291: 2, |
| | | | | AR261: 2, AR277: 2, AR191: 2, AR218: 2, AR311: 2, AR255: 2, AR272: 2, AR258: 2, AR316: 2, AR182: 2, AR201: 2, AR207: 2, AR237: 2, AR203: 2, AR286: 2, |
| | | | | AR246: 2, AR233: 2, AR231: 2, AR296: 2, AR290: 2, AR236: 2, AR264: 2, AR199: 2, AR188: 2, AR288: 1, AR293: 1, AR295: 1, AR299: 1, AR205: 1, AR181: 1, |
| | | | | AR287: 1, AR214: 1, AR294: 1, AR232: 1, AR238: 1, AR033: 1, AR228: 1, AR226: 1, AR267: 1, AR219: 1, AR239: 1, AR211: 1, H0589: 60, S0042: 29, H0402: 3, |
| | | | | H0305: 3, L0770: 2, S0052: 2, L0744: 2, L0740: 2, H0438: 1, H0051: 1, S0038: 1, S0386: 1, H0521: 1, L0743: 1, L0779: 1 and L0366: 1. |
| | HCWGU37 | 901913 | 367 | |
| 50 | HCWKC15 | 553621 | 60 | AR313: 9, AR164: 8, AR165: 8, AR166: 8, AR163: 7, AR161: 7, AR162: 7, AR089: 6, AR039: 5, AR173: 5, AR096: 5, AR180: 5, AR192: 4, AR263: 4, AR299: 4, |
| | | | | AR282: 4, AR242: 4, AR053: 4, AR178: 4, AR175: 4, AR247: 4, AR269: 4, AR296: 4, AR257: 3, AR212: 3, AR174: 3, AR240: 3, AR262: 3, AR196: 3, AR274: 3, |
| | | | | AR312: 3, AR234: 3, AR229: 3, AR199: 3, AR243: 3, AR264: 3, AR185: 3, AR300: 3, AR179: 3, AR311: 3, AR191: 3, AR293: 3, AR181: 3, AR272: 3, AR297: 3, |
| | | | | AR213: 3, AR171: 3, AR270: 3, AR183: 3, AR238: 3, AR236: 3, AR316: 3, AR060: 3, AR308: 3, AR294: 3, AR266: 3, AR226: 3, AR177: 3, AR258: 3, AR285: 2, |
| | | | | AR104: 2, AR233: 2, AR172: 2, AR193: 2, AR197: 2, AR291: 2, AR231: 2, AR188: 2, AR219: 2, AR255: 2, AR275: 2, AR189: 2, AR237: 2, AR290: 2, AR295: 2, |
| | | | | AR287: 2, AR277: 2, AR218: 2, AR267: 2, AR182: 2, AR228: 2, AR268: 2, AR204: 2, AR190: 2, AR246: 2, AR239: 2, AR232: 2, AR261: 2, AR223: 2, AR201: 2, |
| | | | | AR217: 2, AR195: 2, AR260: 1, AR200: 1, AR170: 1, AR286: 1, AR216: 1, AR288: 1, AR222: 1, AR227: 1, AR230: 1, H0305: 2 and H0589: 1. |
| 51 | HCWLD74 | 628256 | 61 | AR268: 4, AR243: 3, AR270: 3, AR180: 3, AR171: 3, AR282: 3, AR162: 3, AR254: 3, AR252: 2, AR039: 2, AR204: 2, AR238: 2, AR161: 2, AR170: 2, AR269: 2, |
| | | | | AR267: 2, AR257: 2, AR210: 2, AR168: 2, AR262: 2, AR053: 2, AR183: 2, AR299: 2, AR290: 1, AR224: 1, AR311: 1, AR309: 1, AR258: 1, AR277: 1, AR289: 1, |
| | | | | AR178: 1, AR217: 1, AR228: 1, AR312: 1, AR172: 1, AR293: 1, AR164: 1, AR089: 1, AR185: 1, AR205: 1, AR166: 1, AR163: 1, AR313: 1, AR295: 1, AR201: 1 |
| | | | | H0305: 3 and H0589: 1. |
| 52 | HDHEB60 | 499233 | 62 | AR195: 10, AR245: 9, AR242: 9, AR309: 9, AR196: 8, AR192: 8, AR225: 8, AR198: 8, AR207: 8, AR246: 8, AR169: 8, AR170: 8, AR223: 8, AR224: 7, AR214: 7, |
| | | | | AR039: 7, AR172: 7, AR215: 7, AR201: 7, AR222: 7, AR193: 7, AR205: 7, AR221: 7, AR199: 7, AR272: 7, AR168: 7, AR089: 7, AR213: 6, AR263: 6, AR165: 6, |
| | | | | AR216: 6, AR164: 6, AR274: 6, AR217: 6, AR261: 6, AR053: 6, AR166: 6, AR055: 6, AR312: 6, AR308: 6, AR197: 6, AR283: 5, AR240: 5, AR282: 5, AR171: 5, |
| | | | | AR253: 5, AR235: 5, AR311: 5, AR295: 5, AR250: 5, AR275: 5, AR243: 5, AR291: 5, AR162: 5, AR297: 5, AR264: 5, AR313: 5, AR288: 5, AR316: 5, AR204: 5, |
| | | | | AR163: 5, AR299: 5, AR161: 5, AR257: 5, AR286: 5, AR271: 5, AR189: 5, AR236: 5, AR210: 5, AR177: 5, AR060: 4, AR212: 4, AR033: 4, AR285: 4, AR188: 4, |
| | | | | AR200: 4, AR174: 4, AR287: 4, AR096: 4, AR296: 4, AR258: 4, AR175: 4, AR218: 4, AR176: 4, AR293: 4, AR180: 4, AR191: 4, AR203: 4, AR219: 4, AR289: 4, |
| | | | | AR277: 4, AR256: 4, AR183: 4, AR190: 4, AR247: 4, AR300: 4, AR181: 3, AR269: 3, AR173: 3, AR262: 3, AR238: 3, AR268: 3, AR178: 3, AR185: 3, AR255: 3, |
| | | | | AR270: 3, AR294: 3, AR266: 3, AR211: 3, AR260: 3, AR229: 3, AR104: 3, AR231: 3, AR267: 3, AR239: 3, AR290: 3, AR182: 3, AR226: 3, AR232: 3, AR061: 2, |
| | | | | AR233: 2, AR237: 2, AR227: 2, AR234: 2, AR179: 2, AR230: 2, AR228: 2, H0265: 2, S0442: 2, S0360: 2, H0581: 2, H0052: 2, H0570: 2, H0087: 2, L0439: 2, |
| | | | | H0445: 2, H0650: 1, S0354: 1, H0580: 1, H0741: 1, H0586: 1, H0559: 1, H0486: 1, L0021: 1, H0618: 1, H0009: 1, H0571: 1, S0051: 1, S0368: 1, H0553: 1, |
| | | | | H0181: 1, H0551: 1, S0294: 1, L3905: 1, L0646: 1, L0764: 1, L0662: 1, L0794: 1, L0658: 1, L0659: 1, L0665: 1, H0547: 1, H0682: 1, H0684: 1, H0670: 1 and |
| | | | | S3014: 1. |
| 53 | HDLAC10 | 692299 | 63 | AR225: 4, AR215: 4, AR282: 4, AR192: 3, AR235: 3, AR171: 3, AR242: 3, AR169: 3, AR246: 2, AR264: 2, AR162: 2, AR172: 2, AR089: 2, AR240: 2, AR205: 2, |
| | | | | AR311: 2, AR213: 2, AR204: 1, AR168: 1, AR222: 1, AR163: 1, AR060: 1, AR230: 1, AR257: 1, AR299: 1, AR297: 1, AR313: 1, AR226: 1, AR096: 1, AR236: 1, |
| | | | | AR272: 1, AR223: 1, AR178: 1, AR224: 1, AR295: 1, L0766: 4, L0438: 4, H0038: 3, L0666: 3, L0777: 3, H0445: 3, H0624: 2, H0170: 2, H0341: 2, S0212: 2, |
| | | | | H0661: 2, S0003: 2, H0615: 2, H0031: 2, H0068: 2, L0804: 2, H0519: 2, H0555: 2, L0743: 2, L0745: 2, L0779: 2, L0411: 1, H0171: 1, S0342: 1, S0134: 1, S0218: 1, |
| | | | | H0650: 1, H0657: 1, L0005: 1, S0358: 1, S0360: 1, S0007: 1, S0046: 1, H0550: 1, H0586: 1, H0485: 1, H0486: 1, T0060: 1, H0599: 1, H0318: 1, H0581: 1, H0320: 1, |
| | | | | H0373: 1, H0266: 1, S0214: 1, H0328: 1, H0428: 1, S0366: 1, H0551: 1, T0067: 1, H0494: 1, S0002: 1, H0529: 1, L0638: 1, L0761: 1, L0667: 1, L0374: 1, L0764: 1, |
| | | | | L0803: 1, L0655: 1, L0606: 1, L0635: 1, L0665: 1, S0374: 1, H0690: 1, H0658: 1, H0672: 1, H0539: 1, H0518: 1, S0406: 1, S0028: 1, L0439: 1, L0755: 1, L0759: 1, |
| | | | | S0308: 1, L0599: 1, S0026: 1, H0667: 1, H0543: 1, H0423: 1 and H0422: 1. |
| 54 | HDPBA28 | 1062783 | 64 | AR249: 72, AR213: 48, AR253: 40, AR096: 37, AR052: 37, AR263: 33, AR053: 32, AR212: 31, AR265: 27, AR184: 26, AR254: 26, AR264: 22, AR248: 18, |
| | | | | AR251: 17, AR240: 17, AR313: 16, AR268: 14, AR272: 13, AR290: 13, AR311: 13, AR310: 13, AR177: 13, AR180: 13, AR246: 13, AR245: 10, AR250: 10, |
| | | | | AR309: 10, AR275: 10, AR183: 9, AR247: 9, AR274: 9, AR312: 9, AR039: 9, AR308: 9, AR269: 9, AR271: 8, AR179: 8, AR270: 8, AR267: 8, AR316: 7, |
| | | | | AR198: 7, AR252: 7, AR244: 7, AR243: 7, AR175: 6, AR193: 6, AR195: 6, AR165: 6, AR299: 6, AR192: 6, AR166: 6, AR201: 6, AR164: 6, AR162: 6, AR161: 6, |
| | | | | AR242: 6, AR163: 6, AR273: 6, AR300: 5, AR197: 5, AR284: 5, AR282: 5, AR055: 5, AR181: 4, AR169: 4, AR174: 4, AR185: 4, AR061: 4, AR089: 4, AR298: 4, |
| | | | | AR259: 4, AR234: 4, AR293: 3, AR182: 3, AR202: 3, AR205: 3, AR231: 3, AR215: 3, AR283: 3, AR236: 3, AR225: 3, AR173: 2, AR178: 2, AR060: 2, AR294: 2, |
| | | | | AR186: 2, AR296: 2, AR222: 2, AR285: 2, AR281: 2, AR104: 2, AR292: 2, AR176: 2, AR295: 2, AR207: 2, AR217: 2, AR229: 2, AR289: 2, AR226: 2, AR291: 2, |
| | | | | AR206: 2, AR172: 2, AR288: 2, AR033: 2, AR235: 2, AR238: 2, AR191: 2, AR170: 2, AR194: 2, AR232: 2, AR230: 2, AR286: 2, AR189: 1, AR257: 1, AR190: 1, |
| | | | | AR199: 1, AR277: 1, AR287: 1, AR200: 1, AR224: 1, AR171: 1, AR297: 1, AR223: 1, AR168: 1, AR228: 1, AR266: 1, AR258: 1, AR233: 1, AR204: 1, AR262: 1, |
| | | | | AR315: 1, AR255: 1, AR237: 1, AR280: 1, H0521: 4, L0454: 2, S0442: 2, L0758: 2, H0720: 1, H0255: 1, S0376: 1, H0486: 1, H0581: 1, H0373: 1, H0268: 1, |
| | | | | S0440: 1, L0763: 1, L0803: 1, H0435: 1, H0658: 1, L3833: 1, H0522: 1, L0748: 1, L0749: 1, L0588: 1 and H0543: 1. |
| | HDPBA28 | 866429 | 368 | |
| 55 | HDPBQ71 | 1160316 | 65 | AR281: 64, AR202: 46, AR280: 44, AR315: 42, AR314: 41, AR194: 37, AR206: 29, AR244: 28, AR265: 26, AR310: 25, AR241: 22, AR246: 21, AR249: 21, |
| | | | | AR292: 20, AR284: 20, AR251: 19, AR273: 19, AR033: 19, AR263: 19, AR205: 18, AR283: 18, AR248: 17, AR052: 17, AR096: 17, AR213: 16, AR299: 16, |
| | | | | AR282: 15, AR275: 15, AR243: 15, AR298: 15, AR039: 14, AR232: 14, AR198: 13, AR313: 13, AR274: 13, AR259: 13, AR300: 13, AR271: 12, AR270: 12, |
| | | | | AR295: 12, AR247: 11, AR186: 11, AR185: 11, AR184: 11, AR192: 11, AR277: 11, AR218: 11, AR266: 11, AR204: 11, AR291: 11, AR053: 10, AR219: 10, |
| | | | | AR296: 10, AR268: 10, AR089: 10, AR294: 10, AR104: 10, AR253: 9, AR175: 9, AR177: 9, AR055: 9, AR183: 9, AR312: 9, AR293: 9, AR285: 9, AR269: 8, |
| | | | | AR182: 8, AR309: 8, AR316: 8, AR256: 8, AR238: 8, AR240: 7, AR286: 7, AR226: 7, AR234: 7, AR289: 7, AR237: 7, AR290: 7, AR227: 6, AR245: 6, AR231: 6, |
| | | | | AR258: 6, AR229: 6, AR267: 6, AR061: 6, AR060: 5, AR170: 5, AR250: 4, AR179: 4, AR233: 4, AR195: 3, AR212: 3, AR162: 3, AR161: 3, AR163: 3, AR166: 3, |
| | | | | AR252: 3, AR311: 3, AR225: 2, AR221: 2, AR308: 2, AR264: 2, AR217: 2, AR165: 2, AR164: 2, AR173: 2, AR168: 2, AR176: 2, AR181: 2, AR272: 2, AR178: 1, |
| | | | | AR174: 1, L0439: 8, H0551: 5, L0754: 5, L0777: 5, H0624: 4, L0666: 4, L0438: 4, L0748: 4, L0759: 4, L0471: 3, H0031: 3, S0422: 3, L0774: 3, H0521: 3, L0779: 3, |
| | | | | S0222: 2, H0156: 2, H0373: 2, H0038: 2, T0067: 2, H0494: 2, L0649: 2, L0776: 2, H0547: 2, H0539: 2, H0696: 2, L0756: 2, L0755: 2, L0731: 2, L0757: 2, L0592: 2, |
| | | | | H0170: 1, H0171: 1, H0556: 1, S0116: 1, H0341: 1, H0661: 1, H0662: 1, L3658: 1, H0125: 1, S0420: 1, S0442: 1, S0354: 1, S0444: 1, S0408: 1, H0580: 1, H0208: 1, |
| | | | | S0132: 1, H0645: 1, L2738: 1, L3484: 1, S6016: 1, L2518: 1, H0013: 1, H0427: 1, H0706: 1, H0510: 1, H0375: 1, S0250: 1, S0003: 1, H0615: 1, S0036: 1, H0163: 1, |
| | | | | H0090: 1, H0616: 1, H0412: 1, L0564: 1, L0065: 1, S0438: 1, H0633: 1, S0344: 1, S0002: 1, L0640: 1, L0803: 1, L0775: 1, L0807: 1, L0659: 1, L0663: 1, L0665: 1, |
| | | | | L2259: 1, L3811: 1, S0126: 1, H0711: 1, H0658: 1, S0328: 1, S0380: 1, S0406: 1, S0392: 1, S0390: 1, S0037: 1, S0028: 1, L0751: 1, L0747: 1, L0749: 1, L0758: 1, |
| | | | | L0599: 1, L0603: 1, L0366: 1, S0011: 1, S0242: 1, S0194: 1, H0542: 1, H0423: 1, L3352: 1, L3562: 1 and H0506: 1. |
| | HDPBQ71 | 727200 | 369 | |
| | HDPBQ71 | 886067 | 370 | |
| 56 | HDPCL63 | 1019008 | 66 | AR281: 19, AR202: 15, AR194: 15, AR196: 14, AR315: 13, AR207: 13, AR206: 13, AR265: 13, AR205: 12, AR244: 12, AR195: 12, AR222: 11, AR033: 11, |
| | | | | AR235: 10, AR214: 10, AR263: 10, AR225: 10, AR218: 10, AR246: 10, AR197: 10, AR261: 10, AR284: 10, AR310: 10, AR170: 10, AR242: 10, AR224: 10, |
| | | | | AR198: 10, AR162: 10, AR311: 9, AR161: 9, AR172: 9, AR192: 9, AR241: 9, AR169: 9, AR223: 9, AR171: 9, AR291: 9, AR183: 9, AR314: 9, AR273: 9, |
| | | | | AR215: 9, AR163: 9, AR298: 9, AR216: 8, AR295: 8, AR217: 8, AR174: 8, AR240: 8, AR280: 8, AR282: 8, AR275: 8, AR193: 8, AR181: 8, AR243: 8, AR245: 8, |
| | | | | AR252: 8, AR221: 8, AR168: 8, AR264: 8, AR219: 8, AR285: 8, AR271: 8, AR165: 7, AR176: 7, AR177: 7, AR201: 7, AR296: 7, AR211: 7, AR191: 7, AR270: 7, |
| | | | | AR212: 7, AR175: 7, AR164: 7, AR269: 7, AR247: 7, AR184: 7, AR289: 7, AR288: 7, AR309: 7, AR286: 7, AR210: 7, AR213: 7, AR268: 7, AR250: 7, AR200: 7, |
| | | | | AR287: 7, AR189: 7, AR292: 7, AR053: 7, AR266: 7, AR104: 6, AR173: 6, AR204: 6, AR297: 6, AR283: 6, AR272: 6, AR290: 6, AR236: 6, AR182: 6, AR312: 6, |
| | | | | AR308: 6, AR180: 6, AR096: 6, AR277: 6, AR188: 6, AR293: 6, AR186: 6, AR299: 6, AR190: 5, AR052: 5, AR300: 5, AR199: 5, AR039: 5, AR251: 5, AR089: 5, |
| | | | | AR249: 5, AR178: 5, AR231: 5, AR294: 5, AR248: 5, AR274: 5, AR316: 5, AR055: 4, AR232: 4, AR257: 4, AR267: 4, AR313: 4, AR262: 4, AR258: 4, AR234: 4, |
| | | | | AR238: 4, AR229: 4, AR203: 4, AR254: 4, AR256: 3, AR061: 3, AR255: 3, AR179: 3, AR226: 3, AR185: 3, AR259: 3, AR227: 3, AR260: 3, AR230: 3, AR060: 3, |
| | | | | AR239: 3, AR233: 3, AR237: 3, AR253: 2, AR228: 2, L0751: 8, L0439: 6, L0659: 5, L0438: 4, L0744: 4, L0754: 4, L0777: 4, S0046: 3, H0052: 3, H0009: 3, |
| | | | | H0271: 3, L0662: 3, L0665: 3, L0747: 3, H0740: 2, S0358: 2, H0586: 2, H0251: 2, H0100: 2, L3905: 2, L0794: 2, L0803: 2, L0809: 2, H0519: 2, S0126: 2, L0749: 2, |
| | | | | L0731: 2, L0757: 2, L0605: 2, H0170: 1, H0717: 1, H0295: 1, H0294: 1, L0785: 1, S0116: 1, H0483: 1, L3659: 1, S0418: 1, H0742: 1, H0735: 1, S0045: 1, H0619: 1, |
| | | | | H0550: 1, H0370: 1, H0592: 1, H0574: 1, H0427: 1, H0599: 1, T0082: 1, S0010: 1, S0049: 1, H0544: 1, H0545: 1, H0570: 1, H0051: 1, S0388: 1, H0356: 1, |
| | | | | H0399: 1, H0266: 1, H0622: 1, L0194: 1, H0135: 1, H0412: 1, H0623: 1, H0059: 1, L0351: 1, T0042: 1, H0561: 1, S0294: 1, L0640: 1, L4747: 1, L5575: 1, L5565: 1, |
| | | | | L0800: 1, L0764: 1, L0648: 1, L0768: 1, L0774: 1, L0776: 1, L0657: 1, L0559: 1, L0519: 1, L0789: 1, L0792: 1, L0666: 1, L0664: 1, L0709: 1, L3811: 1, H0520: 1, |
| | | | | H0547: 1, S0328: 1, S0378: 1, H0754: 1, S0152: 1, H0521: 1, S0190: 1, S0406: 1, H0436: 1, L0748: 1, L0780: 1, L0759: 1, L0601: 1, L0366: 1 and H0423: 1. |
| | HDPCL63 | 847045 | 371 | |
| | HDPCL63 | 897484 | 372 | |
| 57 | HDPCO25 | 460682 | 67 | AR060: 2, AR055: 2, AR282: 2, H0521: 2, H0445: 2, H0394: 1, H0747: 1, H0581: 1, L0761: 1 and L0750: 1. |
| 58 | HDPFF39 | 588697 | 68 | AR194: 31, AR202: 28, AR198: 25, AR205: 24, AR206: 24, AR281: 24, AR246: 22, AR244: 21, AR263: 21, AR315: 20, AR241: 19, AR192: 19, AR243: 19, |
| | | | | AR282: 18, AR033: 17, AR280: 17, AR265: 17, AR275: 16, AR283: 16, AR273: 15, AR204: 15, AR285: 14, AR291: 14, AR277: 14, AR296: 14, AR247: 14, |
| | | | | AR039: 14, AR314: 13, AR284: 13, AR240: 13, AR289: 13, AR266: 13, AR310: 13, AR295: 13, AR298: 12, AR104: 12, AR183: 12, AR316: 12, AR274: 12, |
| | | | | AR089: 12, AR060: 12, AR055: 11, AR186: 11, AR182: 11, AR270: 11, AR292: 11, AR232: 11, AR286: 11, AR300: 11, AR053: 10, AR218: 10, AR268: 10, |
| | | | | AR294: 10, AR052: 10, AR312: 10, AR309: 10, AR096: 10, AR238: 10, AR251: 9, AR271: 9, AR185: 9, AR299: 9, AR269: 9, AR184: 9, AR229: 9, AR177: 9, |
| | | | | AR175: 9, AR219: 9, AR231: 9, AR313: 8, AR227: 8, AR213: 8, AR061: 8, AR234: 8, AR226: 8, AR290: 7, AR267: 7, AR293: 7, AR249: 7, AR248: 6, AR233: 6, |
| | | | | AR256: 6, AR253: 5, AR259: 5, AR237: 5, AR258: 5, AR179: 4, H0556: 1, H0255: 1, H0391: 1, S0049: 1, H0553: 1, L0455: 1, H0264: 1, H0561: 1, H0539: 1, |
| | | | | H0521: 1, H0522: 1, L0748: 1 and S0424: 1. |
| 59 | HDPFP29 | 628254 | 69 | AR311: 15, AR263: 15, AR223: 14, AR224: 14, AR264: 14, AR214: 14, AR195: 13, AR215: 12, AR222: 12, AR168: 12, AR309: 12, AR225: 12, AR169: 12, |
| | | | | AR161: 11, AR162: 11, AR235: 11, AR163: 11, AR171: 11, AR253: 11, AR217: 11, AR089: 10, AR213: 10, AR212: 10, AR252: 10, AR207: 10, AR165: 10, |
| | | | | AR240: 10, AR172: 10, AR216: 10, AR192: 9, AR053: 9, AR221: 9, AR166: 9, AR164: 9, AR170: 9, AR245: 9, AR308: 9, AR196: 8, AR282: 8, AR312: 8, |
| | | | | AR039: 8, AR246: 8, AR254: 8, AR295: 8, AR198: 8, AR288: 8, AR096: 7, AR316: 7, AR193: 7, AR277: 7, AR181: 7, AR177: 7, AR261: 7, AR250: 7, AR299: 7, |
| | | | | AR060: 7, AR189: 7, AR205: 7, AR174: 6, AR274: 6, AR191: 6, AR229: 6, AR271: 6, AR201: 6, AR243: 6, AR188: 6, AR210: 6, AR268: 6, AR247: 6, AR285: 6, |
| | | | | AR269: 6, AR197: 6, AR173: 6, AR313: 6, AR199: 6, AR272: 6, AR183: 5, AR175: 5, AR289: 5, AR300: 5, AR297: 5, AR275: 5, AR200: 5, AR185: 5, AR218: 5, |
| | | | | AR180: 5, AR190: 5, AR178: 5, AR238: 5, AR055: 5, AR262: 5, AR211: 5, AR291: 5, AR290: 5, AR033: 5, AR270: 5, AR203: 5, AR176: 5, AR296: 5, AR104: 5, |
| | | | | AR293: 5, AR219: 5, AR287: 5, AR286: 5, AR255: 5, AR236: 5, AR204: 5, AR234: 4, AR294: 4, AR257: 4, AR266: 4, AR179: 4, AR283: 4, AR239: 4, AR231: 4, |
| | | | | AR242: 4, AR182: 4, AR232: 4, AR258: 4, AR061: 3, AR226: 3, AR230: 3, AR267: 3, AR233: 3, AR227: 3, AR237: 3, AR256: 3, AR228: 3, AR260: 2, S0474: 6, |
| | | | | L0766: 6, L0662: 4, L0748: 4, H0556: 3, L0387: 3, L0659: 3, L0779: 3, H0255: 2, H0402: 2, S0360: 2, S0408: 2, S0410: 2, H0309: 2, H0591: 2, H0087: 2, L0764: 2, |
| | | | | L0809: 2, L0666: 2, L0663: 2, H0648: 2, L0751: 2, L0754: 2, L0747: 2, H0295: 1, S0116: 1, H0306: 1, S0376: 1, H0747: 1, H0749: 1, H0771: 1, H0455: 1, L0623: 1, |
| | | | | H0581: 1, H0052: 1, H0569: 1, H0123: 1, H0428: 1, H0039: 1, H0622: 1, T0006: 1, H0628: 1, H0673: 1, L0369: 1, L0770: 1, L0769: 1, L0638: 1, L0761: 1, |
| | | | | L0667: 1, L0772: 1, L0643: 1, L0771: 1, L0794: 1, L0803: 1, L0804: 1, L0774: 1, L0806: 1, L0805: 1, L0655: 1, L0657: 1, L0658: 1, L0783: 1, L0519: 1, L0789: 1, |
| | | | | L0352: 1, S0378: 1, H0521: 1, H0478: 1, L0744: 1, L0439: 1, L0777: 1, L0753: 1 and S0434: 1. |
| 60 | HDPGI49 | 785887 | 70 | AR274: 5, AR198: 5, AR164: 5, AR165: 5, AR313: 5, AR166: 4, AR053: 4, AR089: 4, AR161: 3, AR162: 3, AR172: 3, AR191: 3, AR205: 3, AR270: 3, AR178: 3, |
| | | | | AR200: 3, AR176: 3, AR189: 3, AR295: 3, AR291: 3, AR212: 3, AR175: 3, AR254: 3, AR188: 3, AR297: 3, AR174: 3, AR282: 3, AR173: 3, AR269: 3, AR190: 3, |
| | | | | AR272: 3, AR261: 3, AR257: 3, AR196: 3, AR287: 3, AR268: 3, AR262: 3, AR312: 3, AR267: 2, AR285: 2, AR300: 2, AR296: 2, AR275: 2, AR163: 2, AR179: 2, |
| | | | | AR243: 2, AR290: 2, AR104: 2, AR289: 2, AR293: 2, AR308: 2, AR183: 2, AR255: 2, AR207: 2, AR299: 2, AR185: 2, AR096: 2, AR316: 2, AR235: 2, AR195: 2, |
| | | | | AR193: 2, AR223: 2, AR055: 2, AR222: 2, AR246: 2, AR294: 2, AR277: 2, AR247: 1, AR181: 1, AR177: 1, AR192: 1, AR203: 1, AR238: 1, AR236: 1, AR252: 1, |
| | | | | AR258: 1, AR311: 1, AR171: 1, AR240: 1, AR217: 1, AR060: 1, AR260: 1, AR288: 1, AR201: 1, L0766: 6, L0776: 6, H0013: 5, L0777: 5, L0803: 4, S0442: 3, |
| | | | | S0002: 3, L0731: 3, L0759: 3, S0116: 2, S0358: 2, S0222: 2, H0575: 2, L0157: 2, H0038: 2, H0616: 2, L0805: 2, L0666: 2, H0521: 2, L0740: 2, L0361: 2, H0170: 1, |
| | | | | H0171: 1, S0114: 1, S0212: 1, S0376: 1, S0444: 1, S0360: 1, L3646: 1, H0749: 1, H0771: 1, L0717: 1, H0587: 1, S0414: 1, H0486: 1, H0250: 1, H0427: 1, H0098: 1, |
| | | | | H0036: 1, S0474: 1, H0596: 1, H0544: 1, H0546: 1, H0046: 1, S0003: 1, H0615: 1, T0006: 1, H0644: 1, H0111: 1, H0040: 1, H0477: 1, T0041: 1, H0561: 1, |
| | | | | H0342: 1, H0646: 1, S0142: 1, H0538: 1, L0763: 1, L0638: 1, L0804: 1, L0774: 1, L0809: 1, L0519: 1, L0788: 1, L4501: 1, L0665: 1, S0053: 1, S0374: 1, H0690: 1, |
| | | | | H0648: 1, H0651: 1, S0328: 1, H0539: 1, S0404: 1, H0436: 1, S0206: 1, L0750: 1, L0779: 1, H0445: 1, H0343: 1, S0434: 1, L0599: 1, L0595: 1 and H0506: 1. |
| 61 | HDPGT01 | 771583 | 71 | AR268: 5, AR244: 4, AR282: 3, AR251: 3, AR242: 3, AR241: 3, AR052: 3, AR184: 2, AR271: 2, AR310: 2, AR176: 2, AR194: 2, AR039: 2, AR309: 2, AR283: 1, |
| | | | | AR178: 1, AR289: 1, AR217: 1, AR257: 1, AR277: 1, AR170: 1, AR284: 1, AR221: 1, AR226: 1, AR265: 1, H0521: 3, S0278: 2, S0222: 2, H0284: 2, H0265: 1, |
| | | | | H0728: 1, S0007: 1, H0208: 1, H0586: 1, H0497: 1, H0642: 1, H0581: 1, H0052: 1, H0572: 1, H0024: 1, H0292: 1, H0428: 1, H0628: 1, H0135: 1, H0163: 1, |
| | | | | H0433: 1, S0002: 1, L2263: 1, L0438: 1, L3829: 1, H0539: 1, S0027: 1, S0032: 1, L0439: 1, S0436: 1, S0458: 1 and H0352: 1. |
| 62 | HDPHI51 | 460679 | 72 | AR195: 9, AR192: 9, AR207: 9, AR215: 8, AR264: 8, AR225: 7, AR263: 7, AR311: 7, AR168: 7, AR309: 7, AR252: 6, AR172: 6, AR245: 6, AR161: 6, AR162: 6, |
| | | | | AR163: 6, AR196: 6, AR223: 6, AR193: 6, AR177: 6, AR246: 6, AR224: 6, AR197: 5, AR308: 5, AR272: 5, AR214: 5, AR275: 5, AR222: 5, AR253: 5, AR176: 5, |
| | | | | AR261: 5, AR295: 5, AR291: 5, AR171: 5, AR218: 5, AR221: 5, AR219: 5, AR188: 5, AR165: 5, AR096: 5, AR217: 5, AR238: 5, AR288: 5, AR164: 5, AR175: 5, |
| | | | | AR166: 5, AR089: 5, AR271: 5, AR060: 4, AR240: 4, AR183: 4, AR201: 4, AR257: 4, AR169: 4, AR312: 4, AR316: 4, AR039: 4, AR274: 4, AR190: 4, AR191: 4, |
| | | | | AR181: 4, AR178: 4, AR236: 4, AR216: 4, AR180: 4, AR205: 4, AR210: 4, AR270: 4, AR170: 4, AR277: 4, AR243: 4, AR235: 4, AR212: 4, AR104: 4, AR199: 4, |
| | | | | AR189: 4, AR242: 4, AR213: 4, AR255: 4, AR289: 4, AR174: 3, AR285: 3, AR230: 3, AR286: 3, AR297: 3, AR299: 3, AR283: 3, AR313: 3, AR204: 3, AR287: 3, |
| | | | | AR173: 3, AR247: 3, AR229: 3, AR269: 3, AR296: 3, AR182: 3, AR293: 3, AR266: 3, AR258: 3, AR198: 3, AR237: 3, AR262: 3, AR033: 3, AR239: 3, AR185: 3, |
| | | | | AR231: 3, AR203: 3, AR200: 3, AR179: 3, AR211: 3, AR227: 3, AR268: 3, AR267: 3, AR294: 3, AR290: 3, AR234: 3, AR232: 3, AR226: 3, AR300: 2, AR250: 2, |
| | | | | AR282: 2, AR256: 2, AR061: 2, AR053: 2, AR233: 2, AR260: 2, AR228: 2, AR055: 2, H0521: 1 |
| 63 | HDPJM30 | 879325 | 73 | AR268: 8, AR289: 6, AR184: 6, AR266: 5, AR252: 5, AR223: 5, AR169: 5, AR290: 4, AR286: 4, AR224: 4, AR194: 4, AR257: 4, AR214: 4, AR310: 4, AR270: 4, |
| | | | | AR165: 4, AR294: 3, AR291: 3, AR222: 3, AR183: 3, AR235: 3, AR215: 3, AR282: 3, AR284: 3, AR297: 3, AR267: 3, AR260: 3, AR217: 2, AR262: 2, AR182: 2, |
| | | | | AR258: 2, AR309: 2, AR172: 2, AR288: 2, AR298: 2, AR225: 2, AR269: 2, AR296: 2, AR176: 2, AR248: 2, AR166: 2, AR216: 2, AR250: 2, AR292: 2, AR164: 2, |
| | | | | AR263: 2, AR162: 2, AR287: 2, AR255: 2, AR053: 2, AR061: 2, AR249: 2, AR163: 2, AR293: 2, AR285: 2, AR253: 2, AR312: 2, AR178: 2, AR313: 2, AR277: 2, |
| | | | | AR256: 2, AR205: 2, AR052: 1, AR203: 1, AR238: 1, AR274: 1, AR171: 1, AR295: 1, AR231: 1, AR247: 1, AR206: 1, AR181: 1, AR221: 1, AR226: 1, AR230: 1, |
| | | | | AR179: 1, AR283: 1, AR232: 1, AR200: 1, AR239: 1, AR186: 1, AR237: 1, AR195: 1, AR228: 1, AR240: 1, AR233: 1, AR227: 1, AR246: 1, AR199: 1, AR173: 1, |
| | | | | AR243: 1, AR089: 1, AR177: 1, L0800: 4, H0617: 3, H0521: 3, L0070: 3, L0742: 3, L0770: 2, L0771: 2, L0794: 2, H0689: 2, L0741: 2, L0439: 2, H0445: 2, |
| | | | | H0224: 1, H0637: 1, H0370: 1, H0250: 1, H0052: 1, H0194: 1, L0455: 1, S0422: 1, L0761: 1, L0764: 1, L0806: 1, L0659: 1, L5622: 1, L0789: 1, L0790: 1, L0792: 1, |
| | | | | H0672: 1, S0152: 1, S0434: 1 and S0436: 1. |
| | HDPJM30 | 603517 | 373 | |
| 64 | HDPMM88 | 972734 | 74 | AR202: 35, AR096: 34, AR194: 33, AR206: 31, AR244: 25, AR241: 22, AR268: 21, AR281: 20, AR290: 19, AR265: 17, AR315: 15, AR184: 15, AR246: 15, |
| | | | | AR310: 14, AR192: 13, AR269: 12, AR270: 12, AR282: 12, AR243: 11, AR314: 11, AR280: 11, AR267: 10, AR292: 10, AR183: 9, AR263: 9, AR299: 9, |
| | | | | AR284: 9, AR198: 9, AR055: 8, AR205: 8, AR251: 8, AR273: 8, AR266: 8, AR313: 8, AR298: 8, AR283: 8, AR039: 8, AR033: 8, AR204: 7, AR052: 7, AR277: 7, |
| | | | | AR177: 7, AR238: 7, AR234: 7, AR061: 6, AR247: 6, AR295: 6, AR104: 6, AR300: 6, AR285: 6, AR089: 6, AR316: 6, AR186: 6, AR185: 6, AR240: 5, AR053: 5, |
| | | | | AR249: 5, AR231: 5, AR271: 5, AR291: 5, AR289: 5, AR182: 5, AR312: 5, AR175: 4, AR253: 4, AR229: 4, AR248: 4, AR232: 4, AR309: 4, AR215: 4, AR226: 4, |
| | | | | AR274: 4, AR219: 4, AR286: 4, AR296: 4, AR227: 4, AR237: 4, AR218: 4, AR259: 3, AR275: 3, AR294: 3, AR213: 3, AR242: 3, AR179: 3, AR293: 3, AR060: 3, |
| | | | | AR170: 3, AR193: 3, AR233: 3, AR169: 2, AR224: 2, AR256: 2, AR257: 2, AR258: 2, AR171: 2, AR217: 2, AR172: 2, AR264: 1, AR195: 1, AR308: 1, AR163: 1, |
| | | | | AR261: 1, AR161: 1, AR162: 1, AR199: 1, AR221: 1, L0754: 2, L0777: 2, H0717: 1, H0740: 1, S0212: 1, S0360: 1, S0408: 1, H0747: 1, H0004: 1, H0581: 1, |
| | | | | L0142: 1, H0674: 1, H0646: 1, S0422: 1, L0809: 1, L0787: 1, H0521: 1 and H0522: 1. |
| | HDPMM88 | 906121 | 374 | |
| | HDPMM88 | 902299 | 375 | |
| | HDPMM88 | 885059 | 376 | |
| | HDPMM88 | 874074 | 377 | |
| | HDPMM88 | 854246 | 378 | |
| | HDPMM88 | 854245 | 379 | |
| 65 | HDPNC61 | 637585 | 75 | AR241: 10, AR184: 10, AR313: 8, AR245: 8, AR242: 8, AR265: 8, AR162: 7, AR192: 7, AR161: 7, AR271: 7, AR163: 7, AR244: 7, AR052: 6, AR191: 6, |
| | | | | AR183: 6, AR312: 6, AR196: 6, AR173: 6, AR197: 6, AR273: 6, AR198: 6, AR204: 6, AR165: 6, AR053: 5, AR310: 5, AR166: 5, AR274: 5, AR264: 5, AR229: 5, |
| | | | | AR299: 5, AR164: 5, AR175: 5, AR174: 5, AR270: 5, AR039: 5, AR238: 5, AR311: 5, AR275: 5, AR300: 5, AR189: 5, AR292: 5, AR033: 5, AR200: 5, AR096: 5, |
| | | | | AR177: 5, AR182: 5, AR219: 5, AR296: 5, AR309: 4, AR178: 4, AR218: 4, AR206: 4, AR186: 4, AR240: 4, AR213: 4, AR205: 4, AR266: 4, AR055: 4, AR293: 4, |
| | | | | AR250: 4, AR199: 4, AR247: 4, AR170: 4, AR188: 4, AR181: 4, AR185: 4, AR226: 4, AR261: 4, AR269: 4, AR089: 4, AR272: 4, AR308: 4, AR290: 4, AR285: 4, |
| | | | | AR315: 4, AR195: 4, AR254: 4, AR284: 4, AR193: 4, AR295: 4, AR268: 3, AR258: 3, AR236: 3, AR243: 3, AR212: 3, AR234: 3, AR253: 3, AR190: 3, AR316: 3, |
| | | | | AR298: 3, AR235: 3, AR286: 3, AR291: 3, AR179: 3, AR262: 3, AR217: 3, AR294: 3, AR282: 3, AR314: 3, AR104: 3, AR246: 3, AR257: 3, AR237: 3, AR249: 3, |
| | | | | AR168: 3, AR203: 3, AR233: 3, AR248: 3, AR280: 3, AR255: 3, AR180: 3, AR259: 3, AR277: 3, AR230: 3, AR267: 3, AR297: 3, AR201: 3, AR207: 3, AR231: 3, |
| | | | | AR216: 2, AR223: 2, AR289: 2, AR171: 2, AR288: 2, AR221: 2, AR287: 2, AR060: 2, AR227: 2, AR225: 2, AR211: 2, AR176: 2, AR239: 2, AR222: 2, AR210: 2, |
| | | | | AR232: 2, AR256: 1, AR260: 1, AR263: 1, AR283: 1, AR194: 1, AR061: 1, AR228: 1, L0766: 3, L0764: 2, L0771: 2, L0439: 2, L0731: 2, H0739: 1, H0747: 1, |
| | | | | H0749: 1, H0415: 1, H0057: 1, T0006: 1, L0598: 1, L0800: 1, L0768: 1, L0794: 1, L0803: 1, L0774: 1, L0807: 1, L0783: 1, L0519: 1, L0664: 1, L4560: 1, L0352: 1, |
| | | | | H0522: 1, L0748: 1, L0747: 1, L0749: 1 and L0756: 1. |
| 66 | HDPOJ08 | 731863 | 76 | AR250: 19, AR254: 19, AR269: 19, AR268: 16, AR248: 16, AR290: 15, AR249: 13, AR270: 12, AR253: 12, AR183: 10, AR267: 10, AR180: 10, AR161: 9, |
| | | | | AR162: 9, AR165: 9, AR164: 9, AR163: 9, AR181: 8, AR166: 8, AR173: 8, AR174: 8, AR184: 7, AR235: 7, AR252: 7, AR229: 7, AR272: 7, AR176: 7, AR177: 6, |
| | | | | AR178: 6, AR265: 6, AR239: 6, AR182: 6, AR175: 6, AR096: 6, AR291: 5, AR189: 5, AR288: 5, AR287: 5, AR190: 5, AR251: 5, AR263: 5, AR230: 5, AR179: 5, |
| | | | | AR228: 5, AR236: 4, AR234: 4, AR257: 4, AR193: 4, AR238: 4, AR237: 4, AR285: 4, AR233: 4, AR289: 4, AR185: 4, AR311: 4, AR286: 4, AR308: 4, AR226: 4, |
| | | | | AR282: 4, AR264: 4, AR240: 4, AR232: 4, AR201: 4, AR261: 4, AR292: 4, AR089: 4, AR210: 4, AR212: 4, AR295: 4, AR247: 4, AR297: 4, AR275: 4, AR262: 4, |
| | | | | AR245: 4, AR195: 4, AR188: 4, AR231: 4, AR197: 4, AR309: 4, AR196: 4, AR284: 4, AR191: 4, AR299: 4, AR313: 3, AR255: 3, AR199: 3, AR200: 3, AR293: 3, |
| | | | | AR300: 3, AR316: 3, AR296: 3, AR246: 3, AR203: 3, AR243: 3, AR294: 3, AR214: 3, AR274: 3, AR104: 3, AR060: 3, AR219: 3, AR298: 3, AR033: 3, AR227: 3, |
| | | | | AR053: 3, AR221: 2, AR271: 2, AR312: 2, AR223: 2, AR218: 2, AR061: 2, AR259: 2, AR224: 2, AR217: 2, AR277: 2, AR225: 2, AR258: 2, AR215: 2, AR039: 2, |
| | | | | AR168: 2, AR266: 2, AR211: 2, AR055: 2, AR222: 2, AR205: 2, AR216: 2, AR202: 1, AR213: 1, AR260: 1, AR256: 1, AR314: 1, S0474: 29, L0766: 11, |
| | | | | H0521: 10, L0803: 7, L0748: 6, L0717: 5, L0759: 5, S0003: 4, L3832: 4, H0663: 3, H0156: 3, L0598: 3, L0770: 3, L0771: 3, L0804: 3, L2439: 3, H0522: 3, L0731: 3, |
| | | | | S0436: 3, H0486: 2, S0426: 2, L0805: 2, L0659: 2, L2260: 2, S0126: 2, S0406: 2, L0749: 2, L0755: 2, L0757: 2, L0758: 2, L0590: 2, S0026: 2, H0716: 1, H0341: 1, |
| | | | | S0212: 1, L0481: 1, S0444: 1, S0360: 1, L3649: 1, H0637: 1, H0580: 1, H0734: 1, H0749: 1, L3092: 1, H0619: 1, L3388: 1, H0586: 1, H0574: 1, H0427: 1, L0021: 1, |
| | | | | H0575: 1, H0318: 1, H0545: 1, H0024: 1, H0373: 1, H0071: 1, H0179: 1, S0214: 1, H0428: 1, H0674: 1, H0591: 1, H0616: 1, H0488: 1, H0494: 1, S0438: 1, |
| | | | | S0440: 1, H0647: 1, S0142: 1, UNKWN: 1, L0369: 1, L0763: 1, L0769: 1, L0646: 1, L0648: 1, L0662: 1, L0650: 1, L0775: 1, L0653: 1, L0776: 1, L0656: 1, |
| | | | | L0782: 1, L0809: 1, L0519: 1, S0052: 1, L2657: 1, H0144: 1, L3823: 1, H0520: 1, H0547: 1, H0660: 1, S0380: 1, L0742: 1, L0439: 1, L0750: 1, L0777: 1, S0031: 1, |
| | | | | H0445: 1, S0434: 1, H0665: 1, H0667: 1, S0194: 1, S0276: 1 and S0458: 1. |
| 67 | HDPOZ56 | 1352319 | 77 | AR248: 20, AR253: 20, AR281: 16, AR244: 14, AR273: 13, AR202: 12, AR315: 12, AR310: 11, AR263: 11, AR224: 10, AR280: 10, AR194: 9, AR284: 9, |
| | | | | AR223: 9, AR251: 9, AR165: 9, AR215: 9, AR265: 9, AR206: 9, AR198: 9, AR311: 9, AR164: 9, AR221: 9, AR249: 9, AR264: 8, AR166: 8, AR172: 8, AR222: 8, |
| | | | | AR289: 8, AR212: 8, AR171: 8, AR272: 8, AR161: 8, AR225: 8, AR235: 8, AR266: 8, AR207: 8, AR162: 8, AR214: 8, AR168: 7, AR205: 7, AR216: 7, AR163: 7, |
| | | | | AR217: 7, AR246: 7, AR052: 7, AR283: 7, AR169: 7, AR192: 7, AR245: 7, AR242: 7, AR282: 7, AR053: 7, AR295: 7, AR312: 7, AR291: 7, AR285: 7, AR274: 7, |
| | | | | AR213: 7, AR308: 6, AR268: 6, AR238: 6, AR261: 6, AR184: 6, AR298: 6, AR250: 6, AR288: 6, AR183: 6, AR239: 6, AR292: 6, AR033: 6, AR232: 6, AR290: 6, |
| | | | | AR219: 6, AR197: 6, AR286: 6, AR243: 6, AR270: 6, AR269: 6, AR309: 6, AR287: 6, AR180: 6, AR277: 5, AR196: 5, AR271: 5, AR297: 5, AR314: 5, AR275: 5, |
| | | | | AR204: 5, AR176: 5, AR254: 5, AR195: 5, AR299: 5, AR182: 5, AR170: 5, AR237: 5, AR210: 5, AR227: 5, AR218: 5, AR177: 5, AR247: 5, AR294: 5, AR174: 5, |
| | | | | AR039: 5, AR296: 5, AR257: 5, AR089: 5, AR240: 5, AR293: 5, AR200: 4, AR316: 4, AR181: 4, AR255: 4, AR230: 4, AR252: 4, AR096: 4, AR236: 4, AR241: 4, |
| | | | | AR061: 4, AR199: 4, AR186: 4, AR234: 4, AR262: 4, AR175: 4, AR313: 4, AR300: 4, AR178: 4, AR258: 4, AR229: 4, AR231: 4, AR228: 4, AR203: 4, AR226: 4, |
| | | | | AR267: 4, AR191: 4, AR256: 4, AR193: 4, AR188: 4, AR211: 3, AR055: 3, AR189: 3, AR060: 3, AR233: 3, AR104: 3, AR259: 3, AR185: 3, AR260: 3, AR173: 3, |
| | | | | AR201: 3, AR190: 3, AR179: 2, H0521: 17, H0522: 5, L0665: 4, H0638: 3, H0658: 3, H0255: 2, H0250: 2, H0618: 2, L0804: 2, L0779: 2, H0542: 2, H0663: 1, |
| | | | | S0046: 1, H0617: 1, H0560: 1, H0641: 1, S0422: 1, S0426: 1, H0695: 1, L0655: 1, H0689: 1, H0435: 1, H0555: 1, H0543: 1, H0423: 1 and H0506: 1. |
| | HDPOZ56 | 815653 | 380 | |
| | HDPOZ56 | 743479 | 381 | |
| 68 | HDPPN86 | 1037893 | 78 | AR212: 4, AR235: 3, AR266: 2, AR221: 2, AR207: 2, AR205: 2, AR216: 2, AR168: 2, AR282: 2, AR257: 2, AR181: 1, AR311: 1, AR271: 1, AR161: 1, AR264: 1, |
| | | | | AR165: 1, AR172: 1, AR295: 1, AR164: 1, AR162: 1, AR176: 1, AR163: 1, AR171: 1, AR285: 1, AR289: 1, AR277: 1, AR238: 1, AR089: 1, AR234: 1, AR211: 1 |
| | | | | H0542: 4, S0418: 3, H0543: 3, S0038: 2, H0341: 1, L0018: 1, H0069: 1, H0090: 1, H0056: 1, H0494: 1, H0522: 1 and H0423: 1. |
| | HDPPN86 | 895711 | 382 | |
| 69 | HDPSB18 | 1043263 | 79 | AR197: 9, AR060: 8, AR253: 8, AR161: 8, AR162: 8, AR163: 8, AR165: 8, AR164: 7, AR089: 7, AR166: 7, AR204: 7, AR192: 7, AR207: 7, AR177: 6, AR193: 6, |
| | | | | AR185: 6, AR235: 6, AR271: 6, AR195: 6, AR053: 6, AR312: 6, AR233: 6, AR232: 6, AR174: 5, AR282: 5, AR104: 5, AR299: 5, AR227: 5, AR212: 5, AR181: 5, |
| | | | | AR309: 5, AR264: 5, AR205: 5, AR308: 5, AR178: 5, AR237: 5, AR061: 5, AR313: 5, AR300: 5, AR175: 5, AR263: 5, AR247: 5, AR223: 5, AR173: 5, AR226: 5, |
| | | | | AR272: 5, AR243: 5, AR240: 5, AR311: 5, AR055: 5, AR269: 5, AR201: 4, AR229: 4, AR286: 4, AR182: 4, AR246: 4, AR236: 4, AR295: 4, AR316: 4, AR285: 4, |
| | | | | AR261: 4, AR293: 4, AR275: 4, AR291: 4, AR228: 4, AR274: 4, AR296: 4, AR176: 4, AR213: 4, AR297: 4, AR179: 4, AR270: 4, AR254: 4, AR039: 4, AR239: 4, |
| | | | | AR262: 4, AR288: 4, AR180: 4, AR287: 4, AR096: 4, AR238: 4, AR183: 4, AR203: 4, AR033: 4, AR257: 4, AR234: 4, AR230: 4, AR294: 3, AR198: 3, AR289: 3, |
| | | | | AR255: 3, AR266: 3, AR258: 3, AR267: 3, AR283: 3, AR168: 3, AR217: 3, AR231: 3, AR214: 3, AR277: 3, AR252: 3, AR196: 3, AR250: 3, AR218: 3, AR245: 3, |
| | | | | AR190: 2, AR216: 2, AR268: 2, AR224: 2, AR290: 2, AR188: 2, AR191: 2, AR189: 2, AR221: 2, AR260: 2, AR222: 2, AR200: 2, AR171: 2, AR211: 2, AR210: 2, |
| | | | | AR219: 2, AR172: 2, AR199: 2, AR215: 1, AR170: 1, AR225: 1, AR256: 1, L0769: 5, L0774: 3, H0656: 2, S0442: 2, S0358: 2, S0360: 2, S0278: 2, H0620: 2, |
| | | | | L0500: 2, L0775: 2, L0710: 2, L0777: 2, L0752: 2, L0588: 2, H0149: 1, H0295: 1, T0049: 1, 10381: 1, H0484: 1, H0483: 1, H0638: 1, S0420: 1, S0444: 1, S0408: 1, |
| | | | | S0045: 1, H0587: 1, H0318: 1, H0204: 1, H0530: 1, H0545: 1, H0178: 1, L0471: 1, L0142: 1, H0181: 1, H0087: 1, H0412: 1, H0623: 1, H0100: 1, S0438: 1, |
| | | | | H0633: 1, H0646: 1, H0529: 1, L0506: 1, L0761: 1, L0764: 1, L0648: 1, L0766: 1, L0497: 1, L0493: 1, L0511: 1, L0665: 1, L2260: 1, H0698: 1, H0690: 1, H0521: 1, |
| | | | | S0406: 1, S3014: 1, L0747: 1, L0780: 1, H0543: 1 and H0422: 1. |
| | HDPSB18 | 903816 | 383 | |
| | HDPSB18 | 905414 | 384 | |
| | HDPSB18 | 732097 | 385 | |
| 70 | HDPSH53 | 1309174 | 80 | AR214: 47, AR207: 47, AR263: 40, AR222: 34, AR169: 33, AR235: 33, AR212: 31, AR213: 30, AR223: 29, AR170: 29, AR311: 29, AR309: 28, AR168: 28, |
| | | | | AR195: 27, AR264: 26, AR192: 26, AR224: 26, AR216: 24, AR295: 24, AR171: 24, AR245: 24, AR217: 23, AR172: 23, AR198: 22, AR308: 22, AR271: 22, |
| | | | | AR161: 21, AR162: 21, AR163: 21, AR252: 21, AR261: 21, AR288: 21, AR053: 20, AR166: 20, AR197: 20, AR242: 20, AR201: 20, AR033: 19, AR205: 19, |
| | | | | AR177: 19, AR312: 19, AR193: 19, AR165: 18, AR240: 18, AR229: 18, AR277: 18, AR254: 18, AR164: 18, AR225: 17, AR246: 17, AR297: 17, AR236: 17, |
| | | | | AR285: 16, AR291: 16, AR275: 16, AR238: 16, AR272: 16, AR174: 15, AR296: 15, AR274: 15, AR232: 15, AR286: 14, AR282: 14, AR230: 13, AR181: 13, |
| | | | | AR211: 13, AR250: 13, AR226: 13, AR239: 13, AR287: 12, AR227: 12, AR283: 12, AR247: 12, AR237: 12, AR289: 12, AR215: 12, AR316: 12, AR204: 12, |
| | | | | AR210: 12, AR176: 12, AR180: 12, AR293: 12, AR231: 11, AR270: 11, AR300: 11, AR299: 11, AR262: 11, AR175: 11, AR185: 11, AR243: 11, AR196: 11, |
| | | | | AR221: 11, AR258: 10, AR269: 10, AR200: 10, AR313: 10, AR089: 10, AR253: 10, AR183: 10, AR294: 10, AR268: 9, AR061: 9, AR104: 9, AR173: 9, AR234: 9, |
| | | | | AR199: 9, AR096: 9, AR179: 9, AR218: 8, AR178: 8, AR233: 8, AR257: 8, AR219: 8, AR255: 8, AR266: 8, AR290: 8, AR267: 8, AR188: 8, AR228: 8, AR189: 7, |
| | | | | AR055: 7, AR060: 7, AR203: 7, AR191: 7, AR256: 7, AR039: 7, AR260: 6, AR182: 6, AR190: 6, L0804: 2, H0521: 2, L0021: 1, H0617: 1, H0623: 1, L0648: 1 and |
| | | | | L0665: 1. |
| | HDPSH53 | 1040056 | 386 | |
| | HDPSH53 | 882768 | 387 | |
| 71 | HDPSP01 | 1352280 | 81 | AR169: 8, AR235: 5, AR265: 5, AR180: 4, AR176: 4, AR161: 4, AR163: 4, AR311: 4, AR162: 4, AR269: 3, AR165: 3, AR172: 3, AR171: 3, AR222: 3, AR166: 3, |
| | | | | AR183: 3, AR225: 3, AR168: 3, AR282: 3, AR224: 3, AR245: 3, AR272: 3, AR196: 3, AR223: 3, AR297: 3, AR221: 2, AR182: 2, AR298: 2, AR164: 2, AR261: 2, |
| | | | | AR257: 2, AR170: 2, AR270: 2, AR289: 2, AR216: 2, AR173: 2, AR191: 2, AR214: 2, AR287: 2, AR296: 2, AR242: 2, AR228: 2, AR247: 2, AR295: 2, AR255: 2, |
| | | | | AR192: 2, AR240: 2, AR174: 2, AR227: 2, AR053: 2, AR275: 2, AR203: 2, AR266: 2, AR288: 2, AR215: 2, AR277: 2, AR239: 2, AR291: 2, AR264: 2, AR263: 2, |
| | | | | AR285: 2, AR230: 2, AR190: 2, AR310: 2, AR189: 2, AR274: 1, AR181: 1, AR286: 1, AR179: 1, AR226: 1, AR246: 1, AR231: 1, AR178: 1, AR175: 1, AR238: 1, |
| | | | | AR233: 1, AR273: 1, AR290: 1, AR243: 1, AR200: 1, AR293: 1, AR294: 1, AR309: 1, AR284: 1, AR312: 1, AR313: 1, AR234: 1, AR229: 1, AR061: 1, AR300: 1, |
| | | | | AR217: 1, AR268: 1, AR292: 1, AR089: 1, AR262: 1, L0769: 6, L0751: 5, L0752: 5, H0617: 4, L0806: 4, L0731: 4, L0771: 3, L0774: 3, H0370: 2, S0314: 2, |
| | | | | H0551: 2, H0059: 2, L0792: 2, L0745: 2, L0750: 2, L0777: 2, S0444: 1, H0728: 1, S0132: 1, H0550: 1, H0392: 1, H0586: 1, H0427: 1, H0618: 1, H0052: 1, |
| | | | | H0545: 1, H0123: 1, H0620: 1, S0051: 1, H0135: 1, H0100: 1, H0494: 1, L0800: 1, L0764: 1, L0804: 1, L0775: 1, L0805: 1, L0783: 1, L0809: 1, L0666: 1, L0665: 1, |
| | | | | H0684: 1, S0328: 1, H0521: 1, H0555: 1, H0478: 1, L0743: 1, L0747: 1, L0779: 1, L0780: 1, L0755: 1 and S0434: 1. |
| | HDPSP01 | 689129 | 388 | |
| 72 | HDPSP54 | 744440 | 82 | AR263: 53, AR207: 53, AR214: 51, AR169: 41, AR224: 40, AR222: 38, AR223: 37, AR195: 36, AR235: 32, AR217: 31, AR212: 31, AR168: 30, AR172: 30, |
| | | | | AR311: 29, AR053: 28, AR192: 28, AR196: 28, AR171: 27, AR198: 27, AR213: 27, AR221: 27, AR161: 26, AR264: 26, AR252: 26, AR162: 25, AR170: 25, |
| | | | | AR210: 25, AR245: 24, AR033: 23, AR225: 23, AR216: 23, AR163: 22, AR089: 22, AR261: 22, AR215: 21, AR271: 21, AR177: 21, AR181: 21, AR104: 21, |
| | | | | AR295: 20, AR218: 20, AR236: 19, AR193: 19, AR191: 19, AR211: 19, AR197: 18, AR185: 18, AR055: 18, AR219: 18, AR201: 18, AR240: 18, AR165: 17, |
| | | | | AR316: 17, AR166: 17, AR299: 17, AR164: 17, AR060: 17, AR253: 17, AR174: 16, AR242: 16, AR288: 16, AR199: 16, AR205: 16, AR246: 15, AR282: 15, |
| | | | | AR039: 15, AR238: 15, AR308: 15, AR229: 15, AR175: 14, AR188: 14, AR285: 14, AR297: 14, AR254: 14, AR189: 14, AR232: 14, AR277: 13, AR300: 13, |
| | | | | AR287: 13, AR243: 13, AR230: 13, AR312: 13, AR291: 13, AR286: 12, AR204: 12, AR250: 12, AR226: 12, AR173: 12, AR200: 12, AR239: 12, AR176: 12, |
| | | | | AR274: 11, AR296: 11, AR096: 11, AR309: 11, AR203: 11, AR231: 11, AR270: 11, AR247: 11, AR293: 11, AR190: 11, AR283: 10, AR258: 10, AR267: 10, |
| | | | | AR234: 10, AR289: 10, AR262: 10, AR178: 10, AR268: 10, AR227: 10, AR313: 10, AR180: 10, AR237: 10, AR179: 9, AR257: 9, AR182: 9, AR269: 9, AR255: 9, |
| | | | | AR233: 9, AR260: 9, AR061: 9, AR183: 9, AR290: 8, AR275: 8, AR272: 8, AR266: 8, AR294: 7, AR256: 7, AR228: 6, L0740: 8, L0662: 3, L0659: 3, L0663: 3, |
| | | | | S0422: 2, L0646: 2, L0766: 2, L0439: 2, L0779: 2, H0171: 1, S6024: 1, S0110: 1, S0360: 1, H0411: 1, H0455: 1, S0474: 1, H0510: 1, S0438: 1, L0637: 1, L5565: 1, |
| | | | | L0771: 1, L0773: 1, L0794: 1, L0804: 1, L0787: 1, L0665: 1, L0438: 1, H0521: 1, S0406: 1, L0754: 1, L0755: 1 and L0758: 1. |
| | HDPSP54 | 502472 | 389 | |
| 73 | HDPTD15 | 692917 | 83 | AR214: 32, AR223: 30, AR222: 27, AR224: 27, AR225: 24, AR169: 24, AR165: 22, AR164: 22, AR221: 22, AR215: 22, AR212: 22, AR195: 21, AR308: 21, |
| | | | | AR217: 21, AR170: 20, AR172: 20, AR166: 20, AR168: 20, AR171: 19, AR216: 17, AR264: 16, AR162: 15, AR207: 15, AR161: 15, AR193: 15, AR163: 15, |
| | | | | AR235: 15, AR311: 14, AR196: 14, AR250: 13, AR173: 13, AR245: 12, AR261: 12, AR242: 12, AR297: 12, AR288: 12, AR210: 12, AR199: 11, AR236: 11, |
| | | | | AR263: 11, AR254: 10, AR191: 10, AR181: 10, AR312: 10, AR213: 10, AR247: 10, AR197: 10, AR287: 10, AR189: 10, AR188: 10, AR252: 9, AR255: 9, |
| | | | | AR174: 9, AR313: 9, AR053: 9, AR178: 9, AR190: 9, AR200: 9, AR201: 9, AR176: 9, AR257: 8, AR253: 8, AR240: 8, AR230: 8, AR269: 8, AR272: 8, AR211: 8, |
| | | | | AR192: 8, AR262: 8, AR229: 8, AR033: 8, AR180: 8, AR309: 8, AR239: 8, AR238: 7, AR258: 7, AR291: 7, AR203: 7, AR260: 7, AR285: 7, AR270: 7, AR295: 6, |
| | | | | AR271: 6, AR293: 6, AR089: 6, AR226: 6, AR183: 6, AR177: 6, AR266: 6, AR175: 6, AR296: 6, AR198: 6, AR277: 5, AR251: 5, AR205: 5, AR234: 5, AR282: 5, |
| | | | | AR290: 5, AR300: 5, AR231: 5, AR286: 5, AR299: 5, AR274: 5, AR232: 5, AR316: 5, AR268: 5, AR289: 5, AR179: 5, AR275: 5, AR052: 5, AR228: 5, AR246: 5, |
| | | | | AR182: 4, AR227: 4, AR060: 4, AR204: 4, AR185: 4, AR267: 4, AR256: 4, AR243: 4, AR248: 4, AR096: 4, AR294: 4, AR283: 4, AR237: 4, AR233: 4, AR219: 3, |
| | | | | AR249: 3, AR218: 3, AR186: 2, AR039: 2, AR310: 2, AR206: 2, AR104: 2, AR055: 2, AR292: 2, AR061: 2, AR298: 2, AR259: 1, AR284: 1, AR194: 1, H0521: 1 |
| 74 | HDPUW68 | 812737 | 84 | AR253: 15, AR052: 14, AR213: 11, AR184: 11, AR230: 11, AR228: 9, AR170: 9, AR250: 8, AR168: 8, AR254: 8, AR225: 6, AR297: 6, AR053: 6, AR251: 5, |
| | | | | AR267: 5, AR248: 5, AR268: 5, AR221: 5, AR096: 5, AR214: 5, AR238: 5, AR178: 5, AR249: 5, AR216: 5, AR173: 5, AR239: 5, AR236: 5, AR166: 5, AR182: 4, |
| | | | | AR161: 4, AR162: 4, AR217: 4, AR269: 4, AR282: 4, AR163: 4, AR224: 4, AR222: 4, AR237: 4, AR296: 4, AR257: 4, AR263: 4, AR244: 4, AR227: 4, AR258: 4, |
| | | | | AR252: 4, AR291: 4, AR229: 4, AR219: 4, AR287: 4, AR290: 4, AR275: 4, AR264: 4, AR183: 4, AR175: 4, AR223: 4, AR199: 4, AR308: 4, AR171: 3, AR194: 3, |
| | | | | AR246: 3, AR277: 3, AR260: 3, AR288: 3, AR240: 3, AR274: 3, AR191: 3, AR284: 3, AR243: 3, AR312: 3, AR293: 3, AR179: 3, AR233: 3, AR300: 3, AR261: 3, |
| | | | | AR218: 3, AR165: 3, AR061: 3, AR231: 3, AR033: 3, AR298: 3, AR316: 3, AR164: 3, AR181: 3, AR255: 3, AR270: 3, AR189: 3, AR313: 3, AR309: 3, AR234: 2, |
| | | | | AR186: 2, AR247: 2, AR195: 2, AR285: 2, AR232: 2, AR292: 2, AR185: 2, AR226: 2, AR180: 2, AR299: 2, AR289: 2, AR271: 2, AR193: 2, AR089: 2, AR203: 2, |
| | | | | AR311: 2, AR060: 2, AR172: 2, AR310: 2, AR215: 2, AR177: 2, AR266: 2, AR262: 2, AR272: 2, AR188: 2, AR196: 2, AR169: 1, AR212: 1, AR210: 1, AR055: 1, |
| | | | | AR283: 1, AR190: 1, AR241: 1, AR295: 1, AR286: 1, AR201: 1, AR294: 1, AR104: 1, AR256: 1, AR205: 1, AR039: 1, H0677: 47, H0521: 14, H0295: 3, H0587: 3, |
| | | | | H0556: 2, H0656: 2, H0638: 2, H0411: 2, S0002: 2, L0766: 2, L0776: 2, L0659: 2, L0809: 2, H0670: 2, H0522: 2, S0404: 2, L0743: 2, L0744: 2, L0740: 2, L0731: 2, |
| | | | | S0134: 1, H0657: 1, H0254: 1, S0476: 1, S0278: 1, H0486: 1, H0575: 1, H0606: 1, H0135: 1, H0561: 1, S0438: 1, L0761: 1, L0768: 1, L0655: 1, L2261: 1, S0374: 1, |
| | | | | H0690: 1, H0435: 1, H0658: 1, H0696: 1, H0678: 1, L0779: 1, L0752: 1, H0445: 1, S0434: 1 and S0436: 1. |
| 75 | HDPWN93 | 992925 | 85 | AR313: 5, AR089: 5, AR207: 5, AR096: 5, AR219: 5, AR277: 4, AR299: 4, AR162: 4, AR161: 4, AR165: 4, AR274: 4, AR104: 4, AR193: 4, AR164: 4, AR240: 4, |
| | | | | AR166: 4, AR163: 4, AR264: 4, AR282: 4, AR250: 4, AR316: 4, AR218: 3, AR215: 3, AR185: 3, AR178: 3, AR196: 3, AR311: 3, AR216: 3, AR039: 3, AR300: 3, |
| | | | | AR055: 3, AR225: 3, AR245: 3, AR312: 3, AR060: 3, AR291: 3, AR195: 3, AR188: 3, AR198: 3, AR269: 2, AR257: 2, AR308: 2, AR285: 2, AR270: 2, AR297: 2, |
| | | | | AR247: 2, AR288: 2, AR180: 2, AR221: 2, AR223: 2, AR182: 2, AR266: 2, AR243: 2, AR201: 2, AR283: 2, AR213: 2, AR232: 2, AR200: 2, AR224: 2, AR212: 2, |
| | | | | AR293: 2, AR173: 2, AR191: 2, AR262: 2, AR053: 2, AR229: 2, AR189: 2, AR275: 2, AR181: 2, AR203: 2, AR237: 2, AR217: 2, AR226: 2, AR205: 2, AR268: 2, |
| | | | | AR287: 2, AR214: 2, AR255: 2, AR171: 2, AR290: 2, AR272: 2, AR286: 2, AR309: 2, AR174: 2, AR246: 2, AR271: 2, AR289: 2, AR227: 2, AR296: 2, AR238: 1, |
| | | | | AR175: 1, AR231: 1, AR261: 1, AR256: 1, AR294: 1, AR179: 1, AR199: 1, AR234: 1, AR190: 1, AR295: 1, AR233: 1, AR177: 1, AR033: 1, AR267: 1, AR239: 1 |
| | | | | H0618: 17, H0253: 16, L0758: 7, L0659: 6, H0052: 5, L0439: 4, S0354: 3, S0358: 3, H0046: 3, S0150: 3, L0794: 3, L0809: 3, L0666: 3, L0665: 3, S6024: 2, |
| | | | | S0356: 2, S0442: 2, T0060: 2, H0424: 2, H0038: 2, H0063: 2, H0412: 2, L0771: 2, S0152: 2, L0754: 2, L0747: 2, L0601: 2, H0543: 2, H0255: 1, H0589: 1, H0580: 1, |
| | | | | S0045: 1, S0222: 1, H0409: 1, H0333: 1, L0021: 1, T0082: 1, H0706: 1, H0590: 1, S0010: 1, H0194: 1, H0251: 1, H0309: 1, H0263: 1, H0597: 1, H0545: 1, |
| | | | | T0010: 1, S0340: 1, H0622: 1, H0417: 1, H0030: 1, H0135: 1, H0616: 1, H0087: 1, H0494: 1, H0131: 1, H0207: 1, H0646: 1, L0763: 1, L0638: 1, L3905: 1, |
| | | | | L0761: 1, L0800: 1, L0764: 1, L0768: 1, L0766: 1, L0803: 1, L0650: 1, L0540: 1, L0384: 1, L5622: 1, L0792: 1, L0663: 1, H0435: 1, H0648: 1, H0672: 1, H0521: 1, |
| | | | | S0044: 1, H0555: 1, L0743: 1, L0740: 1, L0759: 1, S0436: 1, H0423: 1 and H0506: 1. |
| | HDPWN93 | 887914 | 390 | |
| | HDPWN93 | 905983 | 391 | |
| 76 | HDPXY01 | 879048 | 86 | AR207: 8, AR165: 8, AR245: 8, AR214: 8, AR164: 8, AR275: 8, AR163: 8, AR162: 8, AR263: 8, AR169: 8, AR195: 7, AR166: 7, AR274: 7, AR161: 7, AR309: 7, |
| | | | | AR272: 7, AR170: 7, AR212: 7, AR308: 6, AR311: 6, AR198: 6, AR089: 6, AR060: 6, AR197: 6, AR192: 6, AR264: 6, AR039: 6, AR177: 6, AR243: 6, AR223: 6, |
| | | | | AR235: 5, AR213: 5, AR096: 5, AR282: 5, AR168: 5, AR313: 5, AR222: 5, AR240: 5, AR204: 5, AR217: 5, AR261: 5, AR193: 4, AR312: 4, AR104: 4, AR224: 4, |
| | | | | AR246: 4, AR176: 4, AR055: 4, AR299: 4, AR171: 4, AR283: 4, AR271: 4, AR277: 4, AR174: 4, AR316: 4, AR178: 4, AR295: 4, AR053: 4, AR205: 4, AR185: 4, |
| | | | | AR237: 4, AR033: 4, AR247: 4, AR300: 4, AR266: 4, AR257: 3, AR270: 3, AR181: 3, AR293: 3, AR233: 3, AR250: 3, AR225: 3, AR288: 3, AR291: 3, AR216: 3, |
| | | | | AR296: 3, AR201: 3, AR286: 3, AR285: 3, AR268: 3, AR228: 3, AR297: 3, AR254: 3, AR294: 3, AR252: 3, AR269: 3, AR229: 3, AR287: 3, AR232: 3, AR061: 3, |
| | | | | AR234: 3, AR289: 3, AR183: 3, AR227: 3, AR231: 3, AR211: 3, AR267: 3, AR230: 3, AR255: 3, AR236: 3, AR239: 2, AR226: 2, AR179: 2, AR200: 2, AR182: 2, |
| | | | | AR262: 2, AR175: 2, AR203: 2, AR180: 2, AR290: 2, AR196: 2, AR199: 2, AR189: 2, AR258: 2, AR173: 2, AR210: 2, AR191: 2, AR238: 1, AR190: 1, AR253: 1, |
| | | | | AR215: 1, AR172: 1, L0646: 4, L0666: 4, L0662: 3, L0749: 3, H0661: 2, H0620: 2, H0617: 2, H0144: 2, L0777: 2, L0731: 2, H0170: 1, S0360: 1, S0046: 1, |
| | | | | L0717: 1, H0013: 1, H0052: 1, H0039: 1, H0622: 1, H0606: 1, H0673: 1, L0769: 1, L0796: 1, L5565: 1, L5566: 1, L0764: 1, L0648: 1, L0381: 1, L0805: 1, L0659: 1, |
| | | | | L0789: 1, L0792: 1, L0663: 1, L0665: 1, H0689: 1, H0660: 1, H0648: 1, H0539: 1, H0521: 1, L0779: 1 and L0603: 1. |
| | HDPXY01 | 904768 | 392 | |
| | HDPXY01 | 895716 | 393 | |
| | HDPXY01 | 895715 | 394 | |
| 77 | HDTBD53 | 972757 | 87 | AR242: 4, AR246: 4, AR250: 3, AR263: 3, AR195: 3, AR272: 3, AR264: 3, AR170: 3, AR282: 3, AR215: 3, AR163: 3, AR162: 3, AR235: 3, AR089: 3, AR198: 3, |
| | | | | AR165: 3, AR161: 3, AR197: 2, AR266: 2, AR053: 2, AR169: 2, AR212: 2, AR205: 2, AR285: 2, AR243: 2, AR312: 2, AR240: 2, AR270: 2, AR221: 2, AR296: 2, |
| | | | | AR213: 2, AR178: 2, AR216: 2, AR261: 2, AR214: 2, AR299: 2, AR247: 2, AR060: 2, AR164: 2, AR267: 1, AR237: 1, AR183: 1, AR271: 1, AR172: 1, AR286: 1, |
| | | | | AR179: 1, AR166: 1, AR291: 1, AR311: 1, AR316: 1, AR313: 1, AR288: 1, AR171: 1, AR188: 1, AR268: 1, AR269: 1, AR308: 1, AR173: 1, AR287: 1, AR297: 1, |
| | | | | AR033: 1, L0439: 17, L0731: 17, L0747: 16, L0766: 13, S0360: 8, L0770: 8, L0659: 8, L0754: 8, H0553: 7, L0663: 7, L0749: 7, L0758: 7, H0486: 6, S0192: 6, |
| | | | | L0662: 5, L0105: 4, H0644: 4, L0438: 4, H0547: 4, L0748: 4, L0751: 4, L0752: 4, L0755: 4, L0599: 4, H0542: 4, H0556: 3, H0662: 3, S0420: 3, H0599: 3, H0050: 3, |
| | | | | H0266: 3, H0622: 3, H0135: 3, H0551: 3, H0529: 3, L0783: 3, H0519: 3, H0670: 3, H0521: 3, H0555: 3, L0750: 3, H0717: 2, H0663: 2, H0638: 2, S0476: 2, |
| | | | | H0592: 2, H0013: 2, H0598: 2, H0090: 2, H0038: 2, H0040: 2, H0494: 2, S0440: 2, S0344: 2, L0638: 2, L0761: 2, L0764: 2, L0649: 2, L0774: 2, L0775: 2, L0657: 2, |
| | | | | L0787: 2, L0666: 2, H0144: 2, L0565: 2, H0659: 2, S0044: 2, L0759: 2, S0194: 2, H0422: 2, H0170: 1, S0040: 1, H0713: 1, T0049: 1, S0134: 1, S0110: 1, H0402: 1, |
| | | | | S0356: 1, S0442: 1, S0354: 1, S0376: 1, S0444: 1, S0410: 1, S0300: 1, H0369: 1, H0261: 1, H0549: 1, H0550: 1, S0222: 1, H0586: 1, H0587: 1, L0586: 1, T0060: 1, |
| | | | | H0244: 1, S0280: 1, L0021: 1, H0025: 1, H0421: 1, H0309: 1, L0040: 1, H0544: 1, L0471: 1, H0024: 1, L0163: 1, S0388: 1, H0188: 1, H0687: 1, S0003: 1, H0615: 1, |
| | | | | H0039: 1, H0030: 1, H0674: 1, H0212: 1, H0068: 1, S0366: 1, H0163: 1, H0591: 1, H0634: 1, H0616: 1, H0412: 1, H0413: 1, H0623: 1, H0561: 1, H0641: 1, |
| | | | | H0647: 1, H0652: 1, S0144: 1, S0142: 1, S0002: 1, L0369: 1, L0769: 1, L5575: 1, L5565: 1, L3905: 1, L5566: 1, L0772: 1, L0800: 1, L0771: 1, L0521: 1, L0768: 1, |
| | | | | L0794: 1, L0381: 1, L0806: 1, L0654: 1, L0655: 1, L0636: 1, L0384: 1, L0809: 1, L0528: 1, L0788: 1, L0789: 1, S0126: 1, H0689: 1, H0682: 1, H0658: 1, H0648: 1, |
| | | | | S0328: 1, H0539: 1, H0696: 1, S0406: 1, L0740: 1, L0757: 1, L0603: 1, H0665: 1, S0196: 1, H0423: 1 and S0460: 1. |
| | HDTBD53 | 906342 | 395 | |
| 78 | HDTBV77 | 785879 | 88 | AR183: 7, AR184: 5, AR269: 4, AR207: 4, AR245: 4, AR270: 4, AR182: 4, AR214: 4, AR172: 4, AR223: 4, AR263: 3, AR272: 3, AR180: 3, AR176: 3, AR268: 3, |
| | | | | AR309: 3, AR175: 3, AR164: 3, AR282: 3, AR166: 3, AR222: 3, AR225: 3, AR216: 3, AR308: 3, AR052: 3, AR247: 3, AR289: 3, AR165: 3, AR266: 2, AR312: 2, |
| | | | | AR162: 2, AR169: 2, AR291: 2, AR297: 2, AR284: 2, AR193: 2, AR205: 2, AR257: 2, AR296: 2, AR267: 2, AR195: 2, AR265: 2, AR171: 2, AR217: 2, AR298: 2, |
| | | | | AR246: 2, AR202: 2, AR264: 2, AR229: 2, AR238: 2, AR277: 2, AR213: 2, AR178: 2, AR230: 2, AR313: 2, AR243: 2, AR288: 2, AR311: 2, AR161: 2, AR235: 2, |
| | | | | AR253: 2, AR168: 2, AR290: 2, AR294: 2, AR215: 2, AR224: 2, AR286: 2, AR181: 2, AR212: 2, AR287: 2, AR173: 2, AR221: 2, AR039: 2, AR163: 2, AR200: 2, |
| | | | | AR061: 2, AR170: 2, AR274: 2, AR053: 2, AR089: 2, AR236: 2, AR228: 2, AR293: 2, AR199: 2, AR310: 1, AR196: 1, AR174: 1, AR300: 1, AR240: 1, AR096: 1, |
| | | | | AR231: 1, AR271: 1, AR201: 1, AR259: 1, AR177: 1, AR060: 1, AR261: 1, AR237: 1, AR316: 1, AR179: 1, AR192: 1, AR262: 1, AR190: 1, AR234: 1, AR295: 1, |
| | | | | AR285: 1, AR239: 1, AR258: 1, AR299: 1, AR204: 1, AR233: 1, AR197: 1, AR211: 1, AR254: 1, H0553: 3, H0717: 2, H0486: 1, H0427: 1, H0081: 1, H0014: 1, |
| | | | | S0388: 1, H0112: 1, H0030: 1, H0031: 1, H0644: 1, H0488: 1, H0519: 1, L0759: 1, H0543: 1 and H0506: 1. |
| 79 | HDTDQ23 | 1306984 | 89 | AR200: 16, AR311: 15, AR272: 13, AR264: 12, AR165: 11, AR164: 11, AR188: 11, AR312: 10, AR166: 10, AR211: 10, AR104: 10, AR282: 10, AR191: 10, |
| | | | | AR246: 9, AR096: 9, AR210: 9, AR189: 9, AR162: 9, AR199: 9, AR161: 9, AR163: 9, AR274: 9, AR196: 9, AR308: 8, AR174: 8, AR089: 8, AR240: 8, AR309: 7, |
| | | | | AR175: 7, AR218: 7, AR219: 7, AR190: 7, AR295: 7, AR203: 7, AR316: 7, AR299: 7, AR313: 6, AR285: 6, AR247: 6, AR185: 6, AR275: 6, AR263: 6, AR183: 6, |
| | | | | AR245: 6, AR060: 6, AR181: 6, AR212: 6, AR039: 6, AR053: 5, AR288: 5, AR269: 5, AR268: 5, AR243: 5, AR291: 5, AR290: 5, AR033: 5, AR173: 5, AR238: 5, |
| | | | | AR267: 5, AR231: 5, AR176: 5, AR271: 5, AR300: 4, AR237: 4, AR205: 4, AR266: 4, AR177: 4, AR182: 4, AR223: 4, AR270: 4, AR296: 4, AR213: 4, AR277: 4, |
| | | | | AR229: 4, AR178: 4, AR261: 4, AR171: 4, AR297: 3, AR195: 3, AR287: 3, AR239: 3, AR232: 3, AR230: 3, AR255: 3, AR234: 3, AR226: 3, AR257: 3, AR286: 3, |
| | | | | AR293: 3, AR258: 3, AR236: 3, AR193: 3, AR262: 3, AR168: 3, AR180: 3, AR252: 3, AR289: 3, AR221: 3, AR225: 3, AR250: 3, AR179: 3, AR294: 3, AR216: 2, |
| | | | | AR201: 2, AR198: 2, AR233: 2, AR061: 2, AR172: 2, AR222: 2, AR055: 2, AR170: 2, AR215: 2, AR256: 2, AR228: 2, AR227: 2, AR224: 2, AR214: 1, AR283: 1, |
| | | | | AR197: 1, AR260: 1, AR235: 1, AR253: 1, L0659: 5, L0666: 4, L0665: 4, L2634: 3, L0471: 2, H0031: 2, L0646: 2, L0794: 2, L0766: 2, L0657: 2, H0265: 1, |
| | | | | H0685: 1, L0785: 1, S0356: 1, S0376: 1, S0360: 1, H0742: 1, S0007: 1, H0747: 1, H0486: 1, L2540: 1, H0069: 1, H0025: 1, H0457: 1, H0252: 1, H0428: 1, L0055: 1, |
| | | | | H0038: 1, S0344: 1, L0625: 1, L0761: 1, L0800: 1, L0553: 1, L0649: 1, L0803: 1, L0650: 1, L0606: 1, L3872: 1, L0791: 1, L0663: 1, L0664: 1, H0684: 1, H0435: 1, |
| | | | | H0648: 1, S0380: 1, L3832: 1, L0749: 1, L0786: 1, L0780: 1, L0755: 1, L0759: 1, L0596: 1, L0601: 1, H0543: 1 and H0422: 1. |
| | HDTDQ23 | 879009 | 396 | |
| | HDTDQ23 | 751707 | 397 | |
| 80 | HE2DE47 | 619852 | 90 | AR224: 15, AR223: 15, AR217: 12, AR214: 12, AR222: 11, AR225: 11, AR172: 9, AR216: 9, AR215: 9, AR221: 8, AR171: 7, AR162: 7, AR168: 7, AR161: 7, |
| | | | | AR264: 7, AR196: 7, AR176: 6, AR163: 6, AR165: 6, AR263: 6, AR246: 6, AR164: 6, AR309: 6, AR166: 6, AR193: 6, AR170: 6, AR313: 5, AR096: 5, AR089: 5, |
| | | | | AR250: 5, AR169: 5, AR242: 5, AR312: 5, AR261: 5, AR254: 5, AR295: 5, AR245: 5, AR180: 5, AR189: 5, AR271: 5, AR191: 5, AR291: 5, AR274: 5, AR177: 5, |
| | | | | AR316: 4, AR178: 4, AR201: 4, AR272: 4, AR253: 4, AR267: 4, AR308: 4, AR270: 4, AR282: 4, AR229: 4, AR174: 4, AR175: 4, AR188: 4, AR268: 4, AR190: 4, |
| | | | | AR288: 4, AR183: 4, AR060: 4, AR297: 4, AR181: 4, AR192: 4, AR173: 4, AR255: 4, AR195: 4, AR296: 4, AR179: 4, AR285: 4, AR311: 4, AR199: 4, AR197: 4, |
| | | | | AR205: 4, AR231: 4, AR237: 4, AR243: 4, AR239: 4, AR299: 4, AR300: 3, AR236: 3, AR182: 3, AR257: 3, AR212: 3, AR269: 3, AR218: 3, AR290: 3, AR238: 3, |
| | | | | AR275: 3, AR262: 3, AR203: 3, AR198: 3, AR266: 3, AR053: 3, AR287: 3, AR210: 3, AR228: 3, AR293: 3, AR247: 3, AR213: 3, AR252: 3, AR240: 3, AR219: 3, |
| | | | | AR185: 3, AR226: 3, AR200: 3, AR235: 3, AR233: 3, AR204: 3, AR207: 3, AR258: 3, AR286: 3, AR039: 3, AR033: 2, AR260: 2, AR283: 2, AR232: 2, AR277: 2, |
| | | | | AR230: 2, AR294: 2, AR289: 2, AR061: 2, AR234: 2, AR055: 2, AR227: 2, AR256: 2, AR211: 2, AR104: 2, L0439: 10, L0747: 9, L0766: 8, L0770: 5, L0666: 4, |
| | | | | L0754: 4, L0777: 4, L0659: 3, L0783: 3, S0126: 3, H0543: 3, L0483: 2, H0264: 2, L0764: 2, L0662: 2, L0768: 2, L0665: 2, L0438: 2, L0748: 2, L0756: 2, L0752: 2, |
| | | | | L0755: 2, L0758: 2, L0759: 2, H0170: 1, T0049: 1, H0341: 1, S0029: 1, H0661: 1, H0306: 1, S0408: 1, H0580: 1, S0045: 1, H0431: 1, H0455: 1, H0586: 1, L0622: 1, |
| | | | | H0575: 1, H0004: 1, H0581: 1, H0421: 1, H0263: 1, H0569: 1, H0015: 1, S0051: 1, S0003: 1, H0615: 1, L0142: 1, H0090: 1, H0625: 1, S0422: 1, L0598: 1, |
| | | | | H0529: 1, L0769: 1, L0667: 1, L0646: 1, L0774: 1, L0375: 1, L0657: 1, L0519: 1, L0664: 1, H0144: 1, S0374: 1, H0547: 1, H0435: 1, H0666: 1, S0380: 1, H0521: 1, |
| | | | | S0404: 1, H0555: 1, L0749: 1, L0750: 1, L0779: 1, L0592: 1, L0608: 1, S0026: 1 and H0542: 1. |
| | HE2DE47 | 382025 | 398 | |
| 81 | HE2EB74 | 513662 | 91 | AR196: 12, AR161: 8, AR162: 8, AR163: 8, AR285: 6, AR165: 6, AR164: 6, AR243: 6, AR166: 6, AR232: 6, AR287: 6, AR188: 6, AR269: 5, AR261: 5, AR295: 5. |
| | | | | AR174: 5, AR291: 5, AR226: 5, AR257: 5, AR233: 5, AR171: 5, AR236: 5, AR191: 4, AR264: 4, AR263: 4, AR266: 4, AR296: 4, AR182: 4, AR275: 4, AR288: 4, |
| | | | | AR286: 4, AR178: 4, AR255: 4, AR176: 4, AR258: 4, AR060: 4, AR089: 4, AR299: 4, AR308: 4, AR238: 4, AR309: 4, AR175: 4, AR104: 4, AR311: 4, AR297: 4, |
| | | | | AR239: 4, AR260: 4, AR179: 3, AR177: 3, AR274: 3, AR181: 3, AR237: 3, AR256: 3, AR300: 3, AR289: 3, AR185: 3, AR096: 3, AR312: 3, AR172: 3, AR235: 3, |
| | | | | AR189: 3, AR224: 3, AR262: 3, AR272: 3, AR270: 3, AR169: 3, AR316: 3, AR203: 3, AR234: 3, AR228: 3, AR055: 3, AR212: 3, AR290: 3, AR215: 3, AR190: 3, |
| | | | | AR268: 3, AR200: 3, AR231: 3, AR313: 3, AR293: 3, AR053: 3, AR267: 3, AR173: 2, AR170: 2, AR180: 2, AR294: 2, AR229: 2, AR230: 2, AR240: 2, AR227: 2, |
| | | | | AR039: 2, AR247: 2, AR210: 2, AR282: 2, AR199: 2, AR271: 2, AR219: 2, AR250: 2, AR168: 2, AR061: 2, AR183: 2, AR033: 2, AR277: 2, AR217: 2, AR222: 2, |
| | | | | AR223: 2, AR283: 2, AR213: 1, AR216: 1, AR193: 1, H0170: 1, L0717: 1, H0586: 1, H0486: 1, H0596: 1, L0770: 1, L0637: 1, L0521: 1, L0766: 1, L0666: 1, |
| | | | | H0658: 1, L0779: 1, L0731: 1, L0759: 1 and H0543: 1. |
| 82 | HE2NV57 | 740750 | 92 | AR235: 6, AR282: 4, AR309: 4, AR171: 4, AR270: 4, AR178: 3, AR272: 3, AR245: 3, AR269: 3, AR291: 3, AR169: 3, AR268: 3, AR213: 3, AR215: 3, AR254: 3, |
| | | | | AR267: 3, AR289: 3, AR274: 3, AR236: 3, AR175: 3, AR053: 3, AR228: 3, AR261: 3, AR242: 2, AR161: 2, AR181: 2, AR308: 2, AR300: 2, AR257: 2, AR238: 2, |
| | | | | AR182: 2, AR266: 2, AR204: 2, AR237: 2, AR170: 2, AR288: 2, AR290: 2, AR188: 2, AR297: 2, AR168: 2, AR262: 2, AR162: 2, AR163: 2, AR296: 2, AR233: 2, |
| | | | | AR210: 2, AR285: 2, AR295: 2, AR264: 2, AR293: 2, AR165: 2, AR229: 2, AR201: 2, AR189: 2, AR250: 2, AR164: 2, AR221: 2, AR195: 2, AR222: 2, AR223: 2, |
| | | | | AR239: 2, AR231: 2, AR294: 2, AR166: 2, AR191: 2, AR179: 2, AR255: 2, AR271: 2, AR287: 2, AR212: 2, AR234: 2, AR299: 2, AR225: 2, AR203: 2, AR246: 2, |
| | | | | AR200: 2, AR205: 1, AR089: 1, AR173: 1, AR176: 1, AR240: 1, AR286: 1, AR193: 1, AR199: 1, AR258: 1, AR196: 1, AR232: 1, AR096: 1, AR243: 1, AR312: 1, |
| | | | | AR185: 1, AR061: 1, AR183: 1, AR230: 1, AR060: 1, S0414: 3, L0805: 3, S0412: 3, H0457: 2, L0756: 2, H0170: 1, H0645: 1, H0455: 1, H0421: 1, H0100: 1, |
| | | | | L0803: 1, S0052: 1, S0374: 1, H0696: 1 and L0743: 1. |
| 83 | HE2PH36 | 570903 | 93 | AR263: 75, AR171: 60, AR309: 59, AR264: 59, AR252: 58, AR168: 57, AR223: 54, AR169: 49, AR308: 46, AR311: 44, AR214: 44, AR053: 42, AR172: 38, |
| | | | | AR312: 37, AR170: 37, AR225: 36, AR246: 36, AR212: 34, AR272: 33, AR217: 32, AR197: 32, AR245: 32, AR222: 31, AR213: 30, AR207: 30, AR224: 30, |
| | | | | AR198: 27, AR096: 27, AR196: 26, AR195: 26, AR313: 25, AR205: 25, AR216: 24, AR201: 23, AR218: 22, AR215: 21, AR254: 21, AR235: 21, AR165: 20, |
| | | | | AR261: 20, AR253: 20, AR274: 20, AR243: 20, AR221: 19, AR164: 19, AR316: 19, AR275: 19, AR250: 19, AR192: 18, AR166: 18, AR161: 18, AR162: 18, |
| | | | | AR177: 18, AR163: 18, AR271: 18, AR174: 17, AR039: 17, AR200: 17, AR089: 17, AR240: 16, AR296: 16, AR219: 16, AR188: 16, AR193: 16, AR033: 15, |
| | | | | AR295: 15, AR185: 14, AR189: 14, AR229: 14, AR060: 14, AR299: 13, AR236: 13, AR203: 13, AR242: 13, AR183: 13, AR190: 13, AR210: 12, AR104: 12, |
| | | | | AR282: 12, AR178: 12, AR300: 12, AR181: 12, AR175: 12, AR268: 12, AR199: 12, AR226: 11, AR211: 11, AR191: 11, AR269: 11, AR173: 11, AR204: 10, |
| | | | | AR277: 10, AR270: 10, AR180: 10, AR297: 10, AR247: 10, AR288: 10, AR290: 9, AR179: 9, AR285: 9, AR291: 9, AR176: 9, AR262: 9, AR239: 9, AR283: 9, |
| | | | | AR238: 8, AR182: 8, AR267: 8, AR237: 8, AR055: 8, AR287: 8, AR257: 8, AR289: 8, AR231: 7, AR293: 7, AR258: 7, AR255: 7, AR232: 7, AR286: 7, AR230: 7, |
| | | | | AR234: 7, AR256: 7, AR266: 6, AR233: 6, AR227: 6, AR294: 6, AR228: 5, AR260: 5, AR061: 4, H0171: 1, S0114: 1 and S0356: 1. |
| 84 | HE8DS15 | 847060 | 94 | AR180: 17, AR181: 15, AR178: 15, AR096: 14, AR182: 13, AR179: 13, AR246: 13, AR175: 13, AR191: 12, AR183: 12, AR190: 12, AR240: 11, AR268: 10, |
| | | | | AR270: 10, AR174: 10, AR269: 10, AR173: 9, AR243: 9, AR176: 9, AR060: 8, AR185: 7, AR255: 7, AR189: 7, AR201: 7, AR192: 7, AR039: 7, AR193: 7, |
| | | | | AR197: 7, AR257: 7, AR055: 6, AR295: 6, AR290: 6, AR296: 6, AR299: 6, AR285: 6, AR288: 6, AR207: 5, AR291: 5, AR188: 5, AR254: 5, AR287: 5, AR297: 5, |
| | | | | AR218: 5, AR294: 5, AR316: 5, AR235: 5, AR293: 5, AR242: 4, AR264: 4, AR245: 4, AR089: 4, AR236: 4, AR177: 4, AR195: 4, AR161: 4, AR198: 4, AR271: 4, |
| | | | | AR162: 4, AR163: 4, AR204: 4, AR205: 4, AR165: 4, AR275: 4, AR196: 4, AR267: 4, AR262: 4, AR164: 4, AR260: 4, AR286: 3, AR261: 3, AR300: 3, AR104: 3, |
| | | | | AR289: 3, AR169: 3, AR313: 3, AR168: 3, AR033: 3, AR266: 3, AR238: 3, AR253: 3, AR247: 3, AR222: 3, AR258: 3, AR233: 3, AR228: 3, AR200: 3, AR312: 3, |
| | | | | AR166: 3, AR229: 2, AR224: 2, AR272: 2, AR199: 2, AR231: 2, AR250: 2, AR203: 2, AR061: 2, AR263: 2, AR237: 2, AR053: 2, AR219: 2, AR226: 2, AR230: 2, |
| | | | | AR282: 2, AR277: 2, AR221: 2, AR274: 2, AR213: 2, AR283: 2, AR232: 2, AR217: 2, AR309: 2, AR227: 2, AR239: 2, AR214: 2, AR256: 2, AR234: 2, AR212: 2, |
| | | | | AR308: 2, AR171: 1, AR216: 1, AR225: 1, AR252: 1, AR170: 1, L0779: 8, L0770: 7, L0731: 7, L0662: 6, L0803: 5, L0599: 5, L0758: 4, H0739: 3, H0624: 3, |
| | | | | H0486: 3, H0615: 3, L0748: 3, L0750: 3, H0713: 2, S0222: 2, H0575: 2, H0050: 2, H0031: 2, H0553: 2, S0036: 2, H0038: 2, S0422: 2, L0804: 2, L0774: 2, L0775: 2, |
| | | | | L0647: 2, L0438: 2, L0742: 2, L0743: 2, L0747: 2, L0777: 2, L0605: 2, L0485: 2, H0171: 1, H0717: 1, S0442: 1, H0208: 1, H0411: 1, H0586: 1, H0587: 1, L3655: 1, |
| | | | | H0013: 1, H0156: 1, H0108: 1, H0581: 1, S0049: 1, H0194: 1, H0572: 1, H0123: 1, L0471: 1, H0024: 1, H0373: 1, S0051: 1, S6028: 1, H0188: 1, H0644: 1, |
| | | | | H0628: 1, H0383: 1, H0316: 1, T0067: 1, L0768: 1, L0794: 1, L0375: 1, L0806: 1, L0659: 1, L0532: 1, L0665: 1, H0144: 1, H0691: 1, S0126: 1, H0660: 1, H0648: 1, |
| | | | | S0328: 1, S0378: 1, S0380: 1, H0436: 1, S0028: 1, L0749: 1, L0756: 1, L0759: 1, H0444: 1, S0242: 1 and H0352: 1. |
| 85 | HE9CP41 | 560625 | 95 | AR170: 5, AR223: 3, AR225: 3, AR168: 2, AR266: 2, AR252: 2, AR309: 2, AR264: 2, AR221: 2, AR243: 2, AR224: 2, AR060: 1, AR183: 1, AR232: 1, AR299: 1, |
| | | | | AR269: 1, AR213: 1, AR199: 1, AR296: 1, AR277: 1, AR282: 1, AR311: 1, H0421: 1 and H0144: 1. |
| 86 | HE9DG49 | 1299935 | 96 | AR223: 36, AR214: 32, AR225: 26, AR299: 18, AR215: 15, AR216: 15, AR310: 15, AR312: 14, AR281: 13, AR280: 13, AR265: 12, AR309: 12, AR277: 12, |
| | | | | AR282: 12, AR314: 11, AR300: 11, AR263: 11, AR052: 11, AR315: 11, AR217: 10, AR053: 10, AR246: 9, AR218: 9, AR219: 9, AR241: 9, AR231: 9, AR205: 8, |
| | | | | AR168: 8, AR264: 8, AR308: 8, AR268: 8, AR206: 8, AR186: 8, AR244: 7, AR290: 7, AR275: 7, AR172: 7, AR311: 7, AR169: 7, AR267: 7, AR210: 7, AR161: 7, |
| | | | | AR162: 7, AR096: 7, AR171: 6, AR163: 6, AR165: 6, AR089: 6, AR247: 6, AR164: 6, AR273: 6, AR202: 6, AR271: 6, AR201: 6, AR194: 6, AR213: 6, AR166: 6, |
| | | | | AR192: 5, AR170: 5, AR198: 5, AR061: 5, AR269: 5, AR195: 5, AR183: 5, AR242: 5, AR224: 5, AR212: 5, AR184: 5, AR204: 5, AR313: 5, AR238: 5, AR316: 5, |
| | | | | AR221: 5, AR243: 5, AR197: 4, AR270: 4, AR207: 4, AR245: 4, AR234: 4, AR222: 4, AR249: 4, AR251: 4, AR193: 4, AR254: 4, AR228: 4, AR235: 4, AR176: 4, |
| | | | | AR240: 4, AR232: 4, AR173: 4, AR181: 4, AR229: 4, AR175: 4, AR237: 4, AR189: 4, AR185: 3, AR211: 3, AR039: 3, AR177: 3, AR055: 3, AR230: 3, AR253: 3, |
| | | | | AR188: 3, AR233: 3, AR292: 3, AR033: 3, AR200: 3, AR266: 3, AR261: 3, AR199: 3, AR180: 3, AR203: 3, AR272: 3, AR060: 3, AR274: 3, AR182: 3, AR196: 3, |
| | | | | AR239: 3, AR226: 2, AR236: 2, AR174: 2, AR295: 2, AR190: 2, AR191: 2, AR289: 2, AR257: 2, AR178: 2, AR227: 2, AR293: 2, AR252: 2, AR298: 2, AR291: 2, |
| | | | | AR250: 2, AR179: 2, AR294: 2, AR283: 2, AR262: 2, AR256: 2, AR287: 2, AR259: 2, AR285: 2, AR104: 1, AR258: 1, AR297: 1, AR284: 1, AR288: 1, AR296: 1, |
| | | | | AR255: 1, L0740: 10, L0755: 7, H0556: 4, H0251: 4, S0358: 3, L0766: 3, S0420: 2, S0444: 2, S0408: 2, L0483: 2, H0413: 2, S0440: 2, L0772: 2, L0764: 2, |
| | | | | L0768: 2, L0775: 2, L0743: 2, L0747: 2, H0218: 1, S0040: 1, S0212: 1, S0442: 1, S0360: 1, S0046: 1, S0476: 1, H0549: 1, H0036: 1, H0046: 1, H0687: 1, H0646: 1, |
| | | | | L0369: 1, L0770: 1, L0363: 1, L0649: 1, L5568: 1, L0774: 1, L0806: 1, L0783: 1, L0791: 1, L0792: 1, L4501: 1, L0666: 1, L0663: 1, L0665: 1, H0144: 1, H0726: 1, |
| | | | | H0658: 1, S0380: 1, H0752: 1, H0134: 1, S0028: 1, L0754: 1, L0731: 1, L0757: 1, H0445: 1, H0343: 1, S0011: 1, H0668: 1 and S0276: 1. |
| | HE9DG49 | 658678 | 399 | |
| | HE9DG49 | 382000 | 400 | |
| 87 | HE9HY07 | 420063 | 97 | AR172: 5, AR201: 4, AR266: 4, AR170: 4, AR269: 4, AR182: 4, AR168: 4, AR039: 4, AR176: 4, AR228: 4, AR169: 4, AR236: 4, AR254: 4, AR165: 4, AR257: 3, |
| | | | | AR164: 3, AR233: 3, AR253: 3, AR191: 3, AR166: 3, AR183: 3, AR181: 3, AR229: 3, AR264: 3, AR268: 3, AR178: 3, AR231: 3, AR237: 3, AR270: 3, AR180: 3, |
| | | | | AR283: 3, AR179: 3, AR053: 3, AR197: 3, AR190: 3, AR096: 3, AR060: 3, AR239: 3, AR055: 3, AR177: 3, AR238: 3, AR255: 3, AR193: 3, AR312: 3, AR061: 3, |
| | | | | AR250: 3, AR235: 3, AR267: 3, AR230: 3, AR185: 3, AR288: 2, AR175: 2, AR293: 2, AR196: 2, AR262: 2, AR246: 2, AR316: 2, AR287: 2, AR033: 2, AR294: 2, |
| | | | | AR089: 2, AR247: 2, AR313: 2, AR173: 2, AR243: 2, AR300: 2, AR234: 2, AR271: 2, AR290: 2, AR199: 2, AR297: 2, AR277: 2, AR286: 2, AR224: 2, AR223: 2, |
| | | | | AR309: 2, AR289: 2, AR200: 2, AR174: 2, AR296: 2, AR232: 2, AR163: 2, AR226: 2, AR211: 2, AR285: 2, AR222: 2, AR299: 2, AR261: 2, AR189: 2, AR205: 2, |
| | | | | AR162: 2, AR203: 2, AR295: 2, AR240: 2, AR227: 2, AR171: 2, AR260: 1, AR214: 1, AR216: 1, AR311: 1, AR212: 1, AR188: 1, AR219: 1, AR291: 1, AR221: 1, |
| | | | | AR272: 1, AR308: 1, AR161: 1, AR245: 1, H0615: 1 and H0144: 1. |
| 88 | HEBEJ18 | 701802 | 98 | AR281: 38, AR280: 36, AR314: 34, AR315: 33, AR251: 25, AR186: 13, AR184: 12, AR265: 11, AR261: 11, AR235: 11, AR310: 11, AR296: 11, AR214: 10, |
| | | | | AR168: 10, AR292: 10, AR295: 10, AR171: 9, AR217: 9, AR298: 9, AR248: 9, AR244: 9, AR252: 9, AR309: 8, AR283: 8, AR169: 8, AR218: 8, AR263: 8, |
| | | | | AR253: 8, AR264: 8, AR225: 8, AR223: 8, AR224: 8, AR216: 8, AR284: 7, AR170: 7, AR272: 7, AR245: 7, AR061: 7, AR221: 7, AR055: 7, AR210: 7, AR291: 7, |
| | | | | AR246: 6, AR285: 6, AR273: 6, AR290: 6, AR219: 6, AR299: 6, AR200: 6, AR247: 6, AR266: 6, AR182: 6, AR211: 6, AR286: 6, AR312: 6, AR195: 6, AR297: 6, |
| | | | | AR199: 6, AR313: 6, AR269: 5, AR249: 5, AR229: 5, AR222: 5, AR180: 5, AR033: 5, AR183: 5, AR096: 5, AR188: 5, AR162: 5, AR270: 5, AR289: 5, AR267: 5, |
| | | | | AR238: 5, AR236: 5, AR196: 5, AR161: 5, AR163: 5, AR311: 5, AR271: 5, AR185: 5, AR215: 5, AR308: 4, AR316: 4, AR259: 4, AR165: 4, AR089: 4, AR189: 4, |
| | | | | AR164: 4, AR177: 4, AR282: 4, AR257: 4, AR166: 4, AR288: 4, AR176: 4, AR268: 4, AR190: 4, AR294: 4, AR300: 4, AR240: 4, AR052: 4, AR172: 4, AR060: 4, |
| | | | | AR250: 3, AR206: 3, AR178: 3, AR181: 3, AR256: 3, AR205: 3, AR277: 3, AR262: 3, AR175: 3, AR039: 3, AR173: 3, AR287: 3, AR226: 3, AR255: 3, AR197: 3, |
| | | | | AR258: 3, AR275: 3, AR174: 3, AR191: 3, AR198: 3, AR293: 3, AR201: 3, AR207: 3, AR230: 3, AR202: 3, AR234: 2, AR053: 2, AR233: 2, AR274: 2, AR179: 2, |
| | | | | AR203: 2, AR212: 2, AR227: 2, AR231: 2, AR213: 2, AR239: 2, AR260: 2, AR192: 2, AR243: 2, AR228: 2, AR104: 2, AR204: 1, AR254: 1, AR237: 1, AR232: 1, |
| | | | | AR241: 1, H0556: 493, H0265: 241, H0046: 105, L0601: 101, H0584: 98, H0521: 85, H0543: 75, S0027: 57, H0542: 57, L0591: 52, S0418: 47, S0420: 47, |
| | | | | S3014: 47, H0559: 46, L0593: 44, L0596: 43, S0126: 41, H0266: 40, S0046: 37, S0152: 37, H0052: 36, H0617: 35, H0056: 34, H0134: 34, S0040: 32, S0212: 32, |
| | | | | L0595: 32, H0069: 31, H0561: 31, H0286: 30, H0585: 29, S0132: 28, H0083: 28, L0666: 27, S0278: 25, H0657: 24, H0341: 23, H0623: 23, H0494: 23, H0575: 22, |
| | | | | L0592: 22, S0045: 21, H0666: 21, L0588: 21, S0344: 20, L0663: 20, L0751: 20, H0090: 19, L0775: 19, S0194: 19, H0125: 18, H0618: 18, H0135: 18, H0318: 17, |
| | | | | S0022: 17, H0424: 17, T0042: 17, L0659: 17, L0748: 17, S0011: 17, S0192: 17, H0013: 16, H0040: 16, S0360: 15, T0040: 15, H0292: 15, H0063: 15, H0136: 15, |
| | | | | H0167: 14, H0599: 14, H0124: 14, H0087: 14, L0664: 14, H0144: 14, H0519: 14, H0658: 14, H0518: 14, S0037: 14, H0250: 13, H0253: 13, H0457: 13, S0144: 13, |
| | | | | L0653: 13, L0747: 13, L0750: 13, T0002: 12, H0141: 12, H0140: 12, H0580: 12, S0222: 12, H0581: 12, T0110: 12, H0288: 12, H0628: 12, H0551: 12, H0641: 12, |
| | | | | S0002: 12, L0662: 12, S0028: 12, S0032: 12, L0757: 12, H0370: 11, H0014: 11, H0290: 11, H0412: 11, S0150: 11, L0754: 11, L0608: 11, H0665: 11, H0667: 11, |
| | | | | S0424: 11, H0333: 10, S6028: 10, H0284: 10, H0634: 10, H0522: 10, L0744: 10, H0445: 10, H0650: 9, S0358: 9, T0039: 9, H0620: 9, H0591: 9, H0560: 9, |
| | | | | L0372: 9, H0435: 9, L0439: 9, L0755: 9, L0597: 9, H0352: 9, H0257: 8, H0486: 8, L0471: 8, S0036: 8, H0264: 8, H0100: 8, H0625: 8, L0363: 8, L0378: 8, L0382: 8, |
| | | | | L0665: 8, H0631: 8, L0740: 8, H0423: 8, H0255: 7, S0007: 7, H0431: 7, H0586: 7, H0497: 7, H0492: 7, H0635: 7, S0049: 7, H0038: 7, H0059: 7, H0529: 7, |
| | | | | L0369: 7, L0774: 7, L0654: 7, L0657: 7, H0670: 7, H0660: 7, L0742: 7, L0752: 7, L0731: 7, L0599: 7, S0342: 6, H0295: 6, H0638: 6, S0468: 6, H0587: 6, H0309: 6, |
| | | | | T0115: 6, H0545: 6, H0123: 6, H0622: 6, H0644: 6, H0606: 6, H0616: 6, S0210: 6, S0426: 6, L0381: 6, L0388: 6, L0655: 6, L0383: 6, H0520: 6, H0689: 6, H0672: 6, |
| | | | | L0602: 6, H0214: 6, H0626: 6, H0159: 5, H0661: 5, H0619: 5, L0717: 5, H0544: 5, H0050: 5, H0012: 5, H0024: 5, T0010: 5, H0594: 5, H0188: 5, S0003: 5, |
| | | | | H0213: 5, H0181: 5, H0268: 5, S0038: 5, H0429: 5, H0646: 5, S0142: 5, S0208: 5, L0763: 5, L0770: 5, L0646: 5, L0767: 5, L0776: 5, L0565: 5, H0547: 5, H0682: 5, |
| | | | | H0659: 5, S0328: 5, H0555: 5, H0627: 5, L0758: 5, H0668: 5, S0196: 5, H0624: 4, T0049: 4, S0116: 4, H0662: 4, H0402: 4, H0550: 4, H0441: 4, H0438: 4, |
| | | | | H0643: 4, T0109: 4, H0075: 4, H0156: 4, S0010: 4, S0346: 4, S0182: 4, H0327: 4, H0546: 4, H0051: 4, S0051: 4, H0553: 4, L0456: 4, H0413: 4, L0637: 4, L0764: 4, |
| | | | | L0648: 4, L0768: 4, L0375: 4, L0518: 4, H0690: 4, L0745: 4, L0777: 4, L0589: 4, H0422: 4, H0218: 3, S0134: 3, H0664: 3, H0458: 3, S0356: 3, S0354: 3, S0376: 3, |
| | | | | H0261: 3, H0549: 3, H0455: 3, T0060: 3, H0427: 3, H0042: 3, T0082: 3, H0036: 3, H0590: 3, H0421: 3, H0196: 3, H0194: 3, H0204: 3, H0086: 3, H0510: 3, |
| | | | | H0375: 3, H0267: 3, H0615: 3, H0039: 3, T0006: 3, H0068: 3, H0163: 3, H0272: 3, L0564: 3, H0280: 3, H0130: 3, L0769: 3, L0771: 3, L0387: 3, L0376: 3, |
| | | | | L0368: 3, H0648: 3, S0330: 3, H0539: 3, S0044: 3, S0390: 3, S0260: 3, H0444: 3, L0587: 3, H0653: 3, L0600: 3, H0170: 2, H0149: 2, H0686: 2, H0685: 2, H0294: 2, |
| | | | | S0114: 2, H0583: 2, S0180: 2, S0298: 2, S0282: 2, H0306: 2, H0449: 2, H0459: 2, H0675: 2, H0747: 2, H0393: 2, S0300: 2, H0437: 2, H0592: 2, S0005: 2, H0574: 2, |
| | | | | H0256: 2, L0623: 2, L0586: 2, T0103: 2, H0150: 2, H0041: 2, N0006: 2, H0172: 2, H0081: 2, H0200: 2, N0007: 2, H0071: 2, H0355: 2, S0312: 2, S0250: 2, |
| | | | | H0328: 2, H0688: 2, L0483: 2, H0033: 2, H0031: 2, L0142: 2, L0143: 2, H0032: 2, L0455: 2, S0366: 2, H0316: 2, H0598: 2, L0351: 2, H0366: 2, H0509: 2, |
| | | | | H0132: 2, H0647: 2, S0422: 2, L0762: 2, L0638: 2, L0642: 2, L0521: 2, L0386: 2, L0804: 2, L0540: 2, S0006: 2, S0148: 2, S0380: 2, H0710: 2, H0576: 2, S0392: 2, |
| | | | | S0206: 2, L0741: 2, L0779: 2, L0753: 2, H0595: 2, S0436: 2, L0605: 2, L0590: 2, L0604: 2, L0366: 2, H0216: 2, H0395: 1, H0219: 1, H0224: 1, H0225: 1, H0161: 1, |
| | | | | H0220: 1, H0158: 1, H0222: 1, S6024: 1, H0656: 1, L0785: 1, L3814: 1, H0419: 1, S0001: 1, H0484: 1, H0254: 1, H0671: 1, H0176: 1, L3659: 1, H0305: 1, |
| | | | | S0348: 1, L0005: 1, T0008: 1, L0428: 1, L3645: 1, H0637: 1, H0208: 1, H0645: 1, S6026: 1, H0351: 1, L0394: 1, S0220: 1, H0392: 1, H0357: 1, H0409: 1, H0403: 1, |
| | | | | H0282: 1, H0600: 1, H0362: 1, H0331: 1, H0491: 1, H0485: 1, H0270: 1, T0112: 1, H0098: 1, H0122: 1, H0390: 1, T0048: 1, H0505: 1, H0251: 1, H0085: 1, |
| | | | | H0183: 1, H0205: 1, H0597: 1, H0231: 1, H0121: 1, H0439: 1, L0041: 1, H0009: 1, N0003: 1, S0050: 1, L0163: 1, S0388: 1, H0275: 1, H0399: 1, H0354: 1, |
| | | | | H0271: 1, H0416: 1, S0318: 1, S0316: 1, S0214: 1, H0428: 1, H0604: 1, H0180: 1, H0182: 1, L0055: 1, H0165: 1, H0166: 1, H0673: 1, H0674: 1, H0361: 1, |
| | | | | H0189: 1, H0400: 1, T0067: 1, H0379: 1, H0488: 1, H0433: 1, H0269: 1, H0022: 1, T0041: 1, H0512: 1, L0475: 1, S0382: 1, S0464: 1, S0306: 1, S0440: 1, H0131: 1, |
| | | | | H0633: 1, H0026: 1, L0520: 1, L0640: 1, L0371: 1, L0667: 1, L0772: 1, L0373: 1, L0374: 1, L0765: 1, L0773: 1, L0766: 1, L0561: 1, L0650: 1, L0651: 1, L0806: 1, |
| | | | | L0661: 1, L0629: 1, L0628: 1, L0527: 1, L0636: 1, L0542: 1, L0526: 1, L0783: 1, L0790: 1, S0052: 1, S0428: 1, H0684: 1, H0187: 1, H0436: 1, H0478: 1, L0609: 1, |
| | | | | L0612: 1, L0780: 1, L0759: 1, L0581: 1, L0361: 1, H0217: 1, S0276: 1, S0042: 1 and H0775: 1. |
| 89 | HEEAQ11 | 777843 | 99 | AR271: 5, AR060: 4, AR055: 4, AR163: 4, AR162: 3, AR197: 3, AR177: 3, AR201: 3, AR165: 3, AR192: 3, AR204: 3, AR309: 3, AR274: 3, AR161: 3, AR166: 3, |
| | | | | AR193: 3, AR235: 3, AR198: 3, AR289: 3, AR240: 3, AR252: 3, AR282: 2, AR205: 2, AR223: 2, AR246: 2, AR168: 2, AR312: 2, AR172: 2, AR185: 2, AR296: 2, |
| | | | | AR089: 2, AR264: 2, AR266: 2, AR164: 2, AR275: 2, AR250: 2, AR243: 2, AR272: 2, AR104: 2, AR300: 2, AR180: 2, AR293: 2, AR171: 2, AR181: 2, AR290: 2, |
| | | | | AR291: 2, AR233: 2, AR255: 2, AR096: 2, AR297: 2, AR286: 2, AR176: 2, AR283: 2, AR225: 2, AR213: 2, AR061: 2, AR169: 2, AR261: 2, AR263: 2, AR053: 2, |
| | | | | AR288: 2, AR299: 2, AR170: 2, AR316: 2, AR247: 2, AR254: 2, AR207: 2, AR308: 2, AR311: 2, AR287: 2, AR182: 2, AR277: 2, AR178: 1, AR294: 1, AR218: 1, |
| | | | | AR174: 1, AR188: 1, AR295: 1, AR196: 1, AR228: 1, AR203: 1, AR313: 1, AR285: 1, AR222: 1, AR237: 1, AR257: 1, AR224: 1, AR229: 1, AR190: 1, AR234: 1, |
| | | | | AR200: 1, AR195: 1, AR239: 1, AR268: 1, AR179: 1, AR232: 1, L0758: 4, L0794: 3, H0549: 2, H0038: 2, L0768: 2, L0779: 2 and L0767: 1. |
| 90 | HEGAH43 | 532596 | 100 | AR161: 7, AR163: 6, AR162: 6, AR176: 6, AR263: 4, AR275: 4, AR269: 4, AR266: 4, AR216: 4, AR214: 4, AR183: 4, AR192: 4, AR233: 4, AR235: 4, AR270: 4, |
| | | | | AR267: 4, AR228: 4, AR309: 4, AR261: 3, AR172: 3, AR236: 3, AR272: 3, AR264: 3, AR182: 3, AR217: 3, AR288: 3, AR293: 3, AR257: 3, AR274: 3, AR178: 3, |
| | | | | AR169: 3, AR245: 3, AR229: 3, AR255: 3, AR311: 3, AR268: 3, AR177: 3, AR294: 3, AR262: 3, AR166: 3, AR179: 3, AR175: 3, AR170: 3, AR224: 3, AR287: 3, |
| | | | | AR164: 3, AR282: 3, AR238: 3, AR239: 3, AR171: 3, AR191: 3, AR237: 3, AR061: 3, AR291: 3, AR221: 2, AR181: 2, AR234: 2, AR173: 2, AR196: 2, AR231: 2, |
| | | | | AR240: 2, AR252: 2, AR285: 2, AR286: 2, AR190: 2, AR290: 2, AR300: 2, AR168: 2, AR174: 2, AR185: 2, AR289: 2, AR165: 2, AR308: 2, AR227: 2, AR295: 2, |
| | | | | AR223: 2, AR232: 2, AR188: 2, AR297: 2, AR201: 2, AR256: 2, AR189: 2, AR104: 2, AR200: 2, AR247: 2, AR226: 2, AR060: 2, AR225: 2, AR089: 1, AR230: 1, |
| | | | | AR312: 1, AR258: 1, AR211: 1, AR316: 1, AR199: 1, AR210: 1, AR212: 1, AR277: 1, AR180: 1, AR203: 1, AR033: 1, AR299: 1, AR055: 1, AR260: 1, L0758: 5, |
| | | | | H0550: 1, S0374: 1 and L0779: 1. |
| 91 | HELHD85 | 847372 | 101 | AR263: 4, AR221: 2, AR233: 2, AR225: 2, AR287: 2, AR271: 2, AR214: 2, AR198: 2, AR296: 2, AR196: 1, AR282: 1, AR172: 1, AR269: 1, AR313: 1, AR264: 1, |
| | | | | AR216: 1, L0743: 3, S0408: 2, S0022: 2, L0772: 2, L0805: 2, L0749: 2, S0242: 2, H0716: 1, S0116: 1, H0662: 1, S0360: 1, S0045: 1, H0392: 1, H0455: 1, L0021: 1, |
| | | | | H0599: 1, T0082: 1, H0309: 1, H0046: 1, H0086: 1, H0024: 1, H0628: 1, H0617: 1, H0606: 1, H0487: 1, H0509: 1, L0763: 1, L0646: 1, L0641: 1, L0649: 1, |
| | | | | L0803: 1, L0652: 1, L0629: 1, L0659: 1, L0787: 1, L0665: 1, S0053: 1, S0027: 1, S0032: 1, L0744: 1, L0751: 1, L0747: 1 and L0779: 1. |
| 92 | HEOMQ63 | 603533 | 102 | AR039: 7, AR221: 4, AR271: 4, AR309: 3, AR283: 3, AR252: 3, AR171: 3, AR162: 3, AR180: 3, AR163: 3, AR243: 3, AR217: 3, AR161: 3, AR176: 3, AR165: 3, |
| | | | | AR213: 3, AR282: 3, AR164: 3, AR291: 3, AR296: 3, AR245: 2, AR235: 2, AR089: 2, AR263: 2, AR231: 2, AR246: 2, AR297: 2, AR313: 2, AR224: 2, AR172: 2, |
| | | | | AR195: 2, AR174: 2, AR286: 2, AR168: 2, AR060: 2, AR289: 2, AR201: 2, AR294: 2, AR177: 2, AR300: 2, AR225: 2, AR211: 2, AR179: 2, AR229: 1, AR240: 1, |
| | | | | AR205: 1, AR239: 1, AR285: 1, AR299: 1, AR257: 1, AR264: 1, AR212: 1, AR166: 1, AR316: 1, AR287: 1, AR227: 1, AR247: 1, AR270: 1, AR170: 1, AR216: 1, |
| | | | | AR096: 1, AR237: 1, AR104: 1, L0766: 3, L0777: 2, S0116: 1, S0376: 1, H0457: 1, S0440: 1, L0771: 1, L0803: 1, L0804: 1, L0657: 1, L0659: 1, H0525: 1, S0406: 1 |
| | | | | and L0750: 1. |
| 93 | HEPAA46 | 596830 | 103 | AR215: 19, AR245: 4, AR221: 4, AR224: 3, AR282: 3, AR053: 3, AR252: 3, AR309: 3, AR176: 2, AR162: 2, AR169: 2, AR266: 2, AR166: 2, AR263: 2, AR214: 2, |
| | | | | AR161: 2, AR163: 2, AR172: 2, AR183: 2, AR165: 2, AR177: 2, AR164: 2, AR182: 2, AR313: 2, AR264: 2, AR283: 2, AR193: 2, AR236: 1, AR175: 1, AR217: 1, |
| | | | | AR233: 1, AR286: 1, AR171: 1, AR257: 1, AR223: 1, AR277: 1, AR297: 1, AR255: 1, AR296: 1, AR289: 1, AR295: 1, AR207: 1, AR204: 1, AR267: 1, AR181: 1, |
| | | | | AR033: 1, AR180: 1, AR234: 1, AR179: 1, AR299: 1, AR271: 1, AR188: 1, AR230: 1, AR262: 1, AR178: 1, AR287: 1, AR229: 1, AR201: 1, AR270: 1, AR291: 1, |
| | | | | AR185: 1, AR247: 1, AR205: 1, AR170: 1, AR294: 1, AR290: 1, AR212: 1, AR237: 1, H0549: 3, H0150: 2, L0779: 2 and L0758: 1. |
| 94 | HEPAB80 | 1307790 | 104 | AR191: 117, AR190: 89, AR245: 79, AR271: 76, AR175: 71, AR178: 66, AR189: 63, AR240: 60, AR246: 60, AR269: 58, AR174: 58, AR188: 56, AR196: 55, |
| | | | | AR180: 54, AR197: 54, AR176: 53, AR183: 53, AR211: 52, AR274: 50, AR182: 47, AR177: 47, AR207: 45, AR192: 44, AR235: 44, AR270: 44, AR179: 43, |
| | | | | AR181: 41, AR268: 41, AR312: 40, AR264: 40, AR261: 39, AR165: 39, AR166: 39, AR263: 38, AR250: 38, AR164: 37, AR290: 37, AR252: 37, AR266: 35, |
| | | | | AR200: 34, AR291: 34, AR210: 34, AR285: 33, AR255: 32, AR243: 32, AR295: 31, AR247: 30, AR254: 29, AR308: 28, AR236: 28, AR275: 28, AR201: 28, |
| | | | | AR173: 28, AR033: 27, AR163: 26, AR267: 26, AR238: 26, AR195: 25, AR198: 25, AR253: 25, AR287: 25, AR193: 25, AR161: 24, AR260: 24, AR311: 24, |
| | | | | AR288: 23, AR297: 23, AR162: 21, AR205: 21, AR294: 21, AR239: 20, AR256: 20, AR313: 20, AR289: 20, AR096: 20, AR060: 20, AR262: 19, AR300: 18, |
| | | | | AR258: 18, AR185: 18, AR226: 17, AR272: 17, AR257: 17, AR219: 17, AR232: 16, AR039: 16, AR316: 16, AR293: 15, AR237: 15, AR296: 15, AR309: 15, |
| | | | | AR282: 14, AR234: 14, AR224: 14, AR231: 13, AR053: 13, AR233: 13, AR203: 13, AR229: 13, AR286: 12, AR299: 12, AR199: 12, AR172: 11, AR222: 11, |
| | | | | AR221: 11, AR212: 11, AR061: 11, AR089: 11, AR277: 10, AR169: 10, AR230: 10, AR242: 10, AR104: 10, AR223: 10, AR213: 9, AR228: 9, AR168: 9, |
| | | | | AR218: 9, AR170: 8, AR204: 8, AR225: 8, AR227: 7, AR216: 6, AR214: 6, AR055: 5, AR171: 5, AR283: 5, AR215: 3, AR217: 2, H0150: 1. |
| | HEPAB80 | 570048 | 401 | |
| 95 | HFABG18 | 847073 | 105 | AR292: 14, AR186: 12, AR241: 10, AR194: 9, AR273: 9, AR052: 8, AR202: 8, AR061: 8, AR282: 7, AR291: 7, AR206: 7, AR298: 7, AR284: 7, AR274: 7, |
| | | | | AR275: 6, AR295: 6, AR184: 6, AR251: 6, AR244: 6, AR238: 5, AR204: 5, AR226: 5, AR310: 4, AR232: 4, AR286: 4, AR248: 4, AR296: 4, AR033: 4, AR289: 4, |
| | | | | AR285: 4, AR266: 4, AR246: 4, AR243: 4, AR055: 4, AR198: 4, AR312: 4, AR224: 4, AR309: 4, AR269: 4, AR283: 3, AR299: 3, AR227: 3, AR231: 3, AR237: 3, |
| | | | | AR192: 3, AR265: 3, AR267: 3, AR268: 3, AR253: 3, AR270: 3, AR259: 3, AR290: 3, AR053: 3, AR249: 3, AR193: 3, AR183: 3, AR300: 3, AR060: 3, AR182: 3, |
| | | | | AR213: 3, AR233: 3, AR229: 3, AR172: 3, AR294: 3, AR247: 3, AR216: 3, AR313: 3, AR225: 3, AR185: 3, AR293: 3, AR205: 3, AR218: 2, AR168: 2, AR277: 2, |
| | | | | AR195: 2, AR089: 2, AR234: 2, AR261: 2, AR215: 2, AR271: 2, AR219: 2, AR177: 2, AR235: 2, AR263: 2, AR171: 2, AR096: 2, AR316: 2, AR176: 2, AR245: 2, |
| | | | | AR240: 2, AR175: 2, AR308: 2, AR272: 2, AR257: 2, AR163: 2, AR256: 2, AR104: 1, AR165: 1, AR166: 1, AR315: 1, AR297: 1, AR169: 1, AR164: 1, AR039: 1, |
| | | | | AR280: 1, AR255: 1, AR287: 1, L0743: 7, L0747: 6, L0758: 6, L0766: 5, L0666: 5, L0754: 5, L0750: 5, L0662: 4, L0783: 4, L0665: 4, L0751: 4, L0777: 4, |
| | | | | H0170: 3, S0132: 3, L0503: 3, L0500: 3, L0769: 3, L0774: 3, L0805: 3, L0809: 3, L0565: 3, L0749: 3, L0757: 3, L0596: 3, S0360: 2, H0013: 2, H0024: 2, H0617: 2, |
| | | | | H0673: 2, L0641: 2, L0773: 2, L0768: 2, L0649: 2, L0499: 2, L0375: 2, L0659: 2, L0664: 2, H0658: 2, L0744: 2, L0748: 2, L0740: 2, L0745: 2, L0603: 2, H0265: 1, |
| | | | | H0556: 1, S6024: 1, H0661: 1, H0662: 1, S0418: 1, T0008: 1, H0351: 1, S0222: 1, H0370: 1, T0039: 1, L0015: 1, S0280: 1, H0575: 1, H0004: 1, H0618: 1, H0596: 1, |
| | | | | H0231: 1, H0545: 1, H0009: 1, H0012: 1, S0388: 1, S0051: 1, H0292: 1, H0688: 1, H0644: 1, L0055: 1, H0674: 1, H0124: 1, H0598: 1, H0087: 1, S0440: 1, |
| | | | | S0150: 1, S0142: 1, L0763: 1, L0770: 1, L0764: 1, L0771: 1, L0794: 1, L0650: 1, L0651: 1, L0378: 1, L0776: 1, L0655: 1, L0629: 1, L0657: 1, L0493: 1, L0634: 1, |
| | | | | L0528: 1, H0144: 1, H0547: 1, H0690: 1, H0682: 1, H0670: 1, S0328: 1, H0518: 1, H0436: 1, L0746: 1, L0756: 1, L0779: 1, L0780: 1, L0731: 1, H0445: 1, S0434: 1, |
| | | | | L0592: 1, L0595: 1, H0668: 1, S0194: 1, H0506: 1 and H0008: 1. |
| 96 | HFABH95 | 566712 | 106 | AR173: 16, AR162: 14, AR161: 14, AR163: 13, AR180: 12, AR178: 11, AR257: 11, AR262: 11, AR191: 11, AR196: 10, AR181: 10, AR226: 10, AR174: 10, |
| | | | | AR297: 10, AR255: 9, AR165: 9, AR238: 9, AR313: 9, AR287: 8, AR164: 8, AR199: 8, AR258: 8, AR166: 8, AR176: 8, AR240: 8, AR236: 8, AR179: 8, AR183: 8, |
| | | | | AR261: 8, AR264: 7, AR288: 7, AR260: 7, AR225: 7, AR182: 7, AR242: 7, AR230: 7, AR200: 7, AR089: 7, AR229: 7, AR247: 7, AR203: 7, AR189: 7, AR227: 7, |
| | | | | AR234: 6, AR188: 6, AR061: 6, AR237: 6, AR231: 6, AR175: 6, AR228: 6, AR269: 6, AR270: 6, AR233: 6, AR300: 6, AR296: 6, AR299: 6, AR221: 5, AR254: 5, |
| | | | | AR239: 5, AR293: 5, AR060: 5, AR193: 5, AR223: 5, AR185: 5, AR190: 5, AR217: 5, AR232: 5, AR171: 5, AR215: 5, AR245: 5, AR212: 5, AR216: 5, AR274: 5, |
| | | | | AR294: 5, AR290: 5, AR282: 4, AR291: 4, AR266: 4, AR316: 4, AR169: 4, AR268: 4, AR204: 4, AR285: 4, AR267: 4, AR218: 4, AR210: 4, AR096: 4, AR177: 4, |
| | | | | AR311: 4, AR246: 4, AR184: 4, AR277: 4, AR170: 4, AR286: 4, AR272: 4, AR192: 4, AR033: 4, AR235: 4, AR312: 4, AR308: 4, AR275: 3, AR263: 3, AR053: 3, |
| | | | | AR214: 3, AR253: 3, AR309: 3, AR172: 3, AR202: 3, AR201: 3, AR168: 3, AR197: 3, AR211: 3, AR224: 3, AR289: 3, AR198: 3, AR213: 3, AR219: 3, AR195: 3, |
| | | | | AR052: 3, AR104: 3, AR207: 3, AR295: 2, AR256: 2, AR222: 2, AR205: 2, AR271: 2, AR039: 2, AR186: 2, AR243: 2, AR283: 2, AR055: 2, AR273: 2, AR206: 1, |
| | | | | AR244: 1, AR252: 1, S6024: 1, S0430: 1, H0039: 1, H0056: 1 and H0660: 1. |
| 97 | HFAEF57 | 534142 | 107 | AR241: 14, AR161: 14, AR162: 13, AR163: 13, AR313: 10, AR242: 10, AR201: 10, AR165: 9, AR164: 9, AR252: 9, AR197: 9, AR194: 9, AR053: 9, AR166: 9, |
| | | | | AR198: 8, AR245: 8, AR236: 8, AR192: 8, AR176: 8, AR206: 8, AR250: 8, AR212: 8, AR235: 8, AR196: 7, AR271: 7, AR186: 7, AR052: 7, AR173: 7, AR204: 7, |
| | | | | AR246: 7, AR253: 7, AR263: 7, AR207: 7, AR191: 7, AR275: 7, AR180: 7, AR226: 7, AR272: 7, AR247: 7, AR181: 6, AR299: 6, AR089: 6, AR195: 6, AR293: 6, |
| | | | | AR244: 6, AR193: 6, AR312: 6, AR213: 6, AR229: 6, AR039: 6, AR280: 6, AR251: 6, AR188: 6, AR202: 6, AR309: 6, AR287: 6, AR264: 6, AR238: 6, AR273: 6, |
| | | | | AR174: 6, AR177: 6, AR240: 6, AR257: 6, AR237: 5, AR243: 5, AR061: 5, AR233: 5, AR228: 5, AR261: 5, AR184: 5, AR182: 5, AR262: 5, AR185: 5, AR300: 5, |
| | | | | AR270: 5, AR096: 5, AR189: 5, AR190: 5, AR274: 5, AR248: 5, AR205: 5, AR315: 5, AR183: 5, AR175: 5, AR288: 5, AR169: 5, AR033: 5, AR297: 5, AR269: 5, |
| | | | | AR199: 5, AR178: 5, AR249: 5, AR295: 5, AR308: 4, AR055: 4, AR223: 4, AR254: 4, AR060: 4, AR104: 4, AR216: 4, AR296: 4, AR227: 4, AR290: 4, AR221: 4, |
| | | | | AR266: 4, AR232: 4, AR239: 4, AR311: 4, AR179: 4, AR298: 4, AR200: 4, AR231: 4, AR285: 4, AR255: 4, AR268: 4, AR286: 4, AR267: 4, AR282: 4, AR230: 4, |
| | | | | AR294: 4, AR316: 4, AR214: 4, AR234: 4, AR168: 4, AR277: 3, AR258: 3, AR291: 3, AR170: 3, AR217: 3, AR203: 3, AR292: 3, AR171: 3, AR289: 3, AR310: 3, |
| | | | | AR265: 3, AR215: 3, AR259: 3, AR284: 3, AR225: 2, AR281: 2, AR219: 2, AR218: 2, AR283: 2, AR222: 2, AR314: 2, AR260: 2, AR210: 2, AR172: 2, AR224: 2, |
| | | | | AR211: 1, AR256: 1, S6024: 1 |
| 98 | HFAMH77 | 543486 | 108 | AR295: 13, AR296: 13, AR218: 11, AR285: 10, AR287: 9, AR261: 9, AR219: 8, AR096: 8, AR264: 7, AR297: 7, AR055: 7, AR291: 7, AR313: 7, AR294: 6, |
| | | | | AR060: 6, AR288: 6, AR286: 6, AR170: 6, AR255: 6, AR039: 6, AR262: 6, AR293: 5, AR283: 5, AR316: 5, AR053: 5, AR221: 5, AR104: 5, AR309: 5, AR263: 4, |
| | | | | AR254: 4, AR089: 4, AR257: 4, AR240: 4, AR229: 4, AR312: 4, AR258: 4, AR271: 4, AR217: 4, AR161: 4, AR177: 4, AR162: 4, AR299: 4, AR311: 4, AR245: 4, |
| | | | | AR193: 3, AR260: 3, AR246: 3, AR163: 3, AR212: 3, AR270: 3, AR266: 3, AR289: 3, AR174: 3, AR308: 3, AR250: 3, AR253: 3, AR178: 3, AR165: 3, AR191: 3, |
| | | | | AR171: 3, AR275: 3, AR213: 3, AR282: 3, AR164: 3, AR181: 3, AR166: 3, AR169: 3, AR300: 3, AR267: 3, AR268: 3, AR175: 3, AR173: 3, AR189: 3, AR236: 3, |
| | | | | AR269: 3, AR172: 3, AR185: 3, AR182: 3, AR180: 3, AR198: 3, AR252: 3, AR290: 3, AR274: 2, AR226: 2, AR228: 2, AR238: 2, AR247: 2, AR239: 2, AR211: 2, |
| | | | | AR233: 2, AR188: 2, AR200: 2, AR256: 2, AR237: 2, AR232: 2, AR203: 2, AR234: 2, AR190: 2, AR183: 2, AR201: 2, AR231: 2, AR199: 2, AR224: 2, AR179: 2, |
| | | | | AR277: 2, AR272: 2, AR214: 2, AR235: 1, AR061: 1, AR210: 1, AR176: 1, AR196: 1, AR230: 1, AR216: 1, L0771: 5, L0805: 4, S0007: 3, L0794: 3, L0439: 3, |
| | | | | L0758: 3, H0657: 2, L0662: 2, L0766: 2, L0659: 2, H0670: 2, L0731: 2, L0757: 2, S0436: 2, H0624: 1, S0134: 1, S0356: 1, S0408: 1, H0733: 1, H0747: 1, H0486: 1, |
| | | | | L3653: 1, S0474: 1, H0581: 1, H0327: 1, H0545: 1, H0373: 1, H0622: 1, L0770: 1, L0769: 1, L0761: 1, L0644: 1, L0803: 1, L0774: 1, L0655: 1, L0438: 1, H0539: 1, |
| | | | | H0521: 1, H0555: 1, L0741: 1, L0748: 1, L0779: 1 and S0031: 1. |
| 99 | HFCCQ50 | 579993 | 109 | AR214: 58, AR274: 55, AR216: 54, AR217: 51, AR222: 50, AR245: 47, AR223: 47, AR272: 46, AR199: 45, AR224: 43, AR169: 42, AR168: 39, AR308: 38, |
| | | | | AR225: 38, AR205: 36, AR251: 35, AR212: 35, AR221: 35, AR264: 33, AR171: 33, AR165: 32, AR313: 31, AR213: 31, AR164: 31, AR162: 30, AR166: 30, |
| | | | | AR210: 30, AR247: 30, AR161: 30, AR172: 30, AR170: 29, AR215: 29, AR309: 29, AR163: 29, AR312: 28, AR273: 28, AR189: 28, AR188: 28, AR053: 28, |
| | | | | AR178: 27, AR180: 27, AR173: 26, AR236: 25, AR254: 25, AR183: 24, AR197: 23, AR250: 23, AR179: 22, AR263: 22, AR174: 22, AR246: 22, AR311: 22, |
| | | | | AR190: 22, AR218: 22, AR310: 21, AR052: 20, AR253: 20, AR195: 20, AR262: 19, AR211: 19, AR256: 19, AR300: 19, AR252: 18, AR242: 18, AR175: 18, |
| | | | | AR299: 18, AR255: 18, AR297: 18, AR288: 17, AR271: 17, AR240: 17, AR269: 17, AR219: 17, AR275: 17, AR089: 17, AR282: 17, AR270: 17, AR261: 16, |
| | | | | AR243: 16, AR176: 16, AR257: 16, AR230: 16, AR096: 15, AR316: 15, AR258: 15, AR181: 15, AR268: 15, AR260: 15, AR266: 15, AR293: 15, AR201: 15, |
| | | | | AR265: 14, AR267: 14, AR290: 14, AR291: 14, AR193: 14, AR200: 13, AR191: 13, AR203: 13, AR039: 13, AR296: 13, AR060: 12, AR196: 12, AR283: 12, |
| | | | | AR289: 12, AR239: 12, AR229: 12, AR277: 12, AR198: 12, AR182: 12, AR177: 12, AR204: 11, AR185: 11, AR287: 11, AR237: 11, AR295: 11, AR231: 11, |
| | | | | AR244: 10, AR192: 10, AR248: 10, AR238: 10, AR280: 9, AR286: 9, AR315: 9, AR104: 9, AR285: 9, AR249: 9, AR226: 9, AR294: 9, AR235: 8, AR234: 8, |
| | | | | AR314: 8, AR033: 8, AR228: 8, AR186: 8, AR233: 7, AR292: 7, AR232: 7, AR241: 6, AR061: 6, AR207: 5, AR055: 5, AR227: 5, AR259: 5, AR206: 4, AR281: 2, |
| | | | | AR298: 2, AR184: 2, AR284: 1, AR194: 1, S0476: 1, L0803: 1, L0666: 1 and L0608: 1. |
| 100 | HFCEB37 | 411345 | 110 | AR282: 18, AR176: 14, AR269: 13, AR183: 11, AR173: 11, AR201: 11, AR182: 11, AR252: 11, AR204: 11, AR193: 11, AR294: 10, AR243: 9, AR233: 9, |
| | | | | AR236: 9, AR197: 9, AR162: 9, AR161: 9, AR270: 9, AR163: 9, AR178: 9, AR165: 9, AR217: 9, AR225: 9, AR175: 9, AR231: 9, AR181: 9, AR089: 8, AR215: 8, |
| | | | | AR164: 8, AR207: 8, AR170: 8, AR216: 8, AR166: 8, AR172: 8, AR268: 8, AR221: 8, AR291: 8, AR169: 8, AR179: 8, AR261: 8, AR235: 8, AR205: 8, AR224: 8, |
| | | | | AR039: 7, AR180: 7, AR060: 7, AR242: 7, AR267: 7, AR228: 7, AR168: 7, AR223: 7, AR290: 7, AR198: 7, AR296: 7, AR266: 7, AR285: 7, AR287: 7, AR316: 7, |
| | | | | AR174: 7, AR257: 7, AR237: 7, AR271: 7, AR245: 7, AR313: 7, AR033: 7, AR229: 7, AR192: 7, AR255: 7, AR250: 7, AR288: 7, AR191: 6, AR254: 6, AR096: 6, |
| | | | | AR177: 6, AR055: 6, AR195: 6, AR246: 6, AR238: 6, AR222: 6, AR240: 6, AR239: 6, AR262: 6, AR293: 6, AR247: 6, AR300: 6, AR289: 6, AR264: 6, AR214: 6, |
| | | | | AR299: 6, AR188: 6, AR297: 6, AR190: 6, AR171: 6, AR253: 6, AR200: 6, AR295: 5, AR053: 5, AR185: 5, AR226: 5, AR196: 5, AR309: 5, AR274: 5, AR312: 5, |
| | | | | AR234: 5, AR189: 5, AR286: 5, AR061: 4, AR308: 4, AR227: 4, AR275: 4, AR104: 4, AR263: 4, AR258: 4, AR218: 4, AR203: 4, AR232: 4, AR272: 4, AR230: 4, |
| | | | | AR277: 4, AR256: 4, AR212: 3, AR199: 3, AR210: 3, AR211: 3, AR311: 3, AR283: 3, AR219: 3, AR213: 3, AR260: 2, S0222: 2, L0438: 2, S0134: 1, S0045: 1, |
| | | | | H0747: 1, H0013: 1, H0009: 1, S6028: 1, L0598: 1, L0532: 1, S0052: 1, H0696: 1, S0146: 1, L0439: 1, L0777: 1 and L0366: 1. |
| 101 | HFFAD59 | 520369 | 111 | AR225: 3, AR162: 3, AR161: 3, AR271: 3, AR183: 2, AR180: 2, AR282: 2, AR217: 2, AR254: 2, AR198: 2, AR291: 2, AR175: 2, AR288: 2, AR177: 2, AR201: 2, |
| | | | | AR163: 2, AR267: 2, AR224: 2, AR295: 2, AR266: 2, AR312: 2, AR173: 2, AR277: 2, AR311: 2, AR238: 2, AR033: 2, AR193: 2, AR228: 2, AR294: 2, AR195: 2, |
| | | | | AR275: 1, AR243: 1, AR272: 1, AR272: 1, AR205: 1, AR174: 1, AR213: 1, AR293: 1, AR308: 1, AR229: 1, AR233: 1, AR285: 1, AR247: 1, AR269: 1, AR181: 1, AR182: 1, |
| | | | | AR230: 1, AR296: 1, AR185: 1, AR240: 1, AR297: 1, AR258: 1, H0172: 2 |
| 102 | HFFAL36 | 560639 | 112 | AR272: 6, AR223: 6, AR205: 6, AR308: 6, AR225: 5, AR053: 5, AR224: 5, AR252: 5, AR296: 5, AR245: 4, AR266: 4, AR212: 4, AR246: 4, AR169: 4, AR222: 4, |
| | | | | AR312: 3, AR311: 3, AR285: 3, AR242: 3, AR197: 3, AR213: 3, AR289: 2, AR287: 2, AR221: 2, AR180: 2, AR200: 2, AR286: 2, AR270: 2, AR039: 2, AR264: 2, |
| | | | | AR183: 2, AR295: 2, AR195: 2, AR181: 2, AR172: 2, AR196: 2, AR271: 2, AR238: 2, AR269: 2, AR257: 2, AR033: 2, AR282: 2, AR233: 2, AR297: 1, AR171: 1, |
| | | | | AR089: 1, AR240: 1, AR237: 1, AR096: 1, AR258: 1, AR215: 1, AR185: 1, AR262: 1, AR228: 1, AR239: 1, AR277: 1, AR230: 1, AR207: 1, AR231: 1, AR229: 1, |
| | | | | AR260: 1, AR253: 1, AR313: 1, AR104: 1, AR217: 1, AR293: 1, AR177: 1, AR255: 1, H0172: 1, L0500: 1, L0512: 1, L0748: 1, L0749: 1, L0777: 1 and L0096: 1. |
| 103 | HFGAD82 | 513669 | 113 | AR104: 18, AR033: 14, AR222: 7, AR162: 6, AR161: 6, AR163: 6, AR309: 6, AR207: 5, AR224: 5, AR282: 5, AR178: 4, AR053: 4, AR274: 4, AR089: 4, |
| | | | | AR195: 4, AR272: 4, AR165: 4, AR289: 3, AR164: 3, AR166: 3, AR308: 3, AR246: 3, AR312: 3, AR183: 3, AR223: 3, AR197: 3, AR192: 3, AR252: 3, AR277: 3, |
| | | | | AR261: 3, AR039: 3, AR245: 3, AR176: 3, AR096: 3, AR170: 3, AR296: 3, AR168: 2, AR266: 2, AR180: 2, AR299: 2, AR201: 2, AR060: 2, AR311: 2, AR316: 2, |
| | | | | AR264: 2, AR285: 2, AR287: 2, AR270: 2, AR294: 2, AR271: 2, AR288: 2, AR225: 2, AR293: 2, AR290: 2, AR171: 2, AR286: 2, AR291: 2, AR295: 2, AR216: 2, |
| | | | | AR297: 2, AR275: 2, AR247: 2, AR191: 2, AR185: 2, AR229: 2, AR205: 2, AR300: 2, AR257: 2, AR283: 2, AR269: 2, AR182: 2, AR061: 1, AR193: 1, AR213: 1, |
| | | | | AR236: 1, AR237: 1, AR313: 1, AR217: 1, AR268: 1, AR175: 1, AR179: 1, AR233: 1, L0439: 22, L0756: 12, S0222: 11, L0438: 10, S0414: 8, S0051: 8, L0598: 7, |
| | | | | S0412: 6, L3657: 5, L0770: 5, H0144: 5, L0638: 4, H0170: 3, S0282: 3, H0438: 3, S0036: 3, L0740: 3, S0031: 3, S0260: 3, S0007: 2, H0441: 2, L3655: 2, S0049: 2, |
| | | | | H0052: 2, H0178: 2, H0051: 2, S6028: 2, S0038: 2, L0759: 2, L0589: 2, L0366: 2, H0583: 1, S0001: 1, H0662: 1, L3658: 1, L0476: 1, S0300: 1, H0406: 1, S6014: 1, |
| | | | | H0455: 1, H0013: 1, H0244: 1, H0390: 1, S0346: 1, H0327: 1, H0041: 1, H0563: 1, H0567: 1, S0050: 1, S0048: 1, S0388: 1, S0039: 1, L0796: 1, L5575: 1, L0630: 1, |
| | | | | L0767: 1, L0794: 1, L0774: 1, L0805: 1, L0776: 1, L0518: 1, L0809: 1, L0788: 1, L0792: 1, L0666: 1, S0374: 1, H0658: 1, S0330: 1, L0777: 1, L0758: 1, L0592: 1, |
| | | | | and L0593: 1. |
| 104 | HFIUR10 | 532060 | 114 | AR169: 4, AR165: 4, AR161: 3, AR163: 3, AR215: 3, AR162: 3, AR166: 3, AR246: 3, AR252: 3, AR313: 3, AR089: 3, AR311: 3, AR266: 2, AR270: 2, AR180: 2, |
| | | | | AR261: 2, AR164: 2, AR224: 2, AR269: 2, AR096: 2, AR236: 2, AR289: 2, AR201: 2, AR297: 2, AR312: 2, AR205: 2, AR217: 2, AR255: 2, AR172: 2, AR240: 2, |
| | | | | AR216: 2, AR183: 2, AR309: 2, AR173: 2, AR291: 2, AR176: 2, AR196: 2, AR295: 1, AR264: 1, AR225: 1, AR299: 1, AR033: 1, AR174: 1, AR257: 1, AR282: 1, |
| | | | | AR060: 1, AR230: 1, AR178: 1, AR177: 1, AR316: 1, AR168: 1, AR243: 1, AR283: 1, AR268: 1, AR277: 1, AR189: 1, AR290: 1, AR247: 1, AR055: 1, AR308: 1, |
| | | | | AR288: 1, AR300: 1, AR237: 1, AR185: 1, H0265: 2, L0591: 2, H0556: 1, S0356: 1, H0271: 1, H0622: 1, S0428: 1, S0434: 1 and S0196: 1. |
| 105 | HFTBM50 | 545012 | 115 | AR300: 4, AR104: 4, AR240: 4, AR277: 3, AR060: 3, AR185: 3, AR055: 3, AR299: 2, AR316: 2, AR282: 2, AR219: 2, AR089: 2, AR283: 2, AR218: 2, AR096: 2, |
| | | | | AR039: 2, AR313: 1, L0439: 6, L0731: 4, L0769: 2, L0666: 2, S0432: 2, S0206: 2, L0751: 2, L0777: 2, L0759: 2, L0591: 2, H0341: 1, H0661: 1, S0408: 1, |
| | | | | H0601: 1, H0497: 1, H0123: 1, L0471: 1, H0051: 1, H0252: 1, H0673: 1, H0616: 1, H0551: 1, H0646: 1, S0422: 1, L0372: 1, L0771: 1, L0773: 1, L0768: 1, |
| | | | | L0775: 1, L0375: 1, L0527: 1, L0664: 1, L0665: 1, S0374: 1, H0519: 1, H0659: 1, H0521: 1, H0522: 1, L0747: 1, L0749: 1, L0755: 1, L0758: 1, S0031: 1, L0683: 1, |
| | | | | L0590: 1 and L0595: 1. |
| 106 | HFTDZ36 | 545726 | 116 | AR282: 5, AR176: 3, AR252: 2, AR270: 2, AR287: 2, AR309: 2, AR221: 2, AR263: 2, AR291: 2, AR224: 2, AR233: 2, AR181: 2, AR198: 2, AR240: 2, AR222: 2, |
| | | | | AR193: 2, AR214: 2, AR286: 2, AR165: 2, AR164: 1, AR178: 1, AR236: 1, AR201: 1, AR168: 1, AR089: 1, AR262: 1, AR060: 1, AR217: 1, AR161: 1, AR272: 1, |
| | | | | AR264: 1, AR061: 1, AR195: 1, AR257: 1, AR268: 1, AR215: 1, AR285: 1, AR258: 1, AR210: 1, AR104: 1, AR196: 1, L0779: 5, L0758: 4, S0036: 2, H0038: 2, |
| | | | | S0422: 2, L0662: 2, L0803: 2, H0171: 1, H0208: 1, H0411: 1, S0222: 1, H0013: 1, H0108: 1, H0581: 1, H0123: 1, H0024: 1, H0373: 1, S0051: 1, S6028: 1, H0615: 1, |
| | | | | L0794: 1, L0804: 1, S0126: 1, H0436: 1, S0028: 1, L0756: 1, L0777: 1, L0731: 1 and S0242: 1. |
| 107 | HFVAB79 | 1300736 | 117 | AR254: 20, AR250: 17, AR252: 16, AR253: 15, AR240: 12, AR245: 11, AR282: 11, AR290: 10, AR161: 10, AR163: 10, AR162: 10, AR199: 10, AR164: 9, |
| | | | | AR165: 9, AR188: 9, AR200: 9, AR234: 9, AR229: 9, AR166: 9, AR247: 9, AR268: 8, AR197: 8, AR246: 8, AR215: 8, AR267: 8, AR238: 8, AR242: 8, AR216: 8, |
| | | | | AR270: 8, AR239: 7, AR203: 7, AR196: 7, AR294: 7, AR201: 7, AR231: 7, AR263: 7, AR264: 7, AR214: 7, AR217: 7, AR193: 6, AR061: 6, AR183: 6, AR272: 6, |
| | | | | AR195: 6, AR039: 6, AR180: 6, AR172: 6, AR271: 6, AR237: 6, AR170: 6, AR228: 6, AR230: 6, AR269: 5, AR313: 5, AR233: 5, AR243: 5, AR300: 5, AR190: 5, |
| | | | | AR176: 5, AR225: 5, AR173: 5, AR089: 5, AR221: 5, AR168: 5, AR204: 5, AR181: 4, AR169: 4, AR182: 4, AR226: 4, AR236: 4, AR312: 4, AR177: 4, AR191: 4, |
| | | | | AR096: 4, AR189: 4, AR227: 4, AR316: 4, AR171: 4, AR309: 4, AR224: 4, AR235: 4, AR266: 4, AR053: 4, AR060: 4, AR232: 4, AR275: 4, AR212: 4, AR288: 4, |
| | | | | AR222: 4, AR175: 4, AR179: 4, AR311: 3, AR291: 3, AR192: 3, AR299: 3, AR257: 3, AR308: 3, AR205: 3, AR277: 3, AR289: 3, AR198: 3, AR293: 3, AR213: 3, |
| | | | | AR223: 3, AR255: 3, AR274: 3, AR296: 3, AR262: 3, AR297: 3, AR285: 3, AR178: 3, AR207: 3, AR295: 3, AR287: 3, AR286: 2, AR261: 2, AR185: 2, AR055: 2, |
| | | | | AR033: 2, AR174: 2, AR258: 2, AR256: 2, AR218: 2, AR104: 2, AR210: 2, AR260: 1, AR219: 1, AR211: 1, AR283: 1, L0803: 8, L0748: 4, H0151: 1, S0045: 1, |
| | | | | H0574: 1, H0038: 1, H0745: 1, S0438: 1, L0771: 1, L0804: 1, L0774: 1 and L0750: 1. |
| | HFVAB79 | 565076 | 402 | |
| 108 | HFVGE32 | 854545 | 118 | AR313: 29, AR173: 22, AR161: 21, AR162: 21, AR163: 20, AR165: 18, AR164: 17, AR196: 17, AR166: 16, AR240: 16, AR258: 16, AR300: 16, AR096: 15, |
| | | | | AR229: 15, AR218: 14, AR247: 14, AR257: 14, AR175: 13, AR185: 13, AR264: 13, AR174: 13, AR262: 13, AR234: 12, AR275: 12, AR299: 12, AR177: 11, |
| | | | | AR181: 11, AR274: 11, AR199: 10, AR236: 10, AR089: 10, AR226: 10, AR270: 10, AR178: 10, AR179: 10, AR191: 10, AR233: 9, AR269: 9, AR180: 9, |
| | | | | AR293: 9, AR182: 9, AR238: 9, AR183: 8, AR104: 8, AR219: 8, AR316: 8, AR203: 8, AR033: 7, AR261: 7, AR231: 7, AR189: 7, AR230: 7, AR312: 7, AR200: 7, |
| | | | | AR176: 7, AR060: 6, AR268: 6, AR282: 6, AR260: 6, AR255: 6, AR277: 6, AR228: 6, AR237: 6, AR188: 6, AR267: 6, AR263: 6, AR285: 6, AR308: 6, AR294: 6, |
| | | | | AR297: 5, AR296: 5, AR239: 5, AR309: 5, AR286: 5, AR272: 5, AR266: 5, AR053: 4, AR287: 4, AR290: 4, AR256: 4, AR212: 4, AR295: 4, AR250: 4, AR227: 4, |
| | | | | AR213: 4, AR291: 4, AR288: 4, AR190: 3, AR311: 3, AR168: 3, AR271: 3, AR224: 3, AR232: 3, AR211: 3, AR289: 2, AR283: 2, AR223: 2, AR055: 2, AR217: 2, |
| | | | | AR222: 2, AR171: 2, AR235: 2, AR210: 2, AR061: 2, AR172: 1, AR216: 1, AR246: 1, AR221: 1, S0052: 2 and H0393: 1. |
| | HFVGE32 | 698580 | 403 | |
| 109 | HFXBL33 | 778070 | 119 | AR163: 25, AR161: 24, AR162: 24, AR313: 23, AR173: 17, AR180: 17, AR196: 17, AR165: 17, AR166: 16, AR229: 16, AR164: 16, AR270: 14, AR247: 14, |
| | | | | AR182: 14, AR238: 14, AR234: 14, AR175: 14, AR179: 13, AR269: 13, AR181: 13, AR178: 13, AR199: 12, AR258: 12, AR262: 12, AR240: 11, AR233: 11, |
| | | | | AR257: 11, AR183: 11, AR264: 11, AR300: 10, AR268: 10, AR285: 10, AR293: 10, AR274: 10, AR231: 10, AR275: 10, AR191: 10, AR230: 10, AR228: 10, |
| | | | | AR236: 10, AR237: 10, AR226: 10, AR239: 9, AR287: 9, AR203: 9, AR294: 9, AR174: 9, AR296: 9, AR260: 8, AR176: 8, AR189: 8, AR200: 8, AR312: 8, |
| | | | | AR033: 8, AR096: 8, AR185: 8, AR299: 8, AR255: 7, AR297: 7, AR267: 7, AR188: 7, AR177: 7, AR290: 7, AR277: 6, AR218: 6, AR190: 6, AR286: 6, AR291: 6, |
| | | | | AR089: 6, AR266: 6, AR060: 6, AR227: 6, AR219: 6, AR263: 5, AR295: 5, AR316: 5, AR311: 5, AR261: 5, AR055: 5, AR235: 5, AR309: 5, AR282: 5, AR272: 4, |
| | | | | AR288: 4, AR308: 4, AR256: 4, AR053: 4, AR289: 4, AR104: 4, AR283: 4, AR215: 4, AR223: 4, AR232: 4, AR212: 4, AR213: 3, AR061: 3, AR211: 3, AR217: 3, |
| | | | | AR216: 3, AR169: 3, AR210: 3, AR195: 3, AR168: 2, AR225: 2, AR201: 2, AR193: 2, AR171: 2, AR214: 2, AR039: 2, AR243: 2, AR222: 2, AR170: 1, AR246: 1, |
| | | | | AR224: 1, H0657: 3, H0645: 2, L0748: 2, H0542: 2, H0583: 1, H0650: 1, S0001: 1, L0586: 1, H0013: 1, L0021: 1, T0071: 1, H0354: 1, H0179: 1, T0006: 1, |
| | | | | H0591: 1, H0272: 1, L0667: 1, H0547: 1, H0521: 1, S0404: 1, S0031: 1 and L0599: 1. |
| 110 | HFXDN63 | 553685 | 120 | AR161: 4, AR162: 4, AR204: 4, AR225: 4, AR163: 4, AR271: 3, AR198: 3, AR275: 3, AR193: 3, AR309: 3, AR282: 3, AR277: 2, AR060: 2, AR176: 2, AR205: 2, |
| | | | | AR246: 2, AR053: 2, AR254: 2, AR288: 2, AR165: 2, AR055: 2, AR266: 2, AR171: 2, AR263: 2, AR182: 2, AR166: 2, AR195: 2, AR089: 1, AR215: 1, AR185: 1, |
| | | | | AR217: 1, AR237: 1, AR270: 1, AR196: 1, AR261: 1, AR267: 1, AR296: 1, AR201: 1, AR216: 1, AR264: 1, AR316: 1, AR168: 1, AR247: 1, S0001: 1. |
| 111 | HFXJX44 | 701988 | 121 | AR313: 13, AR162: 11, AR161: 10, AR178: 10, AR163: 10, AR176: 10, AR183: 10, AR165: 9, AR089: 9, AR181: 9, AR182: 9, AR164: 9, AR229: 9, AR166: 8, |
| | | | | AR269: 8, AR173: 8, AR196: 8, AR055: 8, AR300: 8, AR228: 8, AR175: 7, AR233: 7, AR226: 7, AR309: 7, AR247: 7, AR192: 7, AR239: 7, AR180: 7, AR236: 7, |
| | | | | AR257: 7, AR293: 7, AR266: 7, AR235: 7, AR240: 7, AR238: 7, AR267: 7, AR096: 7, AR177: 7, AR261: 6, AR053: 6, AR179: 6, AR245: 6, AR268: 6, AR282: 6, |
| | | | | AR299: 6, AR198: 6, AR290: 6, AR204: 6, AR191: 6, AR060: 6, AR262: 6, AR174: 6, AR277: 6, AR312: 6, AR271: 6, AR185: 5, AR316: 5, AR289: 5, AR270: 5, |
| | | | | AR294: 5, AR193: 5, AR201: 5, AR258: 5, AR296: 5, AR212: 5, AR237: 5, AR255: 5, AR227: 5, AR234: 5, AR061: 5, AR274: 5, AR275: 5, AR264: 5, AR197: 5, |
| | | | | AR287: 5, AR243: 5, AR297: 5, AR286: 4, AR263: 4, AR199: 4, AR200: 4, AR231: 4, AR203: 4, AR291: 4, AR214: 4, AR242: 4, AR285: 4, AR230: 4, AR033: 4, |
| | | | | AR189: 4, AR213: 4, AR188: 4, AR195: 4, AR288: 4, AR246: 4, AR295: 4, AR224: 4, AR252: 3, AR104: 3, AR250: 3, AR272: 3, AR218: 3, AR219: 3, AR190: 3, |
| | | | | AR308: 3, AR222: 3, AR171: 3, AR260: 3, AR207: 3, AR168: 3, AR205: 3, AR283: 3, AR232: 3, AR039: 3, AR311: 2, AR172: 2, AR256: 2, AR221: 2, AR225: 2, |
| | | | | AR217: 2, AR169: 1, AR210: 1, AR211: 1, AR254: 1, H0590: 2, S0282: 1, H0486: 1, H0421: 1 and H0594: 1. |
| 112 | HFXKJ03 | 505207 | 122 | AR161: 7, AR162: 7, AR163: 7, AR243: 6, AR250: 5, AR176: 5, AR165: 5, AR225: 5, AR193: 5, AR164: 5, AR233: 5, AR271: 4, AR246: 4, AR182: 4, AR166: 4, |
| | | | | AR053: 4, AR228: 4, AR309: 4, AR181: 4, AR216: 4, AR266: 4, AR269: 4, AR172: 4, AR235: 4, AR183: 4, AR264: 4, AR237: 4, AR170: 4, AR275: 4, AR236: 4, |
| | | | | AR297: 4, AR239: 4, AR291: 4, AR261: 4, AR257: 3, AR255: 3, AR293: 3, AR177: 3, AR267: 3, AR201: 3, AR171: 3, AR231: 3, AR212: 3, AR174: 3, AR274: 3, |
| | | | | AR296: 3, AR179: 3, AR288: 3, AR229: 3, AR247: 3, AR285: 3, AR205: 3, AR270: 3, AR294: 3, AR175: 3, AR287: 3, AR290: 3, AR263: 3, AR221: 3, AR196: 3, |
| | | | | AR191: 3, AR312: 3, AR240: 3, AR238: 3, AR223: 3, AR217: 3, AR262: 3, AR300: 3, AR207: 3, AR277: 3, AR268: 3, AR173: 3, AR230: 3, AR272: 3, AR234: 3, |
| | | | | AR286: 3, AR192: 3, AR295: 2, AR096: 2, AR289: 2, AR061: 2, AR311: 2, AR200: 2, AR213: 2, AR204: 2, AR190: 2, AR214: 2, AR168: 2, AR232: 2, AR188: 2, |
| | | | | AR224: 2, AR226: 2, AR313: 2, AR227: 2, AR033: 2, AR169: 2, AR308: 2, AR060: 2, AR198: 2, AR089: 2, AR178: 2, AR203: 2, AR282: 2, AR185: 2, AR195: 2, |
| | | | | AR222: 2, AR316: 2, AR055: 2, AR199: 2, AR180: 2, AR299: 2, AR189: 1, AR258: 1, AR210: 1, AR215: 1, AR260: 1, AR211: 1, AR252: 1, AR256: 1, AR283: 1, |
| | | | | S0282: 1, H0619: 1 and H0581: 1. |
| 113 | HFXKT05 | 658690 | 123 | AR207: 65, AR197: 54, AR193: 47, AR192: 45, AR201: 42, AR033: 40, AR299: 40, AR055: 39, AR242: 38, AR235: 38, AR177: 38, AR233: 37, AR198: 35, |
| | | | | AR185: 33, AR060: 33, AR195: 32, AR174: 31, AR203: 31, AR191: 31, AR204: 31, AR061: 30, AR104: 30, AR181: 30, AR243: 29, AR179: 29, AR257: 28, |
| | | | | AR165: 28, AR196: 28, AR176: 28, AR190: 28, AR089: 27, AR175: 27, AR213: 27, AR291: 27, AR164: 27, AR228: 27, AR288: 27, AR287: 26, AR275: 26, |
| | | | | AR161: 26, AR166: 26, AR238: 26, AR236: 26, AR163: 26, AR199: 25, AR178: 25, AR245: 24, AR162: 24, AR267: 24, AR226: 23, AR039: 23, AR246: 23, |
| | | | | AR261: 23, AR205: 23, AR173: 23, AR286: 22, AR250: 22, AR240: 22, AR296: 22, AR316: 22, AR247: 21, AR293: 21, AR232: 21, AR231: 21, AR188: 21, |
| | | | | AR294: 21, AR053: 20, AR255: 20, AR289: 20, AR282: 20, AR189: 20, AR212: 20, AR300: 20, AR230: 20, AR295: 19, AR239: 19, AR270: 19, AR258: 19, |
| | | | | AR234: 19, AR308: 19, AR269: 18, AR180: 18, AR253: 18, AR285: 17, AR227: 17, AR297: 17, AR254: 17, AR272: 17, AR237: 17, AR200: 16, AR182: 16, |
| | | | | AR271: 16, AR262: 16, AR277: 16, AR312: 15, AR229: 15, AR260: 15, AR263: 15, AR274: 14, AR268: 13, AR266: 13, AR309: 13, AR096: 13, AR290: 13, |
| | | | | AR264: 12, AR183: 12, AR252: 11, AR313: 10, AR311: 10, AR256: 9, AR225: 9, AR283: 9, AR211: 7, AR172: 7, AR210: 7, AR223: 7, AR224: 7, AR171: 6, |
| | | | | AR217: 6, AR221: 6, AR216: 5, AR219: 5, AR170: 5, AR215: 5, AR222: 4, AR214: 4, AR168: 3, AR218: 3, AR169: 3, L2804: 16, L2400: 15, L0748: 8, L3019: 5, |
| | | | | L3316: 3, L2138: 3, H0553: 2, L3140: 2, L3904: 2, S0378: 2, L0777: 2, L0758: 2, H0657: 1, S0282: 1, H0402: 1, L0005: 1, H0333: 1, T0114: 1, S0280: 1, H0618: 1, |
| | | | | H0253: 1, H0581: 1, H0052: 1, H0050: 1, H0620: 1, S0388: 1, H0354: 1, H0135: 1, S0344: 1, L0763: 1, L0638: 1, L0761: 1, L0764: 1, L0363: 1, L0766: 1, L0651: 1, |
| | | | | L0805: 1, L0655: 1, L0659: 1, L0666: 1, L2261: 1, H0701: 1, L0749: 1, L0756: 1, L0779: 1, L0752: 1, L0599: 1, H0542: 1, H0423: 1, H0422: 1 and H0506: 1. |
| 114 | HGBHI35 | 570262 | 124 | AR089: 24, AR226: 21, AR299: 20, AR164: 20, AR165: 20, AR060: 19, AR166: 17, AR185: 16, AR201: 16, AR163: 15, AR161: 15, AR162: 15, AR232: 15, |
| | | | | AR096: 14, AR188: 14, AR237: 14, AR039: 14, AR227: 14, AR233: 13, AR238: 13, AR275: 12, AR193: 12, AR191: 12, AR055: 12, AR173: 11, AR246: 11, |
| | | | | AR183: 11, AR240: 11, AR228: 11, AR196: 11, AR316: 11, AR313: 11, AR189: 10, AR239: 10, AR061: 10, AR175: 10, AR258: 10, AR199: 10, AR176: 10, |
| | | | | AR180: 10, AR197: 9, AR190: 9, AR174: 9, AR283: 9, AR270: 9, AR266: 9, AR245: 9, AR203: 9, AR231: 9, AR195: 9, AR300: 8, AR257: 8, AR269: 8, AR169: 8, |
| | | | | AR178: 8, AR242: 8, AR182: 8, AR277: 8, AR234: 8, AR192: 8, AR236: 8, AR235: 8, AR297: 8, AR291: 8, AR198: 8, AR181: 8, AR282: 8, AR295: 8, AR264: 8, |
| | | | | AR218: 8, AR274: 7, AR294: 7, AR217: 7, AR177: 7, AR285: 7, AR247: 7, AR271: 7, AR263: 7, AR288: 7, AR104: 7, AR219: 7, AR229: 7, AR261: 7, AR215: 7, |
| | | | | AR216: 6, AR287: 6, AR286: 6, AR255: 6, AR179: 6, AR268: 6, AR243: 6, AR262: 6, AR205: 6, AR289: 6, AR293: 6, AR223: 6, AR267: 5, AR200: 5, AR312: 5, |
| | | | | AR254: 5, AR290: 5, AR260: 5, AR308: 5, AR311: 5, AR309: 5, AR204: 5, AR230: 5, AR296: 4, AR213: 4, AR225: 4, AR170: 4, AR272: 4, AR252: 4, AR256: 4, |
| | | | | AR214: 4, AR222: 3, AR207: 3, AR053: 3, AR211: 3, AR172: 3, AR210: 3, AR033: 2, AR212: 2, AR224: 2, AR171: 2, AR168: 2, L0748: 9, L0766: 6, L0665: 6, |
| | | | | L0751: 6, H0550: 5, S0358: 4, L0774: 4, L0758: 4, L0581: 4, H0135: 3, L0662: 3, L0775: 3, L0776: 3, L0743: 3, L0747: 3, L0749: 3, L0777: 3, L0600: 3, H0295: 2, |
| | | | | H0722: 2, H0052: 2, H0014: 2, H0510: 2, L0640: 2, L0659: 2, L0526: 2, L0809: 2, H0696: 2, L0753: 2, S0134: 1, S0212: 1, S0376: 1, S0408: 1, H0742: 1, H0730: 1, |
| | | | | H0747: 1, H0549: 1, H0331: 1, H0486: 1, H0575: 1, S0049: 1, H0085: 1, H0204: 1, H0057: 1, S0051: 1, H0266: 1, H0188: 1, H0687: 1, H0169: 1, H0090: 1, |
| | | | | H0591: 1, T0067: 1, H0488: 1, H0714: 1, S0438: 1, L0374: 1, L0648: 1, L0376: 1, L0807: 1, L5622: 1, L0790: 1, L0791: 1, L0666: 1, H0701: 1, H0547: 1, S0126: 1, |
| | | | | H0660: 1, H0672: 1, H0539: 1, H0436: 1, L0439: 1, L0746: 1, L0750: 1, L0779: 1, L0752: 1, L0759: 1 and S0436: 1. |
| 115 | HGBIB74 | 837220 | 125 | AR214: 16, AR216: 13, AR217: 11, AR215: 9, AR161: 9, AR162: 9, AR163: 9, AR176: 8, AR250: 8, AR165: 8, AR178: 7, AR164: 7, AR170: 7, AR196: 7, |
| | | | | AR166: 7, AR181: 7, AR228: 6, AR272: 6, AR197: 6, AR269: 6, AR309: 5, AR264: 5, AR089: 5, AR282: 5, AR175: 5, AR182: 5, AR248: 5, AR177: 5, AR270: 5, |
| | | | | AR229: 5, AR223: 5, AR060: 5, AR268: 5, AR239: 5, AR195: 5, AR173: 5, AR183: 5, AR238: 4, AR245: 4, AR211: 4, AR172: 4, AR180: 4, AR174: 4, AR168: 4, |
| | | | | AR201: 4, AR190: 4, AR210: 4, AR104: 4, AR265: 4, AR222: 4, AR247: 4, AR231: 4, AR275: 4, AR291: 4, AR179: 4, AR207: 4, AR203: 4, AR284: 4, AR308: 4, |
| | | | | AR267: 4, AR061: 4, AR237: 4, AR233: 4, AR169: 4, AR189: 4, AR266: 4, AR312: 4, AR230: 4, AR200: 4, AR316: 4, AR185: 4, AR218: 4, AR299: 4, AR191: 4, |
| | | | | AR225: 4, AR226: 3, AR240: 3, AR290: 3, AR212: 3, AR096: 3, AR188: 3, AR241: 3, AR271: 3, AR236: 3, AR205: 3, AR202: 3, AR311: 3, AR254: 3, AR274: 3, |
| | | | | AR193: 3, AR055: 3, AR232: 3, AR227: 3, AR199: 3, AR255: 3, AR251: 3, AR053: 3, AR252: 3, AR033: 3, AR052: 3, AR313: 3, AR192: 3, AR263: 3, AR295: 3, |
| | | | | AR287: 3, AR298: 3, AR243: 3, AR234: 3, AR213: 3, AR310: 3, AR289: 3, AR219: 3, AR224: 3, AR285: 3, AR286: 3, AR300: 3, AR293: 3, AR221: 2, AR246: 2, |
| | | | | AR235: 2, AR261: 2, AR260: 2, AR258: 2, AR171: 2, AR292: 2, AR296: 2, AR294: 2, AR257: 2, AR039: 2, AR198: 2, AR253: 2, AR288: 2, AR297: 2, AR277: 2, |
| | | | | AR283: 2, AR204: 2, AR256: 2, AR262: 2, AR242: 1, AR186: 1, AR194: 1, H0253: 7, H0618: 6, H0556: 2, S0356: 2, H0373: 2, H0522: 2, L0758: 2, L0603: 2, |
| | | | | S0001: 1, S0278: 1, H0586: 1, H0050: 1, H0014: 1, H0644: 1, S0036: 1, H0038: 1, H0494: 1, H0625: 1, S0294: 1, L0769: 1, H0435: 1 and H0521: 1. |
| | HGBIB74 | 838602 | 404 | |
| | HGBIB74 | 899864 | 405 | |
| 116 | HGLAF75 | 566838 | 126 | AR196: 8, AR191: 7, AR269: 7, AR215: 7, AR180: 6, AR188: 6, AR270: 6, AR223: 6, AR173: 6, AR198: 5, AR176: 5, AR178: 5, AR268: 5, AR055: 5, AR165: 5, |
| | | | | AR175: 5, AR181: 5, AR266: 5, AR161: 5, AR162: 5, AR264: 5, AR183: 5, AR060: 5, AR174: 5, AR164: 5, AR291: 5, AR163: 5, AR172: 5, AR182: 5, AR189: 5, |
| | | | | AR201: 5, AR166: 5, AR261: 5, AR089: 5, AR313: 5, AR193: 5, AR177: 4, AR246: 4, AR255: 4, AR216: 4, AR285: 4, AR179: 4, AR257: 4, AR217: 4, AR170: 4, |
| | | | | AR221: 4, AR290: 4, AR299: 4, AR252: 4, AR200: 4, AR267: 4, AR262: 4, AR235: 4, AR185: 4, AR240: 4, AR238: 4, AR233: 4, AR295: 4, AR316: 4, AR168: 4, |
| | | | | AR190: 4, AR218: 4, AR271: 4, AR236: 4, AR296: 4, AR096: 4, AR287: 4, AR199: 4, AR293: 4, AR272: 4, AR242: 4, AR297: 4, AR243: 4, AR294: 4, AR195: 4, |
| | | | | AR300: 4, AR169: 3, AR224: 3, AR253: 3, AR282: 3, AR203: 3, AR239: 3, AR033: 3, AR288: 3, AR309: 3, AR171: 3, AR222: 3, AR211: 3, AR312: 3, AR275: 3, |
| | | | | AR231: 3, AR232: 3, AR192: 3, AR247: 3, AR260: 3, AR228: 3, AR104: 3, AR283: 3, AR229: 3, AR210: 3, AR225: 3, AR039: 3, AR258: 3, AR205: 3, AR234: 3, |
| | | | | AR286: 3, AR289: 3, AR308: 3, AR230: 3, AR263: 3, AR219: 3, AR237: 3, AR214: 3, AR277: 2, AR204: 2, AR227: 2, AR274: 2, AR256: 2, AR226: 2, AR061: 2, |
| | | | | AR245: 2, AR212: 2, AR213: 2, AR311: 1, H0351: 10, L0439: 4, L0766: 3, L3255: 2, L2562: 2, L0775: 2, L0666: 2, L0779: 2, L0780: 2, L0755: 2, L0731: 2, |
| | | | | H0772: 1, L3388: 1, H0333: 1, H0486: 1, H0015: 1, H0687: 1, S0422: 1, L0761: 1, L0776: 1, L0659: 1, L0663: 1, H0682: 1, S0152: 1, L0745: 1, L0752: 1 and |
| | | | | S0026: 1. |
| 117 | HGLAL82 | 520261 | 127 | AR221: 4, AR231: 4, AR192: 3, AR264: 3, AR266: 3, AR170: 3, AR252: 3, AR162: 3, AR180: 3, AR197: 2, AR270: 2, AR171: 2, AR225: 2, AR250: 2, AR161: 2, |
| | | | | AR163: 2, AR255: 2, AR277: 2, AR204: 2, AR183: 1, AR282: 1, AR257: 1, AR216: 1, AR214: 1, AR236: 1, AR271: 1, AR223: 1, AR165: 1, AR190: 1, AR309: 1, |
| | | | | AR289: 1, AR261: 1, AR288: 1, AR164: 1, AR217: 1, AR179: 1, AR195: 1, AR203: 1, AR269: 1, AR233: 1, AR239: 1, AR201: 1, AR061: 1, AR205: 1, AR181: 1, |
| | | | | AR193: 1, AR089: 1, AR294: 1, AR039: 1, L0667: 2, S0114: 1, H0351: 1, H0318: 1, H0615: 1 and L0764: 1. |
| 118 | HHEMA59 | 823100 | 128 | AR226: 23, AR238: 16, AR227: 15, AR237: 11, AR173: 9, AR313: 8, AR161: 8, AR162: 7, AR239: 7, AR165: 7, AR164: 7, AR163: 7, AR166: 7, AR089: 7, |
| | | | | AR175: 6, AR178: 6, AR180: 5, AR183: 5, AR247: 5, AR169: 5, AR240: 4, AR196: 4, AR300: 4, AR269: 4, AR270: 4, AR204: 4, AR312: 4, AR215: 4, AR268: 4, |
| | | | | AR282: 4, AR182: 4, AR179: 4, AR271: 4, AR275: 4, AR096: 4, AR242: 4, AR191: 4, AR177: 4, AR185: 4, AR198: 4, AR264: 4, AR258: 4, AR174: 3, AR181: 3, |
| | | | | AR253: 3, AR189: 3, AR316: 3, AR061: 3, AR060: 3, AR267: 3, AR263: 3, AR218: 3, AR104: 3, AR172: 3, AR260: 3, AR212: 3, AR257: 3, AR219: 3, AR229: 3, |
| | | | | AR233: 3, AR299: 3, AR216: 3, AR039: 3, AR203: 3, AR053: 3, AR224: 2, AR188: 2, AR176: 2, AR243: 2, AR171: 2, AR266: 2, AR214: 2, AR033: 2, AR308: 2, |
| | | | | AR289: 2, AR293: 2, AR232: 2, AR193: 2, AR234: 2, AR277: 2, AR168: 2, AR205: 2, AR195: 2, AR256: 2, AR311: 2, AR201: 2, AR283: 2, AR055: 1, AR213: 1, |
| | | | | AR272: 1, AR222: 1, AR200: 1, AR296: 1, AR291: 1, AR288: 1, AR217: 1, AR199: 1, AR192: 1, AR211: 1, AR255: 1, AR190: 1, AR262: 1, AR286: 1, L0771: 5, |
| | | | | L0766: 4, L0748: 4, L0754: 4, H0551: 3, S0003: 2, H0328: 2, H0615: 2, S0422: 2, H0144: 2, L0438: 2, S0013: 2, L0747: 2, L0756: 2, L0759: 2, H0170: 1, S6024: 1, |
| | | | | H0656: 1, S0110: 1, H0662: 1, H0176: 1, S0356: 1, S0360: 1, L0717: 1, S6016: 1, S0222: 1, H0438: 1, H0156: 1, H0575: 1, H0036: 1, H0318: 1, H0581: 1, H0020: 1, |
| | | | | H0031: 1, S0036: 1, S0294: 1, S0002: 1, L0770: 1, L0638: 1, L0662: 1, L0774: 1, L0652: 1, L0655: 1, L0606: 1, L0659: 1, L0663: 1, S0216: 1, H0648: 1, H0651: 1, |
| | | | | H0539: 1, S0152: 1, H0522: 1, L0777: 1, L0731: 1, S0031: 1, L0581: 1, S0192: 1, S0194: 1, H0543: 1 and H0423: 1. |
| 119 | HHENV10 | 562772 | 129 | AR242: 3, AR235: 3, AR183: 3, AR309: 3, AR282: 3, AR243: 2, AR171: 2, AR283: 1, AR055: 1, AR257: 1, AR168: 1, AR213: 1, AR164: 1, AR230: 1, AR264: 1, |
| | | | | AR287: 1, H0543: 2, H0497: 1 and H0625: 1. |
| 120 | HHEPM33 | 877639 | 130 | AR263: 38, AR207: 37, AR311: 31, AR264: 30, AR212: 29, AR195: 27, AR309: 27, AR308: 26, AR165: 26, AR164: 25, AR053: 24, AR166: 24, AR213: 24, |
| | | | | AR161: 23, AR162: 23, AR192: 23, AR198: 22, AR163: 22, AR245: 22, AR246: 22, AR312: 21, AR089: 21, AR271: 21, AR205: 21, AR223: 20, AR277: 20, |
| | | | | AR214: 19, AR193: 19, AR197: 19, AR224: 19, AR274: 18, AR169: 18, AR282: 18, AR222: 18, AR252: 18, AR242: 17, AR217: 17, AR283: 17, AR240: 16, |
| | | | | AR039: 16, AR216: 16, AR275: 15, AR215: 15, AR235: 15, AR172: 15, AR104: 15, AR201: 15, AR168: 15, AR171: 14, AR060: 14, AR096: 14, AR170: 14, |
| | | | | AR225: 14, AR261: 14, AR313: 14, AR243: 14, AR033: 14, AR253: 14, AR055: 13, AR316: 13, AR272: 13, AR204: 12, AR250: 12, AR221: 12, AR185: 12, |
| | | | | AR219: 12, AR295: 12, AR254: 11, AR288: 11, AR291: 11, AR247: 11, AR297: 11, AR299: 11, AR287: 10, AR286: 10, AR236: 10, AR285: 10, AR300: 9, |
| | | | | AR177: 9, AR210: 9, AR196: 9, AR296: 8, AR176: 8, AR218: 8, AR211: 8, AR226: 7, AR293: 7, AR289: 7, AR266: 7, AR258: 7, AR181: 7, AR199: 7, AR174: 7, |
| | | | | AR262: 7, AR191: 7, AR061: 6, AR257: 6, AR238: 6, AR173: 6, AR178: 6, AR200: 6, AR175: 6, AR232: 6, AR270: 6, AR188: 6, AR294: 6, AR269: 6, AR255: 6, |
| | | | | AR256: 6, AR182: 6, AR260: 5, AR183: 5, AR239: 5, AR229: 5, AR227: 5, AR189: 5, AR290: 5, AR231: 5, AR234: 5, AR179: 5, AR180: 5, AR237: 4, AR190: 4, |
| | | | | AR203: 4, AR268: 4, AR233: 4, AR267: 4, AR230: 4, AR228: 3, L0777: 9, H0617: 5, S0418: 3, H0618: 3, H0556: 2, H0489: 2, H0253: 2, H0560: 2, L0770: 2, |
| | | | | L0803: 2, L0789: 2, S0328: 2, H0436: 2, H0444: 2, H0543: 2, H0265: 1, H0685: 1, S0218: 1, H0657: 1, S0116: 1, H0484: 1, S0420: 1, S0356: 1, S0354: 1, S0358: 1, |
| | | | | S0444: 1, S0360: 1, H0637: 1, L0103: 1, S0007: 1, H0441: 1, H0559: 1, H0486: 1, H0599: 1, H0042: 1, H0575: 1, H0052: 1, H0597: 1, H0545: 1, H0373: 1, |
| | | | | H0594: 1, H0266: 1, T0023: 1, H0553: 1, H0063: 1, H0551: 1, H0100: 1, H0646: 1, H0529: 1, L0371: 1, L0662: 1, L0766: 1, L0804: 1, L0774: 1, L0378: 1, L0806: 1, |
| | | | | L0805: 1, L0655: 1, L0659: 1, L0809: 1, L0663: 1, H0698: 1, H0547: 1, S3012: 1, S0028: 1, L0731: 1, S0436: 1, S0192: 1, H0542: 1 and H0352: 1. |
| 121 | HHFBY53 | 821330 | 131 | AR191: 5, AR201: 4, AR215: 4, AR060: 3, AR188: 3, AR289: 2, AR255: 2, AR233: 2, AR274: 2, AR180: 2, AR193: 2, AR283: 2, AR033: 1, AR296: 1, AR240: 1, |
| | | | | AR172: 1, AR089: 1, AR277: 1, AR312: 1, AR224: 1, AR225: 1, AR199: 1, AR210: 1, AR282: 1, S0360: 3, H0670: 3, H0556: 2, H0292: 2, H0686: 1, H0685: 1, |
| | | | | S0134: 1, S0116: 1, H0662: 1, H0640: 1, S0300: 1, H0586: 1, H0642: 1, L0622: 1, L0586: 1, H0253: 1, H0050: 1, H0057: 1, T0006: 1, L0653: 1, L0657: 1, L0659: 1, |
| | | | | L0787: 1, L0666: 1, L0663: 1, H0547: 1, H0659: 1, H0648: 1, H0436: 1, L0748: 1, L0362: 1, L0361: 1, H0653: 1, H0542: 1, H0423: 1 and H0422: 1. |
| 122 | HHFGR93 | 865581 | 132 | AR184: 4, AR282: 3, AR217: 3, AR183: 3, AR266: 3, AR242: 2, AR269: 2, AR257: 2, AR225: 2, AR270: 2, AR274: 2, AR182: 2, AR291: 2, AR250: 1, AR235: 1, |
| | | | | AR175: 1, AR162: 1, AR168: 1, AR290: 1, AR286: 1, AR204: 1, AR214: 1, AR177: 1, AR275: 1, AR194: 1, AR224: 1, AR261: 1, AR296: 1, AR293: 1, AR298: 1, |
| | | | | AR186: 1, AR284: 1, L0754: 41, L0747: 8, H0553: 5, L0755: 5, L0659: 4, H0124: 3, H0265: 2, H0556: 2, H0586: 2, H0427: 2, H0575: 2, H0050: 2, L0471: 2, |
| | | | | H0616: 2, H0056: 2, L0764: 2, L0662: 2, L0794: 2, L0748: 2, L0751: 2, L0749: 2, L0750: 2, H0305: 1, S0358: 1, S0045: 1, S0046: 1, H0619: 1, H0441: 1, H0485: 1, |
| | | | | S0280: 1, H0599: 1, H0042: 1, H0046: 1, H0569: 1, H0024: 1, H0051: 1, H0328: 1, H0030: 1, H0644: 1, H0361: 1, H0040: 1, H0413: 1, S0038: 1, L0770: 1, |
| | | | | L0769: 1, L0800: 1, L0644: 1, L0363: 1, L0803: 1, L0804: 1, L0775: 1, L0806: 1, L0783: 1, L0666: 1, L0665: 1, H0144: 1, S0146: 1, H0555: 1, S3012: 1, L0779: 1, |
| | | | | L0731: 1, L0605: 1, L0599: 1, L0603: 1, H0543: 1, H0422: 1 and H0506: 1. |
| | HHFGR93 | 691402 | 406 | |
| 123 | HHGCG53 | 340818 | 133 | AR192: 3, AR169: 3, AR264: 3, AR162: 3, AR309: 3, AR245: 3, AR250: 3, AR161: 3, AR163: 3, AR171: 3, AR193: 2, AR266: 2, AR176: 2, AR289: 2, AR283: 2, |
| | | | | AR267: 2, AR197: 2, AR274: 2, AR242: 2, AR239: 2, AR295: 2, AR238: 2, AR225: 2, AR182: 2, AR263: 2, AR261: 2, AR183: 2, AR172: 1, AR269: 1, AR168: 1, |
| | | | | AR231: 1, AR216: 1, AR237: 1, AR164: 1, AR228: 1, AR096: 1, AR215: 1, AR233: 1, AR252: 1, AR166: 1, AR232: 1, AR060: 1, AR277: 1, AR089: 1, AR290: 1, |
| | | | | AR299: 1, AR240: 1, AR229: 1, AR282: 1, AR296: 1, H0333: 1 |
| 124 | HHGCM76 | 662329 | 134 | AR245: 8, AR175: 7, AR183: 6, AR176: 6, AR196: 6, AR191: 6, AR174: 6, AR060: 5, AR254: 5, AR263: 5, AR039: 5, AR173: 5, AR177: 5, AR309: 5, AR261: 5, |
| | | | | AR232: 4, AR161: 4, AR162: 4, AR096: 4, AR163: 4, AR182: 4, AR264: 4, AR089: 4, AR165: 4, AR198: 4, AR270: 4, AR275: 4, AR268: 4, AR178: 4, AR189: 4, |
| | | | | AR164: 4, AR166: 3, AR286: 3, AR242: 3, AR193: 3, AR243: 3, AR216: 3, AR171: 3, AR283: 3, AR266: 3, AR215: 3, AR272: 3, AR211: 3, AR188: 3, AR313: 3, |
| | | | | AR180: 3, AR207: 3, AR269: 3, AR200: 3, AR247: 3, AR316: 3, AR289: 3, AR290: 3, AR229: 3, AR294: 3, AR297: 3, AR195: 3, AR267: 3, AR061: 3, AR240: 3, |
| | | | | AR295: 3, AR197: 3, AR238: 3, AR257: 3, AR190: 3, AR055: 3, AR228: 2, AR181: 2, AR053: 2, AR033: 2, AR288: 2, AR226: 2, AR282: 2, AR201: 2, AR239: 2, |
| | | | | AR287: 2, AR231: 2, AR262: 2, AR223: 2, AR104: 2, AR285: 2, AR308: 2, AR218: 2, AR179: 2, AR293: 2, AR221: 2, AR311: 2, AR271: 2, AR225: 2, AR246: 2, |
| | | | | AR185: 2, AR237: 2, AR299: 2, AR312: 2, AR274: 2, AR233: 2, AR199: 2, AR227: 2, AR219: 2, AR300: 2, AR213: 2, AR256: 2, AR296: 2, AR234: 2, AR291: 2, |
| | | | | AR172: 2, AR205: 2, AR252: 2, AR230: 1, AR203: 1, AR255: 1, AR214: 1, AR258: 1, AR224: 1, AR260: 1, AR277: 1, AR210: 1, L0803: 6, H0052: 4, H0036: 3, |
| | | | | L0665: 3, H0574: 2, H0559: 2, L0763: 2, L0809: 2, L0791: 2, L0666: 2, L0663: 2, L0748: 2, L0745: 2, L0747: 2, H0624: 1, H0265: 1, H0657: 1, H0381: 1, S0045: 1, |
| | | | | H0550: 1, H0614: 1, H0587: 1, H0333: 1, T0040: 1, L0022: 1, H0575: 1, H0564: 1, H0068: 1, H0509: 1, L0769: 1, L0637: 1, L0643: 1, L0764: 1, L0662: 1, L0804: 1, |
| | | | | L0806: 1, L0527: 1, L0783: 1, L0382: 1, L0664: 1, H0144: 1, H0690: 1, H0682: 1, H0670: 1, H0694: 1, H0626: 1, L0743: 1, L0777: 1, L0780: 1, L0755: 1, H0343: 1, |
| | | | | and S0011: 1. |
| | HHGCM76 | 383547 | 407 | |
| 125 | HHGDF16 | 579890 | 135 | AR309: 11, AR264: 11, AR176: 10, AR228: 9, AR161: 9, AR266: 9, AR162: 9, AR180: 9, AR229: 9, AR268: 8, AR163: 8, AR178: 8, AR269: 8, AR164: 8, |
| | | | | AR165: 8, AR166: 8, AR182: 8, AR313: 8, AR253: 8, AR263: 7, AR238: 7, AR181: 7, AR198: 7, AR216: 7, AR217: 7, AR197: 7, AR270: 7, AR233: 7, AR239: 7, |
| | | | | AR255: 6, AR312: 6, AR183: 6, AR174: 6, AR296: 6, AR177: 6, AR272: 6, AR267: 6, AR188: 6, AR274: 6, AR236: 6, AR235: 6, AR055: 6, AR089: 6, AR096: 6, |
| | | | | AR060: 6, AR275: 6, AR261: 6, AR191: 6, AR223: 6, AR224: 5, AR201: 5, AR226: 5, AR300: 5, AR196: 5, AR053: 5, AR189: 5, AR245: 5, AR316: 5, AR179: 5, |
| | | | | AR231: 5, AR271: 5, AR212: 5, AR240: 5, AR237: 5, AR199: 5, AR299: 5, AR246: 5, AR257: 5, AR104: 5, AR225: 5, AR289: 5, AR061: 5, AR293: 4, AR230: 4, |
| | | | | AR195: 4, AR247: 4, AR252: 4, AR218: 4, AR190: 4, AR219: 4, AR221: 4, AR291: 4, AR288: 4, AR193: 4, AR232: 4, AR175: 4, AR308: 4, AR285: 4, AR168: 4, |
| | | | | AR227: 4, AR311: 4, AR234: 4, AR243: 4, AR290: 4, AR169: 4, AR185: 4, AR254: 4, AR033: 3, AR262: 3, AR200: 3, AR282: 3, AR203: 3, AR295: 3, AR283: 3, |
| | | | | AR222: 3, AR214: 3, AR294: 3, AR171: 3, AR213: 3, AR170: 3, AR287: 3, AR297: 3, AR039: 3, AR173: 3, AR250: 3, AR286: 3, AR205: 3, AR207: 2, AR204: 2, |
| | | | | AR172: 2, AR277: 2, AR258: 2, AR211: 1, AR260: L0803: 6, S0422: 4, L0766: 4, L0777: 4, L0362: 4, L0794: 3, L0805: 3, L0439: 3, L0779: 3, L0731: 3, |
| | | | | H0543: 3, S0444: 2, H0486: 2, L0471: 2, L0637: 2, L0666: 2, L0665: 2, H0539: 2, H0521: 2, L0758: 2, L0592: 2, L0581: 2, H0170: 1, L3644: 1, H0685: 1, H0583: 1, |
| | | | | H0650: 1, H0656: 1, S0212: 1, S0442: 1, S0376: 1, H0580: 1, H0733: 1, H0339: 1, H0749: 1, S0300: 1, L0717: 1, H0333: 1, H0331: 1, H0013: 1, H0156: 1, L0021: 1, |
| | | | | H0581: 1, S0362: 1, S0003: 1, L0483: 1, H0038: 1, H0634: 1, H0616: 1, T0067: 1, H0412: 1, H0641: 1, S0142: 1, L0598: 1, L3905: 1, L0646: 1, L0662: 1, L15564: 1, |
| | | | | L0774: 1, L0651: 1, L0776: 1, L0607: 1, L0527: 1, L0657: 1, L0659: 1, L5622: 1, L0788: 1, L0791: 1, L0793: 1, L0663: 1, H0144: 1, S0310: 1, L0438: 1, L3828: 1, |
| | | | | H0435: 1, H0658: 1, H0670: 1, S0328: 1, S0330: 1, L0745: 1, L0747: 1, L0749: 1, L0756: 1, L0759: 1, S0260: 1, H0445: 1, S0436: 1, L0599: 1 and S0194: 1. |
| 126 | HHPDX20 | 610321 | 136 | AR201: 4, AR195: 2, AR224: 2, AR263: 2, AR311: 2, AR168: 2, AR247: 2, AR223: 2, AR055: 2, AR216: 2, AR261: 2, AR172: 2, AR214: 2, AR060: 2, AR296: 2, |
| | | | | AR231: 2, AR282: 2, AR033: 1, AR217: 1, AR238: 1, AR225: 1, AR210: 1, S0222: 1 and H0051: 1. |
| 127 | HHPEN62 | 695134 | 137 | AR196: 528, AR310: 360, AR218: 326, AR052: 317, AR219: 315, AR194: 272, AR211: 264, AR206: 250, AR202: 237, AR205: 232, AR265: 232, AR244: 224, |
| | | | | AR053: 218, AR184: 208, AR246: 207, AR241: 203, AR284: 198, AR309: 192, AR186: 185, AR263: 184, AR273: 173, AR280: 170, AR298: 170, AR243: 168, |
| | | | | AR247: 157, AR315: 155, AR312: 152, AR311: 150, AR314: 145, AR281: 140, AR039: 139, AR182: 139, AR275: 137, AR271: 130, AR313: 130, AR185: 128, |
| | | | | AR177: 121, AR213: 121, AR204: 120, AR104: 118, AR300: 116, AR274: 115, AR274: 115, AR210: 115, AR245: 112, AR229: 112, AR240: 112, AR299: 112, AR055: 112, |
| | | | | AR308: 112, AR061: 112, AR207: 109, AR096: 108, AR290: 107, AR237: 107, AR316: 106, AR248: 104, AR264: 100, AR193: 99, AR198: 99, AR292: 99, |
| | | | | AR268: 96, AR033: 95, AR249: 94, AR231: 94, AR197: 94, AR188: 94, AR259: 93, AR233: 92, AR222: 92, AR179: 90, AR251: 88, AR192: 88, AR227: 87, |
| | | | | AR267: 86, AR269: 84, AR232: 84, AR195: 82, AR060: 81, AR200: 80, AR270: 80, AR223: 80, AR272: 79, AR089: 77, AR172: 76, AR175: 76, AR253: 74, |
| | | | | AR250: 74, AR234: 74, AR282: 72, AR212: 70, AR242: 69, AR201: 67, AR199: 66, AR176: 66, AR180: 64, AR294: 64, AR178: 64, AR189: 62, AR181: 60, |
| | | | | AR289: 59, AR283: 59, AR291: 58, AR169: 57, AR285: 56, AR171: 55, AR226: 55, AR236: 54, AR183: 53, AR256: 52, AR266: 50, AR174: 50, AR295: 49, |
| | | | | AR293: 49, AR191: 47, AR173: 47, AR286: 47, AR190: 47, AR254: 46, AR221: 46, AR225: 46, AR238: 45, AR170: 43, AR258: 42, AR163: 41, AR224: 39, |
| | | | | AR235: 39, AR277: 39, AR168: 38, AR296: 37, AR203: 37, AR166: 34, AR161: 34, AR262: 34, AR164: 32, AR162: 32, AR165: 31, AR255: 30, AR288: 28, |
| | | | | AR261: 25, AR260: 20, AR217: 20, AR230: 17, AR297: 15, AR252: 15, AR287: 15, AR214: 14, AR228: 13, AR239: 12, AR216: 12, AR215: 11, AR257: 11 |
| | | | | L0766: 7, L0731: 7, H0457: 6, H0051: 6, L0754: 6, L0803: 4, L0666: 4, H0140: 3, S0474: 3, H0052: 3, L0157: 3, L0662: 3, L0659: 3, L5622: 3, L0758: 3, H0657: 2, |
| | | | | S0140: 2, S0010: 2, H0628: 2, S0036: 2, H0100: 2, S0112: 2, L0532: 2, L0438: 2, H0547: 2, L0743: 2, S0242: 2, H0542: 2, H0422: 2, H0265: 1, H0656: 1, S0282: 1, |
| | | | | S0444: 1, S0360: 1, S0408: 1, H0735: 1, H0749: 1, L0463: 1, H0351: 1, H0261: 1, H0438: 1, H0586: 1, H0635: 1, H0599: 1, H0318: 1, H0581: 1, H0251: 1, |
| | | | | H0327: 1, H0545: 1, H0046: 1, L0471: 1, S0051: 1, H0375: 1, H0622: 1, T0006: 1, H0553: 1, H0598: 1, H0163: 1, H0040: 1, H0551: 1, L0564: 1, H0334: 1, |
| | | | | H0561: 1, S0440: 1, H0529: 1, L0800: 1, L0794: 1, L0651: 1, L0805: 1, L0655: 1, L0606: 1, L0527: 1, L0635: 1, L0382: 1, L0809: 1, L0792: 1, L0663: 1, S0216: 1, |
| | | | | H0144: 1, H0520: 1, H0519: 1, S0328: 1, S0380: 1, S0404: 1, H0436: 1, S0392: 1, S0028: 1, L0745: 1, L0779: 1, L0777: 1, L0752: 1, S0260: 1, L0480: 1, S0026: 1, |
| | | | | H0665: 1, S0192: 1, S0194: 1, H0423: 1, S0424: 1 and H0506: 1. |
| 128 | HHPGO40 | 1299927 | 138 | AR244: 5, AR202: 5, AR273: 5, AR194: 4, AR176: 4, AR253: 4, AR214: 4, AR206: 4, AR309: 3, AR235: 3, AR186: 3, AR251: 3, AR052: 3, AR222: 3, AR224: 3, |
| | | | | AR204: 3, AR282: 3, AR289: 3, AR248: 3, AR215: 3, AR284: 3, AR181: 3, AR269: 3, AR180: 2, AR312: 2, AR246: 2, AR277: 2, AR061: 2, AR182: 2, AR162: 2, |
| | | | | AR184: 2, AR163: 2, AR296: 2, AR198: 2, AR161: 2, AR223: 2, AR291: 2, AR298: 2, AR171: 2, AR267: 2, AR229: 2, AR055: 2, AR297: 2, AR225: 2, AR265: 2, |
| | | | | AR285: 2, AR193: 2, AR228: 2, AR270: 2, AR292: 2, AR183: 2, AR261: 2, AR033: 2, AR290: 2, AR268: 2, AR169: 2, AR310: 2, AR266: 2, AR271: 2, AR205: 2, |
| | | | | AR264: 2, AR286: 2, AR192: 2, AR247: 2, AR053: 2, AR240: 2, AR060: 2, AR287: 2, AR293: 2, AR257: 2, AR239: 2, AR213: 1, AR178: 1, AR294: 1, AR237: 1, |
| | | | | AR177: 1, AR275: 1, AR089: 1, AR288: 1, AR300: 1, AR175: 1, AR283: 1, AR238: 1, AR272: 1, AR274: 1, AR173: 1, AR231: 1, AR236: 1, AR233: 1, AR185: 1, |
| | | | | AR313: 1, AR104: 1, AR179: 1, AR259: 1, AR234: 1, AR295: 1, AR096: 1, AR299: 1, AR230: 1, AR243: 1, AR199: 1, H0521: 17, H0522: 12, S0114: 3, S0116: 3, |
| | | | | H0402: 2, H0634: 2, S0440: 2, H0547: 2, S0292: 2, L0756: 2, H0265: 1, H0556: 1, H0686: 1, S0134: 1, S0218: 1, L0785: 1, H0254: 1, H0638: 1, H0637: 1, H0747: 1, |
| | | | | H0370: 1, H0559: 1, H0490: 1, H0485: 1, H0635: 1, S0474: 1, H0581: 1, H0421: 1, H0597: 1, H0620: 1, H0051: 1, H0083: 1, H0252: 1, H0063: 1, H0059: 1, |
| | | | | H0625: 1, L0667: 1, L0768: 1, L0653: 1, L0659: 1, L0783: 1, L2260: 1, H0702: 1, H0701: 1, H0539: 1, H0518: 1, H0727: 1, L0366: 1, H0543: 1 and H0423: 1. |
| | HHPGO40 | 753270 | 408 | |
| | HHPGO40 | 560969 | 409 | |
| 129 | HHSDX28 | 553494 | 139 | AR161: 5, AR163: 5, AR162: 5, AR176: 4, AR269: 4, AR266: 4, AR173: 4, AR267: 4, AR165: 4, AR178: 4, AR183: 4, AR264: 4, AR164: 3, AR225: 3, AR228: 3, |
| | | | | AR166: 3, AR229: 3, AR180: 3, AR233: 3, AR182: 3, AR270: 3, AR240: 3, AR217: 3, AR230: 3, AR196: 3, AR257: 3, AR089: 3, AR242: 3, AR313: 3, AR262: 3, |
| | | | | AR247: 3, AR309: 3, AR239: 3, AR177: 3, AR300: 3, AR175: 3, AR226: 3, AR268: 3, AR181: 3, AR296: 3, AR293: 3, AR221: 3, AR236: 2, AR222: 2, AR255: 2, |
| | | | | AR179: 2, AR238: 2, AR289: 2, AR096: 2, AR231: 2, AR234: 2, AR199: 2, AR223: 2, AR237: 2, AR286: 2, AR227: 2, AR060: 2, AR203: 2, AR191: 2, AR288: 2, |
| | | | | AR316: 2, AR290: 2, AR275: 2, AR287: 2, AR061: 2, AR277: 2, AR294: 2, AR197: 2, AR261: 2, AR250: 2, AR174: 2, AR188: 2, AR189: 2, AR168: 2, AR282: 2, |
| | | | | AR272: 2, AR274: 2, AR258: 2, AR190: 2, AR291: 2, AR200: 2, AR295: 2, AR311: 2, AR299: 2, AR210: 1, AR055: 1, AR285: 1, AR212: 1, AR185: 1, AR193: 1, |
| | | | | AR104: 1, AR216: 1, AR219: 1, AR297: 1, AR253: 1, AR218: 1, AR260: 1, AR254: 1, S0051: 1 and H0445: 1. |
| 130 | HILCF66 | 636025 | 140 | AR277: 12, AR235: 3, AR224: 3, AR309: 3, AR245: 3, AR282: 2, AR171: 2, AR222: 2, AR271: 2, AR283: 2, AR225: 2, AR264: 2, AR163: 1, AR168: 1, AR162: 1, |
| | | | | AR257: 1, AR183: 1, AR221: 1, AR089: 1, AR161: 1, AR192: 1, L0794: 2, T0002: 1, H0685: 1, H0638: 1, L0586: 1, T0010: 1, L0055: 1, S0440: 1, L0662: 1, |
| | | | | H0519: 1, S0378: 1, S0406: 1, L0748: 1, L0750: 1, L0756: 1 and L0731: 1. |
| 131 | HJABB94 | 456466 | 141 | AR176: 9, AR225: 9, AR221: 8, AR295: 8, AR170: 8, AR264: 8, AR178: 8, AR288: 7, AR291: 7, AR180: 7, AR215: 7, AR175: 7, AR275: 7, AR297: 7, AR224: 7, |
| | | | | AR268: 7, AR293: 7, AR228: 7, AR269: 6, AR309: 6, AR270: 6, AR263: 6, AR285: 6, AR296: 6, AR267: 6, AR282: 6, AR162: 6, AR239: 6, AR173: 6, AR311: 6, |
| | | | | AR161: 5, AR231: 5, AR266: 5, AR181: 5, AR207: 5, AR182: 5, AR163: 5, AR183: 5, AR053: 5, AR238: 5, AR289: 5, AR217: 5, AR213: 5, AR229: 5, AR274: 5, |
| | | | | AR286: 5, AR177: 5, AR290: 5, AR237: 5, AR287: 5, AR033: 5, AR226: 5, AR294: 5, AR277: 5, AR196: 5, AR212: 4, AR179: 4, AR235: 4, AR216: 4, AR055: 4, |
| | | | | AR223: 4, AR233: 4, AR260: 4, AR316: 4, AR211: 4, AR283: 4, AR171: 4, AR312: 4, AR192: 4, AR256: 4, AR227: 4, AR261: 4, AR190: 4, AR230: 4, AR104: 4, |
| | | | | AR300: 4, AR240: 4, AR060: 4, AR174: 4, AR169: 3, AR198: 3, AR222: 3, AR218: 3, AR191: 3, AR199: 3, AR210: 3, AR189: 3, AR271: 3, AR195: 3, AR313: 3, |
| | | | | AR219: 3, AR039: 3, AR232: 3, AR188: 3, AR096: 3, AR089: 3, AR185: 3, AR200: 3, AR172: 3, AR166: 3, AR234: 3, AR168: 3, AR165: 3, AR164: 3, AR258: 3, |
| | | | | AR257: 3, AR299: 3, AR308: 2, AR201: 2, AR243: 2, AR193: 2, AR203: 2, AR061: 2, AR247: 2, AR255: 2, AR262: 2, AR272: 2, AR236: 2, AR242: 1, AR254: 1, |
| | | | | H0624: 1, S0360: 1, H0586: 1, L0021: 1, T0041: 1 and L0779: 1. |
| 132 | HJACG02 | 1307789 | 142 | AR207: 37, AR195: 33, AR283: 32, AR263: 32, AR264: 29, AR223: 28, AR214: 28, AR089: 28, AR277: 27, AR222: 27, AR309: 27, AR311: 27, AR212: 26, |
| | | | | AR169: 26, AR316: 25, AR224: 24, AR096: 24, AR055: 24, AR197: 23, AR213: 23, AR282: 22, AR104: 22, AR245: 22, AR171: 22, AR218: 22, AR162: 22, |
| | | | | AR192: 21, AR217: 21, AR161: 21, AR193: 21, AR163: 20, AR308: 20, AR165: 20, AR168: 20, AR216: 20, AR170: 20, AR164: 20, AR235: 19, AR172: 19, |
| | | | | AR053: 19, AR166: 19, AR060: 19, AR219: 19, AR242: 19, AR271: 19, AR299: 19, AR210: 19, AR039: 19, AR033: 19, AR240: 18, AR225: 18, AR313: 18, |
| | | | | AR312: 18, AR201: 18, AR221: 17, AR261: 17, AR198: 17, AR246: 17, AR288: 17, AR252: 17, AR295: 17, AR176: 16, AR177: 16, AR215: 15, AR297: 15, |
| | | | | AR253: 15, AR205: 15, AR270: 15, AR196: 15, AR185: 15, AR275: 15, AR286: 15, AR285: 14, AR260: 14, AR287: 14, AR233: 14, AR236: 14, AR183: 14, |
| | | | | AR227: 13, AR175: 13, AR211: 13, AR300: 13, AR250: 13, AR294: 13, AR181: 13, AR274: 13, AR272: 13, AR229: 13, AR174: 12, AR256: 12, AR182: 12, |
| | | | | AR234: 12, AR204: 12, AR269: 12, AR228: 12, AR293: 12, AR178: 12, AR226: 12, AR268: 11, AR266: 11, AR173: 11, AR262: 11, AR200: 11, AR243: 11, |
| | | | | AR199: 11, AR258: 11, AR231: 11, AR291: 11, AR180: 11, AR289: 11, AR247: 11, AR239: 10, AR257: 10, AR267: 10, AR255: 10, AR188: 10, AR254: 10, |
| | | | | AR203: 10, AR232: 10, AR238: 9, AR191: 9, AR189: 9, AR190: 9, AR061: 9, AR230: 9, AR296: 9, AR179: 9, AR290: 8, AR237: 7, S0442: 4, L0764: 4, S0408: 3, |
| | | | | H0306: 2, H0263: 2, H0596: 2, L0800: 2, L0755: 2, S0116: 1, S0358: 1, H0489: 1, H0597: 1, T0041: 1 and L0772: 1. |
| | HJACG02 | 509948 | 410 | |
| 133 | HJACG30 | 895505 | 143 | AR263: 8, AR165: 8, AR250: 8, AR162: 7, AR161: 7, AR205: 7, AR196: 7, AR166: 7, AR164: 7, AR215: 7, AR163: 7, AR192: 7, AR198: 7, AR235: 7, AR245: 6, |
| | | | | AR264: 6, AR216: 6, AR270: 6, AR207: 6, AR309: 6, AR246: 6, AR174: 5, AR223: 5, AR269: 5, AR168: 5, AR243: 5, AR224: 5, AR180: 5, AR311: 5, AR183: 5, |
| | | | | AR308: 5, AR254: 5, AR173: 5, AR177: 5, AR268: 5, AR242: 5, AR179: 5, AR312: 5, AR176: 5, AR175: 5, AR291: 5, AR221: 5, AR181: 5, AR285: 4, AR170: 4, |
| | | | | AR275: 4, AR295: 4, AR053: 4, AR271: 4, AR191: 4, AR288: 4, AR204: 4, AR316: 4, AR274: 4, AR199: 4, AR055: 4, AR266: 4, AR210: 4, AR236: 4, AR217: 4, |
| | | | | AR240: 4, AR188: 4, AR189: 4, AR257: 4, AR247: 4, AR213: 4, AR178: 4, AR039: 4, AR222: 4, AR225: 4, AR182: 4, AR297: 4, AR201: 4, AR212: 4, AR252: 4, |
| | | | | AR296: 4, AR261: 4, AR286: 3, AR253: 3, AR060: 3, AR294: 3, AR237: 3, AR282: 3, AR267: 3, AR262: 3, AR290: 3, AR172: 3, AR171: 3, AR287: 3, AR299: 3, |
| | | | | AR231: 3, AR289: 3, AR197: 3, AR193: 3, AR293: 3, AR255: 3, AR190: 3, AR200: 3, AR228: 3, AR033: 3, AR313: 3, AR211: 3, AR258: 3, AR300: 3, AR089: 3, |
| | | | | AR238: 3, AR185: 3, AR233: 3, AR229: 3, AR277: 3, AR226: 3, AR239: 3, AR230: 3, AR234: 2, AR214: 2, AR260: 2, AR096: 2, AR061: 2, AR195: 2, AR219: 2, |
| | | | | AR203: 2, AR256: 2, AR272: 2, AR232: 2, AR227: 2, AR218: 1, AR283: 1, AR104: 1, AR169: 1, H0069: 3, T0041: 2, H0436: 2, H0318: 1, L4747: 1, L0646: 1, |
| | | | | L0766: 1 and L0803: 1. |
| | HJACG30 | 821341 | 411 | |
| | HJACG30 | 774300 | 412 | |
| 134 | HJBCY35 | 719729 | 144 | AR215: 11, AR291: 11, AR225: 10, AR217: 9, AR216: 8, AR296: 8, AR214: 8, AR297: 8, AR266: 7, AR183: 7, AR257: 7, AR223: 7, AR170: 7, AR269: 7, |
| | | | | AR287: 7, AR221: 6, AR270: 6, AR171: 6, AR182: 6, AR286: 6, AR169: 6, AR172: 6, AR294: 6, AR176: 6, AR235: 6, AR163: 5, AR295: 5, AR161: 5, AR168: 5, |
| | | | | AR255: 5, AR162: 5, AR224: 5, AR285: 5, AR293: 5, AR268: 5, AR289: 5, AR288: 5, AR263: 5, AR264: 5, AR165: 4, AR173: 4, AR260: 4, AR262: 4, AR175: 4, |
| | | | | AR164: 4, AR179: 4, AR055: 4, AR104: 4, AR222: 4, AR166: 4, AR060: 4, AR181: 4, AR242: 4, AR313: 4, AR283: 4, AR258: 4, AR240: 4, AR311: 4, AR290: 3, |
| | | | | AR180: 3, AR282: 3, AR247: 3, AR231: 3, AR316: 3, AR267: 3, AR233: 3, AR228: 3, AR300: 3, AR236: 3, AR177: 3, AR096: 3, AR212: 3, AR256: 3, AR275: 3, |
| | | | | AR237: 3, AR185: 3, AR239: 3, AR299: 3, AR245: 3, AR229: 3, AR039: 3, AR238: 3, AR234: 3, AR191: 3, AR190: 2, AR199: 2, AR089: 2, AR178: 2, AR277: 2, |
| | | | | AR189: 2, AR174: 2, AR205: 2, AR309: 2, AR061: 2, AR274: 2, AR227: 2, AR261: 2, AR188: 2, AR218: 2, AR272: 2, AR219: 2, AR312: 2, AR196: 2, AR195: 2, |
| | | | | AR232: 2, AR200: 2, AR211: 2, AR230: 2, AR203: 1, AR210: 1, AR226: 1, AR033: 1, AR252: 1, H0618: 16, H10617: 13, H0253: 11, H0457: 6, L0766: 6, L0769: 5, |
| | | | | H0255: 4, H0559: 4, H0181: 4, L0748: 4, H0170: 3, S0051: 3, H0622: 3, L0770: 3, L0653: 3, L0743: 3, L0779: 3, H0341: 2, H0484: 2, S0049: 2, H0620: 2, H0424: 2, |
| | | | | H0135: 2, H0040: 2, H0059: 2, H0100: 2, T0042: 2, S0002: 2, L0758: 2, L0588: 2, H0171: 1, S0134: 1, H0650: 1, H0657: 1, H0656: 1, S0116: 1, L0534: 1, H0637: 1, |
| | | | | S6026: 1, S0300: 1, L0717: 1, H0549: 1, H0550: 1, S6014: 1, H0333: 1, L2504: 1, L2522: 1, H0427: 1, L0021: 1, H0599: 1, H0545: 1, H0150: 1, L0157: 1, S0050: 1, |
| | | | | H0355: 1, H0252: 1, L0483: 1, H0068: 1, S0036: 1, H0038: 1, H0087: 1, H0272: 1, H0623: 1, T0041: 1, L4747: 1, L3904: 1, L3905: 1, L0761: 1, L0645: 1, L0648: 1, |
| | | | | L0662: 1, L0768: 1, L0774: 1, L0776: 1, L0658: 1, L4669: 1, L0659: 1, L0382: 1, L0665: 1, L2257: 1, L2260: 1, H0547: 1, H0711: 1, H0670: 1, H0672: 1, S0350: 1, |
| | | | | H0696: 1, H0704: 1, L0744: 1, L0439: 1, L0749: 1, L0777: 1, L0780: 1, L0731: 1, L0757: 1, S0436: 1, S0276: 1 and H0543: 1. |
| 135 | HJMBI18 | 545492 | 145 | AR214: 33, AR222: 32, AR169: 27, AR235: 25, AR224: 25, AR223: 25, AR207: 24, AR168: 21, AR195: 21, AR213: 20, AR217: 20, AR170: 20, AR172: 20, |
| | | | | AR171: 19, AR212: 19, AR216: 19, AR263: 17, AR165: 17, AR225: 16, AR196: 16, AR164: 16, AR215: 16, AR221: 16, AR308: 15, AR089: 15, AR166: 15, |
| | | | | AR309: 15, AR311: 15, AR295: 15, AR242: 14, AR192: 14, AR245: 14, AR177: 13, AR261: 13, AR053: 13, AR312: 13, AR252: 12, AR197: 12, AR288: 12, |
| | | | | AR198: 12, AR161: 12, AR162: 12, AR210: 12, AR271: 11, AR264: 11, AR163: 11, AR253: 11, AR033: 11, AR316: 11, AR282: 11, AR236: 10, AR193: 10, |
| | | | | AR240: 10, AR277: 10, AR060: 10, AR211: 10, AR285: 10, AR181: 10, AR174: 10, AR299: 10, AR039: 9, AR185: 9, AR188: 9, AR199: 9, AR246: 9, AR297: 9, |
| | | | | AR205: 9, AR313: 9, AR096: 9, AR291: 9, AR229: 8, AR219: 8, AR201: 8, AR283: 8, AR272: 8, AR175: 8, AR218: 8, AR238: 8, AR055: 8, AR189: 8, AR296: 8, |
| | | | | AR250: 8, AR200: 7, AR254: 7, AR286: 7, AR300: 7, AR293: 7, AR247: 7, AR262: 7, AR227: 7, AR226: 7, AR287: 7, AR289: 7, AR239: 7, AR232: 7, AR231: 7, |
| | | | | AR243: 7, AR173: 7, AR191: 7, AR204: 6, AR258: 6, AR275: 6, AR104: 6, AR230: 6, AR257: 6, AR190: 6, AR180: 6, AR237: 6, AR178: 6, AR183: 6, AR234: 5, |
| | | | | AR270: 5, AR255: 5, AR274: 5, AR294: 5, AR260: 5, AR256: 5, AR203: 5, AR290: 5, AR061: 5, AR179: 5, AR269: 4, AR228: 4, AR266: 4, AR268: 4, AR176: 4, |
| | | | | AR233: 4, AR182: 4, AR267: 3, L0803: 3, L0805: 3, L0439: 3, H0341: 2, L0483: 2, L0663: 2, H0520: 2, S0380: 2, L0411: 1, S0418: 1, H0574: 1, H0427: 1, |
| | | | | H0545: 1, H0009: 1, S0051: 1, H0623: 1, L0770: 1, L0769: 1, L0764: 1, L0766: 1, L0776: 1, L0518: 1, L0783: 1, L0438: 1, H0651: 1, L0748: 1, L0740: 1, L0754: 1, |
| | | | | L0745: 1, L0756: 1, L0779: 1, L0758: 1, L0591: 1, L0592: 1, H0543: 1 and H0293: 1. |
| 136 | HJMBM38 | 545752 | 146 | AR169: 7, AR225: 6, AR207: 6, AR192: 5, AR165: 5, AR164: 5, AR183: 5, AR168: 4, AR214: 4, AR166: 4, AR253: 4, AR196: 4, AR223: 4, AR162: 4, AR161: 4, |
| | | | | AR163: 4, AR224: 4, AR222: 4, AR240: 4, AR261: 4, AR089: 4, AR216: 3, AR177: 3, AR309: 3, AR221: 3, AR291: 3, AR217: 3, AR205: 3, AR212: 3, AR178: 3, |
| | | | | AR289: 3, AR269: 3, AR096: 3, AR170: 3, AR283: 3, AR039: 3, AR264: 3, AR203: 3, AR282: 3, AR188: 3, AR171: 3, AR268: 3, AR235: 3, AR308: 3, AR296: 3, |
| | | | | AR295: 3, AR238: 3, AR313: 3, AR297: 3, AR181: 3, AR060: 3, AR270: 3, AR234: 2, AR263: 2, AR316: 2, AR255: 2, AR285: 2, AR211: 2, AR236: 2, AR200: 2, |
| | | | | AR288: 2, AR286: 2, AR189: 2, AR176: 2, AR193: 2, AR055: 2, AR175: 2, AR191: 2, AR277: 2, AR174: 2, AR293: 2, AR262: 2, AR172: 2, AR290: 2, AR231: 2, |
| | | | | AR230: 2, AR173: 2, AR201: 2, AR311: 2, AR247: 2, AR219: 2, AR312: 2, AR287: 2, AR227: 2, AR179: 2, AR104: 2, AR229: 2, AR274: 2, AR228: 2, AR257: 2, |
| | | | | AR232: 2, AR190: 2, AR258: 2, AR266: 2, AR033: 2, AR239: 2, AR272: 2, AR237: 2, AR204: 2, AR233: 2, AR053: 2, AR061: 2, AR185: 2, AR182: 1, AR213: 1, |
| | | | | AR299: 1, AR300: 1, AR252: 1, AR199: 1, AR267: 1, AR294: 1, AR218: 1, AR226: 1, H0424: 3, H0545: 2, L0809: 2, S0212: 1, H0255: 1, S0278: 1, H0587: 1, |
| | | | | H0559: 1, H0188: 1, H0087: 1, H0551: 1, H0529: 1, L0769: 1, L0761: 1, L0646: 1, L0764: 1, L0363: 1, L0794: 1, L0659: 1, L0783: 1, L0787: 1, L0665: 1, H0660: 1, |
| | | | | S0328: 1, H0521: 1, L0777: 1, S0192: 1 and H0422: 1. |
| 137 | HJPAD75 | 651337 | 147 | AR277: 7, AR215: 2, AR282: 2, AR246: 2, AR225: 2, AR290: 2, AR213: 2, AR172: 2, AR261: 1, AR266: 1, AR162: 1, AR165: 1, AR257: 1, AR230: 1, AR168: 1, |
| | | | | AR182: 1, AR166: 1, AR252: 1, AR196: 1, AR295: 1, AR270: 1, AR177: 1, AR285: 1, AR195: 1, AR291: 1, AR217: 1, AR161: 1, AR256: 1, H0556: 6, L0769: 4, |
| | | | | L0771: 4, H0265: 3, L0764: 3, H0083: 2, S0142: 2, L0794: 2, L0803: 2, L0789: 2, L0792: 2, L0438: 2, L0754: 2, L0747: 2, L0749: 2, L0757: 2, S0356: 1, S0444: 1, |
| | | | | S0360: 1, H0013: 1, S0010: 1, H0421: 1, H0263: 1, H0596: 1, L0157: 1, L0471: 1, H0553: 1, H0628: 1, H0090: 1, H0561: 1, S0372: 1, L2270: 1, S0422: 1, L0667: 1, |
| | | | | L0768: 1, L0776: 1, L0809: 1, H0658: 1, H0648: 1, S0330: 1, H0521: 1, H0134: 1, S0027: 1, L0748: 1, L0756: 1, L0755: 1, L0731: 1, S0434: 1, L0592: 1 and |
| | | | | H0542: 1. |
| 138 | HJPCP42 | 1040297 | 148 | L0749: 5, L0776: 4, L0748: 3, L0764: 2, L0439: 2, H0341: 1, H0083: 1, H0266: 1, H0022: 1, L0773: 1, L0662: 1, L0626: 1, L0363: 1, L0655: 1, L0789: 1, |
| | | | | H0134: 1, L0747: 1, L0777: 1, L0755: 1, H0445: 1 and H0677: 1. |
| | HJPCP42 | 844091 | 413 | |
| | HJPCP42 | 852573 | 414 | |
| | HJPCP42 | 824612 | 415 | |
| 139 | HKABI84 | 565078 | 149 | AR271: 11, AR242: 9, AR216: 8, AR253: 7, AR225: 7, AR214: 7, AR205: 7, AR195: 6, AR165: 6, AR207: 6, AR296: 6, AR164: 6, AR198: 6, AR089: 6, AR254: 6, |
| | | | | AR224: 6, AR250: 6, AR166: 6, AR217: 6, AR309: 6, AR212: 6, AR245: 6, AR192: 6, AR263: 6, AR215: 6, AR221: 6, AR312: 5, AR162: 5, AR196: 5, AR308: 5, |
| | | | | AR161: 5, AR096: 5, AR299: 5, AR163: 5, AR246: 5, AR213: 5, AR313: 5, AR243: 5, AR053: 5, AR193: 5, AR222: 5, AR264: 5, AR223: 5, AR311: 5, AR060: 5, |
| | | | | AR204: 4, AR197: 4, AR188: 4, AR274: 4, AR261: 4, AR175: 4, AR201: 4, AR172: 4, AR285: 4, AR189: 4, AR316: 4, AR039: 4, AR169: 4, AR171: 4, AR173: 4, |
| | | | | AR300: 4, AR268: 4, AR282: 4, AR176: 4, AR199: 4, AR104: 4, AR033: 4, AR168: 4, AR235: 4, AR190: 4, AR200: 4, AR240: 4, AR295: 3, AR288: 3, AR257: 3, |
| | | | | AR277: 3, AR252: 3, AR291: 3, AR297: 3, AR203: 3, AR238: 3, AR286: 3, AR177: 3, AR294: 3, AR174: 3, AR289: 3, AR191: 3, AR183: 3, AR210: 3, AR283: 3, |
| | | | | AR185: 3, AR180: 3, AR255: 3, AR178: 3, AR247: 3, AR290: 3, AR262: 3, AR269: 3, AR230: 3, AR293: 3, AR270: 3, AR287: 2, AR226: 2, AR181: 2, AR258: 2, |
| | | | | AR275: 2, AR219: 2, AR267: 2, AR218: 2, AR239: 2, AR179: 2, AR232: 2, AR234: 2, AR272: 2, AR237: 2, AR229: 2, AR231: 2, AR061: 2, AR233: 2, AR236: 2, |
| | | | | AR228: 2, AR182: 2, AR227: 1, AR256: 1, AR266: 1, AR260: 1, AR170: 1, L0794: 9, L0777: 6, L0809: 4, L0779: 4, L0731: 4, L0766: 3, L0666: 3, L0663: 3, |
| | | | | L3825: 3, H0547: 3, S0444: 2, L3459: 2, L3480: 2, L3817: 2, L0483: 2, L0770: 2, L0521: 2, L0768: 2, L0803: 2, L0775: 2, L0805: 2, L0661: 2, L0665: 2, H0144: 2, |
| | | | | L3827: 2, L3828: 2, H0658: 2, H0670: 2, S0406: 2, L0439: 2, L0754: 2, L0749: 2, L0756: 2, H0543: 2, H0556: 1, H0657: 1, H0662: 1, S0360: 1, L3262: 1, L2799: 1, |
| | | | | H0411: 1, S0278: 1, H0443: 1, H0550: 1, L3816: 1, T0039: 1, L3499: 1, L2647: 1, H0013: 1, H0427: 1, H0575: 1, S0474: 1, H0052: 1, H0591: 1, H0038: 1, |
| | | | | H0040: 1, H0616: 1, H0264: 1, H0494: 1, S0440: 1, H0649: 1, L0598: 1, H0529: 1, L0369: 1, L0640: 1, L3904: 1, L0662: 1, L0804: 1, L0375: 1, L0378: 1, L0806: 1, |
| | | | | L0653: 1, L0776: 1, L0807: 1, L0788: 1, L0664: 1, L2259: 1, L2654: 1, L3812: 1, S0126: 1, H0689: 1, H0435: 1, H0539: 1, H0696: 1, S0176: 1, H0555: 1, H0785: 1, |
| | | | | L0747: 1, L0755: 1, L0757: 1, L0758: 1, L0608: 1, L0362: 1, S0026: 1, S0424: 1 and L3808: 1. |
| 140 | HKABZ65 | 862030 | 150 | AR313: 41, AR242: 32, AR039: 28, AR165: 25, AR163: 25, AR164: 24, AR161: 24, AR162: 24, AR166: 24, AR089: 24, AR096: 23, AR173: 22, AR196: 20, |
| | | | | AR193: 20, AR299: 20, AR300: 20, AR258: 20, AR180: 19, AR175: 19, AR178: 18, AR240: 18, AR229: 18, AR234: 18, AR185: 17, AR247: 17, AR218: 17, |
| | | | | AR262: 17, AR179: 16, AR285: 16, AR183: 16, AR269: 16, AR293: 15, AR174: 15, AR199: 15, AR182: 15, AR181: 15, AR238: 14, AR191: 14, AR296: 14, |
| | | | | AR236: 14, AR257: 14, AR316: 14, AR270: 14, AR226: 13, AR219: 13, AR297: 13, AR277: 13, AR264: 12, AR200: 12, AR312: 12, AR195: 12, AR213: 12, |
| | | | | AR192: 12, AR203: 12, AR268: 12, AR212: 12, AR294: 12, AR286: 11, AR060: 1, AR230: 11, AR177: 11, AR189: 11, AR233: 11, AR260: 10, AR231: 10, |
| | | | | AR198: 10, AR290: 10, AR188: 10, AR204: 10, AR053: 9, AR287: 9, AR288: 9, AR255: 9, AR295: 9, AR033: 9, AR261: 9, AR282: 9, AR104: 9, AR245: 9, |
| | | | | AR243: 9, AR235: 9, AR228: 8, AR308: 8, AR263: 8, AR275: 8, AR291: 8, AR201: 8, AR274: 8, AR237: 7, AR197: 7, AR239: 7, AR224: 7, AR311: 7, AR176: 7, |
| | | | | AR267: 7, AR172: 7, AR256: 7, AR223: 7, AR205: 7, AR171: 6, AR227: 6, AR168: 6, AR214: 6, AR207: 6, AR169: 6, AR225: 6, AR252: 6, AR250: 6, AR271: 6, |
| | | | | AR215: 6, AR170: 6, AR211: 6, AR221: 6, AR309: 5, AR283: 5, AR266: 5, AR254: 5, AR222: 5, AR190: 5, AR210: 5, AR216: 5, AR217: 5, AR232: 5, AR055: 5, |
| | | | | AR289: 4, AR253: 4, AR246: 4, AR272: 3, AR061: 2, H0494: 1 |
| | HKABZ65 | 665424 | 416 | |
| 141 | HKACB56 | 554616 | 151 | AR223: 8, AR235: 8, AR263: 7, AR222: 7, AR170: 7, AR221: 7, AR207: 7, AR216: 7, AR169: 7, AR224: 7, AR168: 7, AR171: 7, AR311: 7, AR198: 7, AR309: 7, |
| | | | | AR214: 6, AR225: 6, AR053: 6, AR197: 6, AR212: 6, AR215: 6, AR089: 6, AR264: 6, AR245: 6, AR205: 5, AR217: 5, AR165: 5, AR163: 5, AR161: 5, AR162: 5, |
| | | | | AR164: 5, AR166: 5, AR275: 5, AR308: 5, AR213: 5, AR172: 5, AR312: 4, AR277: 4, AR274: 4, AR246: 4, AR196: 4, AR060: 4, AR271: 4, AR282: 4, AR195: 4, |
| | | | | AR295: 4, AR261: 4, AR269: 4, AR230: 4, AR316: 4, AR181: 4, AR288: 4, AR176: 4, AR055: 3, AR240: 3, AR204: 3, AR297: 3, AR283: 3, AR313: 3, AR177: 3, |
| | | | | AR210: 3, AR285: 3, AR242: 3, AR296: 3, AR039: 3, AR199: 3, AR096: 3, AR173: 3, AR272: 3, AR236: 3, AR200: 3, AR252: 3, AR254: 3, AR238: 3, AR175: 3, |
| | | | | AR291: 3, AR193: 3, AR299: 3, AR247: 3, AR191: 3, AR033: 3, AR188: 3, AR286: 3, AR289: 3, AR300: 3, AR185: 3, AR201: 3, AR174: 3, AR270: 3, AR262: 3, |
| | | | | AR237: 2, AR293: 2, AR104: 2, AR232: 2, AR287: 2, AR294: 2, AR178: 2, AR189: 2, AR229: 2, AR234: 2, AR226: 2, AR239: 2, AR061: 2, AR182: 2, AR290: 2, |
| | | | | AR203: 2, AR227: 2, AR255: 2, AR183: 2, AR190: 2, AR233: 2, AR211: 2, AR231: 2, AR257: 2, AR267: 2, AR228: 2, AR243: 2, AR258: 2, AR256: 2, AR179: 1, |
| | | | | AR218: 1, AR268: 1, AR219: 1, AR192: 1, AR180: 1, AR253: 1, H0494: 4, L0045: 1 and L0806: 1. |
| 142 | HKACD58 | 1352202 | 152 | AR261: 30, AR235: 29, AR283: 29, AR297: 20, AR291: 17, AR285: 16, AR286: 15, AR295: 13, AR183: 13, AR269: 13, AR287: 12, AR258: 11, AR268: 11, |
| | | | | AR266: 11, AR289: 10, AR161: 10, AR162: 10, AR288: 10, AR236: 10, AR260: 10, AR165: 10, AR163: 10, AR166: 9, AR207: 9, AR164: 9, AR270: 9, AR282: 9, |
| | | | | AR277: 8, AR223: 8, AR214: 8, AR243: 8, AR215: 8, AR224: 8, AR296: 8, AR096: 8, AR039: 8, AR172: 8, AR221: 8, AR192: 8, AR316: 8, AR182: 8, AR104: 8, |
| | | | | AR089: 8, AR222: 8, AR293: 7, AR173: 7, AR176: 7, AR255: 7, AR169: 7, AR171: 7, AR311: 7, AR257: 7, AR313: 7, AR225: 7, AR245: 7, AR254: 7, AR180: 7, |
| | | | | AR211: 7, AR262: 7, AR195: 7, AR290: 6, AR240: 6, AR175: 6, AR179: 6, AR217: 6, AR247: 6, AR256: 6, AR055: 6, AR309: 6, AR168: 6, AR300: 6, AR294: 6, |
| | | | | AR197: 6, AR219: 6, AR263: 6, AR299: 6, AR242: 6, AR216: 6, AR060: 5, AR238: 5, AR267: 5, AR185: 5, AR250: 5, AR264: 5, AR181: 5, AR234: 5, AR053: 5, |
| | | | | AR199: 5, AR275: 5, AR178: 5, AR308: 5, AR033: 5, AR274: 5, AR193: 5, AR177: 5, AR218: 5, AR174: 4, AR213: 4, AR170: 4, AR246: 4, AR212: 4, AR312: 4, |
| | | | | AR198: 4, AR253: 4, AR205: 4, AR271: 4, AR189: 4, AR191: 4, AR210: 4, AR201: 4, AR239: 3, AR237: 3, AR252: 3, AR196: 3, AR190: 3, AR233: 3, AR231: 3, |
| | | | | AR227: 3, AR061: 3, AR226: 3, AR230: 3, AR272: 3, AR229: 3, AR204: 3, AR232: 3, AR203: 3, AR200: 3, AR188: 2, AR228: 2, S0360: 12, S0436: 3, S0194: 3, |
| | | | | S0114: 2, H0483: 2, S0408: 2, L3504: 2, H0575: 2, H0581: 2, S0344: 2, L2262: 2, H0519: 2, L0754: 2, H0139: 1, L2884: 1, H0657: 1, H0656: 1, S0420: 1, S0356: 1, |
| | | | | S0410: 1, L2333: 1, H0151: 1, S0046: 1, L3127: 1, H0549: 1, H0613: 1, H0427: 1, H0546: 1, H0081: 1, H0355: 1, S0312: 1, H0032: 1, H0383: 1, H0551: 1, |
| | | | | H0264: 1, T0042: 1, H0494: 1, H0386: 1, H0509: 1, H0649: 1, S0210: 1, L0646: 1, L0804: 1, L0805: 1, L0809: 1, L5622: 1, L2651: 1, L2265: 1, L2702: 1, H0682: 1, |
| | | | | H0435: 1, H0670: 1, H0672: 1, H0521: 1, H0696: 1, H0134: 1, S0206: 1, L0741: 1, L0743: 1, L0744: 1, L0756: 1, L0596: 1, L0581: 1, L0593: 1, L0595: 1, L0366: 1, |
| | | | | S0242: 1, S0196: 1, H0423: 1 and H0506: 1. |
| | HKACD58 | 552465 | 417 | |
| 143 | HKACH44 | 545015 | 153 | AR207: 29, AR263: 28, AR311: 26, AR264: 24, AR235: 24, AR223: 22, AR196: 22, AR212: 22, AR261: 21, AR195: 21, AR309: 21, AR192: 21, AR222: 20, |
| | | | | AR198: 19, AR245: 19, AR224: 19, AR214: 18, AR213: 18, AR246: 18, AR169: 18, AR217: 18, AR295: 17, AR168: 17, AR236: 17, AR201: 17, AR172: 17, |
| | | | | AR053: 17, AR171: 17, AR197: 17, AR221: 17, AR163: 17, AR170: 16, AR177: 16, AR216: 16, AR193: 16, AR288: 16, AR165: 16, AR215: 15, AR089: 15, |
| | | | | AR312: 15, AR285: 15, AR055: 15, AR164: 15, AR240: 15, AR286: 15, AR282: 15, AR161: 14, AR225: 14, AR272: 14, AR162: 14, AR297: 14, AR308: 14, |
| | | | | AR033: 13, AR271: 13, AR039: 13, AR199: 12, AR252: 12, AR316: 12, AR218: 12, AR275: 12, AR210: 12, AR174: 12, AR211: 12, AR250: 12, AR060: 11, |
| | | | | AR291: 11, AR277: 11, AR205: 11, AR287: 11, AR283: 11, AR188: 11, AR258: 11, AR293: 11, AR242: 11, AR189: 10, AR299: 10, AR183: 10, AR200: 10, |
| | | | | AR262: 10, AR289: 10, AR234: 10, AR176: 10, AR191: 9, AR253: 9, AR181: 9, AR096: 9, AR175: 9, AR185: 9, AR296: 9, AR219: 9, AR204: 9, AR190: 9, |
| | | | | AR247: 9, AR268: 9, AR300: 9, AR243: 9, AR232: 9, AR166: 9, AR239: 9, AR313: 8, AR173: 8, AR274: 8, AR226: 8, AR203: 8, AR269: 8, AR233: 8, AR104: 8, |
| | | | | AR255: 8, AR227: 8, AR229: 8, AR260: 8, AR294: 8, AR178: 7, AR257: 7, AR180: 7, AR231: 7, AR238: 7, AR230: 7, AR254: 7, AR179: 7, AR290: 6, AR270: 6, |
| | | | | AR266: 6, AR061: 6, AR256: 6, AR228: 6, AR182: 6, AR237: 6, AR267: 5, L0769: 3, L0809: 2, L0750: 2, H0663: 1, S0356: 1, S0360: 1, S6026: 1, S0278: 1, |
| | | | | H0559: 1, H0486: 1, H0618: 1, H0024: 1, H0606: 1, H0494: 1, H0560: 1, H0538: 1, L0646: 1, L0800: 1, L0764: 1, L0662: 1, L0794: 1, L0766: 1, L0803: 1, L0656: 1, |
| | | | | L0664: 1, H0547: 1, H0672: 1, S0328: 1, L0757: 1 and H0543: 1. |
| 144 | HKAEV06 | 1352263 | 154 | AR272: 35, AR165: 34, AR163: 33, AR164: 33, AR161: 32, AR162: 32, AR245: 32, AR166: 32, AR274: 28, AR212: 28, AR205: 26, AR311: 23, AR242: 22, |
| | | | | AR264: 21, AR308: 20, AR214: 20, AR174: 19, AR197: 19, AR216: 16, AR223: 15, AR222: 15, AR313: 15, AR213: 14, AR171: 14, AR312: 14, AR195: 14, |
| | | | | AR225: 14, AR247: 13, AR201: 13, AR254: 12, AR309: 12, AR053: 12, AR275: 12, AR263: 12, AR168: 12, AR246: 11, AR217: 11, AR224: 11, AR215: 11, |
| | | | | AR252: 11, AR089: 11, AR170: 10, AR243: 10, AR172: 10, AR192: 10, AR221: 9, AR241: 9, AR189: 9, AR185: 9, AR250: 9, AR240: 8, AR039: 8, AR199: 8, |
| | | | | AR204: 8, AR179: 7, AR198: 7, AR169: 7, AR096: 7, AR193: 7, AR177: 7, AR188: 7, AR297: 6, AR253: 6, AR236: 6, AR249: 6, AR300: 6, AR262: 6, AR271: 6, |
| | | | | AR277: 6, AR183: 6, AR104: 6, AR261: 6, AR299: 6, AR234: 5, AR239: 5, AR194: 5, AR173: 5, AR181: 5, AR265: 5, AR257: 5, AR316: 5, AR288: 5, AR207: 5, |
| | | | | AR190: 5, AR060: 5, AR282: 5, AR180: 5, AR233: 5, AR230: 4, AR231: 4, AR293: 4, AR176: 4, AR178: 4, AR290: 4, AR287: 4, AR191: 4, AR196: 4, AR291: 4, |
| | | | | AR238: 4, AR255: 4, AR296: 4, AR235: 4, AR273: 4, AR289: 3, AR270: 3, AR266: 3, AR052: 3, AR203: 3, AR229: 3, AR200: 3, AR206: 3, AR228: 3, AR294: 3, |
| | | | | AR283: 3, AR295: 3, AR033: 3, AR175: 2, AR269: 2, AR268: 2, AR248: 2, AR210: 2, AR237: 2, AR182: 2, AR285: 2, AR258: 2, AR286: 2, AR186: 2, AR267: 2, |
| | | | | AR061: 2, AR232: 2, AR226: 2, AR244: 2, AR260: 2, AR219: 1, AR055: 1, AR227: 1, AR211: 1, AR310: 1, AR281: 1, AR218: 1, AR256: 1, L0438: 2, L0758: 2, |
| | | | | S0442: 1, S0354: 1, S0444: 1, H0741: 1, L0021: 1, T0082: 1, H0046: 1, H0494: 1, S0440: 1, L3815: 1, L0800: 1, L0662: 1, L5574: 1, L0803: 1, L0776: 1, L0659: 1, |
| | | | | L2655: 1, L2653: 1, S0374: 1, H0547: 1, H0672: 1, S0330: 1, H0521: 1, H0696: 1, L0439: 1, L0752: 1, L0594: 1 and H0543: 1. |
| | HKAEV06 | 638238 | 418 | |
| 145 | HKAFT66 | 946512 | 155 | AR214: 32, AR195: 28, AR222: 28, AR169: 27, AR223: 26, AR224: 25, AR168: 23, AR172: 23, AR235: 22, AR217: 21, AR311: 20, AR216: 20, AR207: 19, |
| | | | | AR221: 19, AR171: 18, AR263: 18, AR225: 17, AR264: 16, AR215: 15, AR281: 15, AR196: 14, AR170: 14, AR212: 14, AR261: 13, AR252: 13, AR163: 13, |
| | | | | AR288: 12, AR265: 12, AR161: 12, AR162: 12, AR242: 12, AR309: 12, AR211: 11, AR165: 11, AR166: 11, AR236: 11, AR164: 11, AR199: 11, AR308: 11, |
| | | | | AR315: 11, AR210: 10, AR254: 10, AR193: 10, AR213: 10, AR174: 10, AR245: 9, AR191: 9, AR297: 9, AR053: 9, AR188: 9, AR197: 9, AR181: 9, AR280: 8, |
| | | | | AR173: 8, AR200: 8, AR180: 8, AR240: 8, AR310: 8, AR189: 8, AR287: 8, AR239: 8, AR272: 7, AR251: 7, AR295: 7, AR262: 7, AR177: 7, AR314: 7, AR312: 7, |
| | | | | AR190: 7, AR230: 7, AR033: 7, AR271: 7, AR282: 6, AR229: 6, AR283: 6, AR257: 6, AR192: 6, AR198: 6, AR275: 6, AR205: 6, AR201: 6, AR203: 6, AR313: 6, |
| | | | | AR249: 6, AR274: 6, AR300: 6, AR260: 6, AR089: 5, AR277: 5, AR238: 5, AR176: 5, AR299: 5, AR246: 5, AR285: 5, AR178: 5, AR218: 5, AR316: 5, AR286: 5, |
| | | | | AR258: 5, AR247: 4, AR291: 4, AR255: 4, AR248: 4, AR060: 4, AR052: 4, AR231: 4, AR270: 4, AR226: 4, AR289: 4, AR228: 4, AR253: 4, AR096: 4, AR175: 4, |
| | | | | AR185: 4, AR234: 4, AR269: 4, AR055: 4, AR227: 4, AR183: 3, AR232: 3, AR039: 3, AR219: 3, AR296: 3, AR179: 3, AR237: 3, AR256: 3, AR104: 3, AR290: 3, |
| | | | | AR233: 3, AR204: 3, AR293: 3, AR250: 3, AR268: 3, AR243: 2, AR266: 2, AR267: 2, AR061: 2, AR294: 2, AR182: 2, AR202: 2, AR273: 1, AR186: 1, S0474: 5, |
| | | | | S0422: 3, H0580: 2, S0444: 1, H0494: 1 and H0543: 1. |
| | HKAFT66 | 889258 | 419 | |
| | HKAFT66 | 904790 | 420 | |
| 146 | HKB1E57 | 876571 | 156 | AR253: 4, AR225: 3, AR171: 3, AR205: 3, AR192: 3, AR169: 3, AR245: 2, AR282: 2, AR193: 2, AR274: 2, AR039: 2, AR291: 2, AR212: 2, AR163: 2, AR162: 2, |
| | | | | AR266: 2, AR161: 2, AR269: 2, AR264: 1, AR271: 1, AR178: 1, AR316: 1, AR275: 1, AR261: 1, AR168: 1, AR270: 1, AR183: 1, AR297: 1, AR283: 1, L0747: 4, |
| | | | | L0766: 3, L0776: 3, L0665: 3, H0328: 2, L0763: 2, L0769: 2, L0772: 2, L0764: 2, L0666: 2, L0745: 2, L0750: 2, L0777: 2, L0759: 2, L0608: 2, H0556: 1, S0116: 1, |
| | | | | H0384: 1, S0360: 1, S0408: 1, H0637: 1, H0722: 1, H0735: 1, H0619: 1, H0492: 1, H0156: 1, H0421: 1, H0620: 1, S0051: 1, H0083: 1, H0510: 1, H0266: 1, |
| | | | | H0031: 1, H0634: 1, H0560: 1, S0440: 1, H0132: 1, H0695: 1, L0800: 1, L0521: 1, L0662: 1, L0774: 1, L0806: 1, L0807: 1, H0144: 1, H0690: 1, H0658: 1, |
| | | | | H0521: 1, H0522: 1, L0439: 1, L0746: 1, L0752: 1, L0480: 1, L0589: 1, L0592: 1, H0543: 1 and H0422: 1. |
| | HKB1E57 | 654871 | 421 | |
| 147 | HKFBC53 | 1352286 | 157 | AR249: 155, AR248: 131, AR251: 111, AR265: 54, AR253: 42, AR096: 23, AR263: 23, AR244: 18, AR290: 13, AR268: 13, AR246: 12, AR184: 11, AR177: 11, |
| | | | | AR194: 9, AR267: 8, AR229: 8, AR270: 8, AR247: 7, AR240: 7, AR269: 7, AR183: 6, AR202: 5, AR175: 5, AR234: 5, AR241: 5, AR316: 5, AR206: 5, AR313: 5, |
| | | | | AR055: 4, AR299: 4, AR033: 4, AR238: 3, AR292: 3, AR061: 3, AR182: 3, AR171: 3, AR273: 3, AR224: 3, AR274: 3, AR198: 3, AR275: 3, AR216: 3, AR266: 3, |
| | | | | AR195: 3, AR284: 3, AR168: 3, AR237: 2, AR215: 2, AR282: 2, AR285: 2, AR242: 2, AR310: 2, AR250: 2, AR300: 2, AR298: 2, AR186: 2, AR039: 2, AR231: 2, |
| | | | | AR291: 2, AR223: 2, AR243: 2, AR289: 2, AR179: 2, AR204: 2, AR104: 2, AR205: 2, AR257: 2, AR271: 2, AR053: 2, AR226: 2, AR277: 2, AR217: 2, AR232: 2, |
| | | | | AR192: 2, AR296: 2, AR185: 2, AR264: 1, AR295: 1, AR089: 1, AR261: 1, AR213: 1, AR259: 1, AR166: 1, AR286: 1, AR308: 1, AR233: 1, AR201: 1, L0794: 11, |
| | | | | H0521: 11, S0002: 8, L0805: 8, L0803: 7, S0278: 6, S0144: 6, L0774: 4, L0777: 4, S0380: 3, H0265: 2, H0556: 2, H0255: 2, H0638: 2, L0761: 2, L0776: 2, L0809: 2, |
| | | | | S0406: 2, S0298: 1, S0420: 1, S0356: 1, H0431: 1, H0618: 1, H0546: 1, H0100: 1, H0429: 1, H0494: 1, H0509: 1, S0142: 1, S0426: 1, L0640: 1, L0763: 1, L0770: 1, |
| | | | | L3904: 1, L0800: 1, L0804: 1, L0806: 1, L0807: 1, L4669: 1, L5622: 1, L5623: 1, L0791: 1, L0792: 1, L0666: 1, L2261: 1, S0374: 1, H0690: 1, H0522: 1, S0390: 1, |
| | | | | L0740: 1, L0751: 1, L0756: 1, L0779: 1 and L0731: 1. |
| | HKFBC53 | 701893 | 422 | |
| | HKFBC53 | 513190 | 423 | |
| | HKFBC53 | 383426 | 424 | |
| 148 | HKGDL36 | 877489 | 158 | AR274: 28, AR214: 24, AR168: 23, AR216: 22, AR205: 21, AR245: 20, AR224: 20, AR272: 18, AR222: 17, AR199: 17, AR171: 17, AR223: 17, AR252: 17, |
| | | | | AR215: 16, AR213: 16, AR312: 16, AR195: 15, AR217: 15, AR170: 15, AR247: 15, AR166: 14, AR313: 14, AR212: 14, AR246: 14, AR225: 14, AR165: 13, |
| | | | | AR164: 13, AR172: 13, AR311: 13, AR308: 13, AR169: 12, AR162: 12, AR161: 12, AR053: 12, AR221: 12, AR163: 12, AR210: 11, AR179: 11, AR188: 11, |
| | | | | AR197: 10, AR275: 10, AR263: 10, AR250: 10, AR189: 9, AR174: 9, AR264: 9, AR242: 9, AR236: 9, AR089: 9, AR201: 9, AR254: 9, AR096: 9, AR193: 8, |
| | | | | AR299: 8, AR271: 8, AR243: 8, AR175: 8, AR309: 8, AR253: 8, AR039: 8, AR291: 8, AR180: 8, AR296: 8, AR190: 7, AR185: 7, AR288: 7, AR173: 7, AR240: 7, |
| | | | | AR178: 7, AR295: 7, AR293: 7, AR218: 7, AR267: 7, AR183: 6, AR211: 6, AR289: 6, AR282: 6, AR262: 6, AR191: 6, AR300: 6, AR219: 6, AR277: 6, AR316: 6, |
| | | | | AR192: 6, AR290: 6, AR270: 6, AR177: 6, AR261: 6, AR269: 6, AR268: 6, AR266: 6, AR255: 6, AR060: 6, AR204: 6, AR297: 6, AR231: 5, AR203: 5, AR200: 5, |
| | | | | AR230: 5, AR257: 5, AR285: 5, AR198: 5, AR237: 5, AR294: 5, AR256: 5, AR283: 5, AR181: 5, AR287: 4, AR239: 4, AR260: 4, AR229: 4, AR258: 4, AR104: 4, |
| | | | | AR234: 4, AR233: 4, AR061: 4, AR207: 4, AR182: 4, AR176: 4, AR286: 4, AR232: 4, AR238: 3, AR033: 3, AR226: 3, AR196: 3, AR055: 3, AR227: 3, AR235: 2, |
| | | | | AR228: 2, H0424: 28, L0803: 25, L0805: 9, L0636: 7, L0774: 5, L0770: 4, H0661: 2, S0222: 2, L0157: 2, L0638: 2, L3904: 2, L0776: 2, L0659: 2, L0809: 2, |
| | | | | L0789: 2, H0539: 2, L0592: 2, H0295: 1, S0114: 1, H0663: 1, S6026: 1, H0549: 1, H0748: 1, H0571: 1, S0051: 1, T0006: 1, H0033: 1, H0604: 1, H0213: 1, |
| | | | | H0418: 1, H0417: 1, H0538: 1, L0769: 1, L3905: 1, L0794: 1, L0647: 1, L0787: 1, H0684: 1, H0672: 1, L0749: 1, L0753: 1, L0759: 1, S0260: 1, S0434: 1 and |
| | | | | S0436: 1. |
| | HKGDL36 | 704088 | 425 | |
| 149 | HKISB57 | 625956 | 159 | AR161: 12, AR162: 12, AR163: 12, AR165: 12, AR164: 11, AR166: 11, AR089: 8, AR225: 7, AR178: 6, AR183: 6, AR172: 6, AR300: 5, AR224: 5, AR181: 5, |
| | | | | AR221: 5, AR223: 5, AR170: 5, AR299: 5, AR039: 4, AR291: 4, AR096: 4, AR268: 4, AR275: 4, AR286: 4, AR274: 4, AR055: 4, AR247: 4, AR222: 4, AR269: 4, |
| | | | | AR258: 4, AR257: 4, AR179: 3, AR240: 3, AR242: 3, AR173: 3, AR182: 3, AR262: 3, AR270: 3, AR272: 3, AR189: 3, AR316: 3, AR267: 3, AR175: 3, AR245: 3, |
| | | | | AR313: 3, AR287: 3, AR296: 3, AR231: 2, AR210: 2, AR171: 2, AR190: 2, AR217: 2, AR205: 2, AR277: 2, AR230: 2, AR295: 2, AR290: 2, AR263: 2, AR060: 2, |
| | | | | AR309: 2, AR191: 2, AR228: 2, AR229: 2, AR104: 2, AR261: 2, AR288: 2, AR174: 2, AR282: 2, AR246: 2, AR255: 2, AR312: 2, AR237: 2, AR169: 2, AR193: 2, |
| | | | | AR271: 2, AR201: 2, AR233: 2, AR239: 2, AR197: 1, AR061: 1, AR226: 1, AR177: 1, AR213: 1, AR195: 1, AR033: 1, AR188: 1, AR238: 1, AR196: 1, AR185: 1, |
| | | | | AR293: 1, AR176: 1, AR234: 1, AR227: 1, L0747: 5, L0731: 5, H0031: 4, L0599: 4, S0045: 3, H0411: 3, H0494: 3, L0783: 3, L0743: 3, L0758: 3, L0759: 3, |
| | | | | L0604: 3, H0295: 2, S0356: 2, S0360: 2, S0046: 2, H0413: 2, L0774: 2, H0651: 2, S0027: 2, L0748: 2, L0439: 2, L0752: 2, L0601: 2, H0484: 1, S0132: 1, H0586: 1, |
| | | | | H0333: 1, H0486: 1, H0042: 1, H0122: 1, H0546: 1, H0041: 1, H0050: 1, H0408: 1, H0288: 1, H0688: 1, H0424: 1, H0644: 1, H0383: 1, L0772: 1, L0764: 1, |
| | | | | L0662: 1, L0364: 1, L0653: 1, L0782: 1, L0789: 1, L0666: 1, L0663: 1, L0664: 1, H0144: 1, S0148: 1, H0593: 1, H0666: 1, S0330: 1, S0044: 1, S0037: 1, S3014: 1, |
| | | | | L0757: 1, S0031: 1, H0667: 1 and H0506: 1. |
| 150 | HKMLM11 | 514788 | 160 | AR060: 13, AR039: 7, AR282: 7, AR170: 7, AR252: 7, AR263: 7, AR207: 7, AR309: 7, AR299: 6, AR224: 6, AR096: 5, AR161: 5, AR162: 5, AR264: 5, AR163: 5, |
| | | | | AR311: 5, AR165: 5, AR214: 5, AR225: 5, AR235: 5, AR164: 5, AR277: 5, AR166: 5, AR308: 5, AR245: 5, AR246: 5, AR217: 5, AR182: 5, AR168: 4, AR283: 4, |
| | | | | AR195: 4, AR275: 4, AR316: 4, AR271: 4, AR171: 4, AR312: 4, AR261: 4, AR053: 4, AR212: 4, AR222: 4, AR272: 4, AR270: 4, AR192: 4, AR213: 4, AR274: 4, |
| | | | | AR193: 4, AR313: 4, AR173: 4, AR300: 4, AR286: 3, AR175: 3, AR089: 3, AR291: 3, AR180: 3, AR181: 3, AR269: 3, AR288: 3, AR223: 3, AR176: 3, AR169: 3, |
| | | | | AR297: 3, AR289: 3, AR250: 3, AR285: 3, AR254: 3, AR201: 3, AR239: 3, AR229: 3, AR267: 3, AR104: 3, AR293: 3, AR198: 3, AR240: 3, AR230: 3, AR205: 3, |
| | | | | AR243: 3, AR296: 3, AR196: 3, AR236: 3, AR227: 3, AR247: 3, AR216: 3, AR204: 3, AR172: 3, AR295: 3, AR268: 2, AR199: 2, AR257: 2, AR178: 2, AR055: 2, |
| | | | | AR221: 2, AR237: 2, AR234: 2, AR174: 2, AR177: 2, AR287: 2, AR294: 2, AR188: 2, AR033: 2, AR238: 2, AR218: 2, AR231: 2, AR266: 2, AR210: 2, AR226: 2, |
| | | | | AR228: 2, AR232: 2, AR185: 2, AR262: 2, AR061: 2, AR255: 2, AR233: 2, AR203: 2, AR191: 2, AR200: 2, AR260: 2, AR290: 2, AR189: 2, AR179: 2, AR258: 2, |
| | | | | AR219: 2, AR197: 1, AR242: 1, AR183: 1, AR215: 1, H0620: 7, L3659: 3, S0442: 3, H0036: 3, H0150: 3, S0410: 2, H0722: 2, H0431: 2, H0012: 2, L0774: 2, |
| | | | | H0740: 1, H0341: 1, S0358: 1, H0792: 1, H0549: 1, H0590: 1, H0746: 1, H0510: 1, H0059: 1, T0042: 1, L0475: 1, L0803: 1, L0775: 1, H0593: 1, L3215: 1, S0013: 1, |
| | | | | L0758: 1 and H0707: 1. |
| 151 | HKMLP68 | 1037919 | 161 | AR060: 8, AR161: 4, AR162: 4, AR163: 4, AR182: 4, AR207: 3, AR176: 3, AR264: 3, AR222: 3, AR254: 3, AR186: 3, AR252: 3, AR052: 3, AR272: 3, AR196: 3, |
| | | | | AR311: 2, AR291: 2, AR181: 2, AR257: 2, AR273: 2, AR199: 2, AR214: 2, AR184: 2, AR255: 2, AR275: 2, AR265: 2, AR228: 2, AR282: 2, AR236: 2, AR262: 2, |
| | | | | AR171: 2, AR274: 2, AR261: 2, AR249: 2, AR233: 2, AR200: 2, AR227: 2, AR287: 2, AR299: 2, AR191: 2, AR266: 2, AR238: 2, AR061: 2, AR190: 2, AR165: 2, |
| | | | | AR239: 2, AR033: 2, AR247: 1, AR170: 1, AR277: 1, AR164: 1, AR175: 1, AR296: 1, AR206: 1, AR166: 1, AR039: 1, AR198: 1, AR185: 1, AR172: 1, AR269: 1, |
| | | | | AR234: 1, AR089: 1, AR253: 1, AR193: 1, AR312: 1, AR294: 1, AR263: 1, AR096: 1, AR203: 1, AR179: 1, AR204: 1, AR300: 1, AR313: 1, AR240: 1, AR244: 1, |
| | | | | AR290: 1, AR173: 1, AR174: 1, AR297: 1, AR267: 1, AR180: 1, AR217: 1, H0549: 1 and H0431: 1. |
| | HKMLP68 | 880047 | 426 | |
| | HKMLP68 | 583524 | 427 | |
| 152 | HKMMD13 | 604751 | 162 | AR252: 8, AR165: 7, AR164: 7, AR166: 7, AR313: 7, AR242: 6, AR053: 6, AR089: 6, AR198: 6, AR161: 5, AR180: 5, AR162: 5, AR163: 5, AR039: 5, AR309: 5, |
| | | | | AR207: 5, AR299: 5, AR271: 5, AR263: 4, AR282: 4, AR192: 4, AR196: 4, AR197: 4, AR201: 4, AR181: 4, AR096: 4, AR266: 4, AR274: 4, AR257: 4, AR176: 4, |
| | | | | AR178: 4, AR182: 4, AR254: 4, AR204: 4, AR193: 4, AR247: 4, AR229: 4, AR168: 3, AR228: 3, AR238: 3, AR060: 3, AR312: 3, AR177: 3, AR300: 3, AR308: 3, |
| | | | | AR171: 3, AR237: 3, AR261: 3, AR270: 3, AR233: 3, AR293: 3, AR316: 3, AR269: 3, AR183: 3, AR267: 3, AR195: 3, AR239: 3, AR268: 3, AR191: 3, AR255: 3, |
| | | | | AR205: 3, AR185: 3, AR226: 3, AR212: 3, AR231: 2, AR234: 2, AR224: 2, AR283: 2, AR240: 2, AR179: 2, AR104: 2, AR236: 2, AR243: 2, AR277: 2, AR262: 2, |
| | | | | AR200: 2, AR311: 2, AR169: 2, AR289: 2, AR294: 2, AR285: 2, AR295: 2, AR232: 2, AR213: 2, AR227: 2, AR296: 2, AR055: 2, AR290: 2, AR288: 2, AR189: 2, |
| | | | | AR188: 2, AR172: 2, AR173: 2, AR033: 2, AR061: 2, AR199: 2, AR175: 2, AR287: 2, AR174: 2, AR272: 2, AR203: 2, AR264: 2, AR217: 2, AR222: 2, AR170: 2, |
| | | | | AR291: 2, AR214: 2, AR216: 2, AR258: 1, AR230: 1, AR297: 1, AR286: 1, AR225: 1, AR190: 1, H0431: 1 |
| 153 | HKMMW74 | 581399 | 163 | AR229: 11, AR313: 11, AR163: 10, AR162: 10, AR161: 10, AR242: 9, AR176: 9, AR039: 9, AR204: 9, AR197: 8, AR309: 8, AR192: 8, AR180: 8, AR264: 8, |
| | | | | AR181: 8, AR178: 8, AR089: 8, AR177: 8, AR164: 8, AR247: 7, AR268: 7, AR196: 7, AR239: 7, AR166: 7, AR182: 7, AR252: 7, AR271: 7, AR246: 7, AR282: 7, |
| | | | | AR300: 7, AR165: 7, AR269: 7, AR233: 7, AR173: 7, AR174: 7, AR179: 7, AR267: 6, AR236: 6, AR228: 6, AR238: 6, AR175: 6, AR198: 6, AR096: 6, AR060: 6, |
| | | | | AR299: 6, AR235: 6, AR257: 6, AR240: 6, AR261: 6, AR055: 6, AR293: 6, AR275: 6, AR226: 5, AR237: 5, AR185: 5, AR183: 5, AR243: 5, AR201: 5, AR234: 5, |
| | | | | AR195: 5, AR250: 5, AR207: 5, AR291: 5, AR245: 5, AR316: 5, AR266: 5, AR191: 5, AR312: 5, AR053: 5, AR227: 5, AR231: 5, AR254: 5, AR230: 5, AR262: 5, |
| | | | | AR270: 5, AR203: 5, AR224: 4, AR289: 4, AR263: 4, AR285: 4, AR212: 4, AR193: 4, AR199: 4, AR258: 4, AR216: 4, AR218: 4, AR061: 4, AR213: 4, AR255: 4, |
| | | | | AR217: 4, AR297: 4, AR277: 4, AR200: 4, AR104: 4, AR272: 4, AR232: 4, AR205: 4, AR274: 4, AR296: 4, AR295: 3, AR286: 3, AR033: 3, AR189: 3, AR287: 3, |
| | | | | AR290: 3, AR256: 3, AR190: 3, AR311: 3, AR283: 3, AR169: 3, AR168: 3, AR170: 3, AR215: 3, AR253: 3, AR308: 3, AR288: 3, AR188: 3, AR171: 3, AR214: 3, |
| | | | | AR223: 3, AR219: 2, AR294: 2, AR221: 2, AR260: 2, AR222: 2, AR172: 2, AR210: 1, AR225: 1, H0431: 1 |
| 154 | HKMND01 | 527402 | 164 | AR313: 42, AR039: 34, AR089: 28, AR165: 25, AR162: 24, AR166: 23, AR163: 23, AR164: 23, AR161: 22, AR096: 22, AR173: 21, AR229: 21, AR300: 20, |
| | | | | AR299: 20, AR247: 18, AR185: 17, AR226: 16, AR242: 16, AR178: 16, AR316: 15, AR060: 15, AR180: 15, AR238: 15, AR204: 15, AR233: 15, AR196: 15, |
| | | | | AR293: 15, AR175: 14, AR264: 14, AR257: 14, AR182: 14, AR240: 14, AR181: 13, AR176: 13, AR312: 13, AR262: 13, AR183: 13, AR228: 13, AR218: 13, |
| | | | | AR237: 13, AR268: 13, AR179: 12, AR269: 12, AR193: 12, AR270: 12, AR197: 12, AR277: 12, AR174: 12, AR309: 12, AR239: 12, AR258: 12, AR053: 12, |
| | | | | AR234: 11, AR199: 11, AR275: 11, AR195: 11, AR104: 11, AR236: 11, AR177: 11, AR255: 11, AR282: 11, AR203: 11, AR231: 10, AR201: 10, AR230: 10, |
| | | | | AR245: 9, AR263: 9, AR274: 9, AR297: 9, AR267: 9, AR198: 9, AR219: 9, AR192: 9, AR288: 9, AR055: 9, AR294: 9, AR266: 9, AR287: 9, AR191: 9, AR243: 9, |
| | | | | AR296: 9, AR189: 8, AR261: 8, AR286: 8, AR235: 8, AR252: 8, AR308: 8, AR254: 8, AR213: 8, AR285: 8, AR272: 8, AR271: 7, AR289: 7, AR212: 7, AR291: 7, |
| | | | | AR188: 6, AR295: 6, AR200: 6, AR290: 6, AR221: 6, AR033: 6, AR227: 6, AR256: 5, AR207: 5, AR246: 5, AR260: 5, AR214: 5, AR253: 5, AR283: 5, AR061: 4, |
| | | | | AR311: 4, AR250: 4, AR205: 4, AR168: 4, AR232: 3, AR215: 3, AR172: 3, AR225: 3, AR190: 3, AR211: 3, AR217: 3, AR170: 3, AR216: 1, AR210: 1, H0431: 1 |
| 155 | HLDBE54 | 836041 | 165 | AR227: 117, AR226: 107, AR237: 85, AR238: 79, AR239: 77, AR232: 66, AR061: 66, AR231: 30, AR228: 20, AR230: 17, AR233: 16, AR234: 15, AR229: 10, |
| | | | | AR296: 7, AR316: 6, AR282: 5, AR213: 5, AR267: 5, AR225: 4, AR215: 4, AR277: 4, AR254: 4, AR264: 3, AR245: 2, AR192: 2, AR195: 2, AR201: 2, AR311: 2, |
| | | | | AR224: 2, AR060: 2, AR263: 2, AR272: 2, AR217: 2, AR291: 2, AR172: 2, AR240: 2, AR033: 1, AR312: 1, AR308: 1, AR275: 1, AR055: 1, AR268: 1, AR193: 1 |
| | | | | H0616: 1 and H0509: 1. |
| | HLDBE54 | 600362 | 428 | |
| | HLDBE54 | 800678 | 429 | |
| 156 | HLDBX13 | 815665 | 166 | AR239: 6, AR061: 6, AR235: 5, AR238: 5, AR192: 4, AR226: 4, AR172: 4, AR195: 4, AR165: 4, AR232: 4, AR213: 4, AR164: 4, AR198: 4, AR166: 4, AR217: 4, |
| | | | | AR169: 4, AR089: 3, AR246: 3, AR240: 3, AR177: 3, AR233: 3, AR162: 3, AR274: 3, AR212: 3, AR161: 3, AR176: 3, AR204: 3, AR237: 3, AR207: 3, AR215: 3, |
| | | | | AR283: 3, AR266: 3, AR275: 3, AR225: 3, AR264: 3, AR311: 3, AR227: 3, AR313: 3, AR182: 3, AR205: 3, AR221: 3, AR234: 3, AR261: 3, AR308: 3, AR231: 3, |
| | | | | AR250: 3, AR193: 3, AR282: 3, AR222: 3, AR173: 2, AR288: 2, AR199: 2, AR229: 2, AR228: 2, AR060: 2, AR243: 2, AR316: 2, AR271: 2, AR201: 2, AR185: 2, |
| | | | | AR277: 2, AR247: 2, AR312: 2, AR175: 2, AR191: 2, AR183: 2, AR245: 2, AR236: 2, AR033: 2, AR190: 2, AR300: 2, AR189: 2, AR291: 2, AR096: 2, AR223: 2, |
| | | | | AR262: 2, AR299: 2, AR174: 2, AR285: 2, AR257: 2, AR196: 2, AR286: 2, AR181: 2, AR211: 2, AR272: 2, AR216: 2, AR203: 2, AR287: 1, AR289: 1, AR270: 1, |
| | | | | AR293: 1, AR224: 1, AR295: 1, AR297: 1, AR104: 1, AR163: 1, AR254: 1, AR255: 1, AR055: 1, AR269: 1, H0509: 1 |
| 157 | HLDON23 | 636083 | 167 | AR235: 6, AR196: 5, AR161: 5, AR162: 5, AR163: 4, AR264: 4, AR176: 4, AR165: 4, AR164: 4, AR238: 4, AR214: 4, AR181: 4, AR166: 4, AR236: 4, AR191: 4, |
| | | | | AR253: 4, AR188: 4, AR177: 3, AR261: 3, AR199: 3, AR252: 3, AR178: 3, AR288: 3, AR247: 3, AR033: 3, AR182: 3, AR286: 3, AR190: 3, AR296: 3, AR170: 3, |
| | | | | AR269: 3, AR262: 3, AR200: 3, AR242: 3, AR255: 3, AR183: 3, AR295: 3, AR205: 3, AR297: 3, AR224: 3, AR285: 3, AR312: 3, AR287: 3, AR268: 3, AR189: 3, |
| | | | | AR257: 3, AR282: 3, AR291: 3, AR175: 3, AR309: 3, AR270: 3, AR171: 3, AR180: 3, AR299: 3, AR293: 2, AR217: 2, AR222: 2, AR179: 2, AR277: 2, AR271: 2, |
| | | | | AR229: 2, AR272: 2, AR174: 2, AR240: 2, AR225: 2, AR243: 2, AR173: 2, AR308: 2, AR228: 2, AR289: 2, AR203: 2, AR239: 2, AR254: 2, AR226: 2, AR233: 2, |
| | | | | AR213: 2, AR104: 2, AR258: 2, AR290: 2, AR227: 2, AR294: 2, AR267: 2, AR234: 2, AR096: 2, AR169: 2, AR237: 2, AR210: 2, AR231: 2, AR313: 2, AR311: 2, |
| | | | | AR218: 2, AR219: 2, AR172: 2, AR275: 2, AR039: 2, AR060: 2, AR316: 2, AR211: 2, AR300: 2, AR230: 2, AR185: 2, AR061: 1, AR089: 1, AR216: 1, AR212: 1, |
| | | | | AR193: 1, AR260: 1, AR201: 1, AR232: 1, AR055: 1, L0805: 8, L0809: 6, L0439: 5, L0777: 5, L0748: 4, L0800: 3, L0662: 3, L0659: 3, L0750: 3, L0758: 3, |
| | | | | H0208: 2, H0123: 2, H0617: 2, L0769: 2, L0803: 2, L0776: 2, L0666: 2, L0438: 2, L0780: 2, L0731: 2, L3643: 1, H0741: 1, H0497: 1, L0622: 1, T0109: 1, H0581: 1, |
| | | | | L0738: 1, H0546: 1, H0024: 1, T0010: 1, H0510: 1, H0428: 1, H0622: 1, H0673: 1, H0598: 1, S0036: 1, H0163: 1, H0413: 1, L0370: 1, T0041: 1, L0637: 1, |
| | | | | L5566: 1, L0667: 1, L0772: 1, L0646: 1, L0764: 1, L0794: 1, L0766: 1, L0649: 1, L0657: 1, L0788: 1, L0663: 1, S0374: 1, H0666: 1, S0330: 1, H0539: 1, H0521: 1, |
| | | | | H0696: 1, H0478: 1, L0741: 1, L0751: 1, L0745: 1, L0747: 1, L0749: 1 and L0752: 1. |
| 158 | HLDQC46 | 847397 | 168 | AR266: 19, AR261: 17, AR291: 17, AR238: 15, AR235: 15, AR283: 13, AR289: 13, AR297: 12, AR039: 12, AR055: 11, AR250: 11, AR183: 11, AR197: 10, |
| | | | | AR195: 10, AR165: 10, AR243: 10, AR061: 10, AR253: 10, AR164: 10, AR089: 9, AR166: 9, AR255: 9, AR176: 9, AR174: 9, AR239: 9, AR185: 9, AR242: 9, |
| | | | | AR177: 9, AR285: 9, AR175: 8, AR296: 8, AR245: 8, AR295: 8, AR163: 8, AR162: 8, AR256: 8, AR282: 8, AR229: 8, AR257: 8, AR060: 8, AR161: 8, AR271: 8, |
| | | | | AR254: 8, AR198: 8, AR269: 8, AR270: 7, AR192: 7, AR215: 7, AR205: 7, AR268: 7, AR178: 7, AR181: 7, AR246: 7, AR219: 7, AR247: 7, AR179: 7, AR227: 7, |
| | | | | AR316: 7, AR204: 6, AR288: 6, AR237: 6, AR293: 6, AR173: 6, AR275: 6, AR234: 6, AR262: 6, AR232: 6, AR180: 6, AR201: 6, AR287: 6, AR236: 6, AR231: 6, |
| | | | | AR207: 6, AR240: 6, AR226: 6, AR193: 6, AR211: 6, AR218: 6, AR274: 6, AR309: 5, AR191: 5, AR233: 5, AR096: 5, AR182: 5, AR223: 5, AR170: 5, AR104: 5, |
| | | | | AR263: 5, AR272: 5, AR286: 5, AR053: 5, AR252: 5, AR221: 5, AR188: 5, AR228: 5, AR267: 5, AR210: 5, AR264: 5, AR299: 5, AR294: 4, AR225: 4, AR300: 4, |
| | | | | AR196: 4, AR203: 4, AR290: 4, AR212: 4, AR033: 4, AR199: 4, AR189: 4, AR190: 4, AR311: 4, AR313: 4, AR277: 4, AR200: 4, AR230: 4, AR214: 4, AR216: 4, |
| | | | | AR312: 4, AR213: 4, AR217: 3, AR308: 3, AR258: 3, AR169: 3, AR224: 3, AR260: 2, AR171: 2, AR168: 2, H0253: 5, L0758: 3, S0444: 2, H0333: 2, H0510: 2, |
| | | | | L3905: 2, L0783: 2, S0406: 2, L0744: 2, L0754: 2, L0747: 2, L0749: 2, S0436: 2, H0423: 2, H0422: 2, H0265: 1, H0717: 1, H0716: 1, S6024: 1, H0341: 1, H0484: 1, |
| | | | | H0192: 1, S0360: 1, S0408: 1, T0008: 1, H0580: 1, H0733: 1, H0393: 1, S0280: 1, H0196: 1, H0544: 1, H0545: 1, H0086: 1, H0009: 1, H0123: 1, H0620: 1, |
| | | | | H0024: 1, S0362: 1, S0051: 1, H0188: 1, H0284: 1, H0428: 1, H0606: 1, H0135: 1, H0063: 1, H0487: 1, S0440: 1, L0768: 1, L0806: 1, L0653: 1, L0791: 1, L0666: 1, |
| | | | | L2261: 1, L0438: 1, H0672: 1, H0539: 1, S3014: 1, L0743: 1, L0752: 1, H0444: 1 and H0677: 1. |
| 159 | HLDQR62 | 753742 | 169 | AR165: 9, AR164: 9, AR162: 8, AR166: 8, AR163: 8, AR161: 8, AR195: 7, AR242: 7, AR197: 6, AR176: 6, AR207: 6, AR181: 6, AR178: 5, AR254: 5, AR272: 5, |
| | | | | AR245: 5, AR239: 5, AR257: 4, AR261: 4, AR170: 4, AR193: 4, AR252: 4, AR282: 4, AR311: 4, AR308: 4, AR212: 4, AR288: 4, AR297: 4, AR228: 4, AR168: 3, |
| | | | | AR230: 3, AR173: 3, AR266: 3, AR235: 3, AR255: 3, AR262: 3, AR174: 3, AR199: 3, AR180: 3, AR214: 3, AR175: 3, AR190: 3, AR201: 3, AR291: 3, AR183: 3, |
| | | | | AR237: 3, AR191: 3, AR287: 3, AR286: 3, AR196: 3, AR236: 3, AR232: 3, AR229: 3, AR089: 3, AR289: 3, AR243: 3, AR171: 3, AR270: 3, AR217: 3, AR182: 3, |
| | | | | AR238: 3, AR203: 3, AR205: 3, AR189: 3, AR233: 3, AR309: 2, AR053: 2, AR177: 2, AR188: 2, AR215: 2, AR210: 2, AR274: 2, AR234: 2, AR221: 2, AR296: 2, |
| | | | | AR268: 2, AR263: 2, AR293: 2, AR204: 2, AR179: 2, AR240: 2, AR227: 2, AR312: 2, AR033: 2, AR310: 2, AR226: 2, AR264: 2, AR246: 2, AR185: 2, AR216: 2, |
| | | | | AR200: 2, AR225: 2, AR295: 2, AR172: 2, AR258: 2, AR061: 2, AR247: 2, AR224: 2, AR260: 2, AR231: 2, AR285: 2, AR267: 2, AR277: 2, AR198: 2, AR275: 2, |
| | | | | AR060: 2, AR250: 2, AR256: 2, AR213: 2, AR269: 2, AR211: 2, AR299: 2, AR290: 2, AR313: 2, AR316: 2, AR192: 1, AR283: 1, AR104: 1, AR294: 1, AR055: 1, |
| | | | | AR271: 1, AR281: 1, AR300: 1, AR039: 1, AR280: 1, AR052: 1, S0007: 10, L0748: 7, H0013: 3, S0010: 3, L0771: 3, L0438: 3, L0439: 3, L0591: 3, S0040: 2, |
| | | | | S0222: 2, H0156: 2, H0083: 2, H0510: 2, S0003: 2, H0032: 2, L3905: 2, L0519: 2, H0521: 2, S0260: 2, L0596: 2, S0276: 2, H0265: 1, H0556: 1, S0134: 1, L3002: 1, |
| | | | | H0675: 1, H0734: 1, S0346: 1, H0196: 1, H0309: 1, H0327: 1, H0051: 1, H0266: 1, S0314: 1, S0022: 1, H0031: 1, H0553: 1, H0212: 1, H0038: 1, H0380: 1, |
| | | | | H0264: 1, H0100: 1, H0509: 1, S0144: 1, L0763: 1, L0372: 1, L0374: 1, L0803: 1, L0775: 1, L0776: 1, L0809: 1, S0216: 1, L2260: 1, L0710: 1, L2261: 1, L2654: 1, |
| | | | | S0148: 1, L3831: 1, H0670: 1, H0539: 1, H0518: 1, H0696: 1, S0146: 1, S0406: 1, S0028: 1, L0749: 1, L0779: 1, S0026: 1, S0192: 1 and S0242: 1. |
| 160 | HLDQU79 | 740755 | 170 | AR253: 8, AR171: 7, AR245: 6, AR243: 5, AR183: 5, AR263: 5, AR264: 4, AR250: 4, AR269: 4, AR060: 4, AR180: 4, AR270: 4, AR309: 4, AR162: 4, AR268: 4, |
| | | | | AR161: 4, AR165: 4, AR192: 4, AR176: 4, AR164: 4, AR055: 4, AR163: 4, AR213: 4, AR195: 4, AR271: 4, AR166: 3, AR275: 3, AR240: 3, AR282: 3, AR312: 3, |
| | | | | AR246: 3, AR178: 3, AR181: 3, AR311: 3, AR168: 3, AR289: 3, AR182: 3, AR193: 3, AR217: 3, AR179: 3, AR212: 3, AR237: 3, AR238: 3, AR299: 3, AR199: 3, |
| | | | | AR252: 3, AR229: 3, AR242: 2, AR185: 2, AR300: 2, AR277: 2, AR175: 2, AR293: 2, AR257: 2, AR308: 2, AR177: 2, AR198: 2, AR061: 2, AR214: 2, AR174: 2, |
| | | | | AR104: 2, AR231: 2, AR316: 2, AR201: 2, AR233: 2, AR230: 2, AR224: 2, AR236: 2, AR239: 2, AR228: 2, AR188: 2, AR223: 2, AR189: 2, AR247: 2, AR294: 2, |
| | | | | AR226: 2, AR266: 2, AR221: 2, AR285: 2, AR191: 2, AR089: 2, AR216: 2, AR200: 2, AR207: 2, AR272: 2, AR232: 2, AR190: 2, AR290: 2, AR283: 2, AR096: 2, |
| | | | | AR222: 2, AR296: 2, AR039: 2, AR267: 2, AR205: 2, AR211: 1, AR196: 1, AR173: 1, AR033: 1, AR218: 1, AR295: 1, AR255: 1, AR262: 1, AR215: 1, AR227: 1, |
| | | | | AR254: 1, AR234: 1, AR313: 1, AR203: 1, AR256: 1, AR169: 1, AR225: 1, AR210: 1, AR170: 1, L0748: 9, L0731: 7, L0771: 6, L0759: 6, H0013: 5, L0764: 4, |
| | | | | L0747: 4, L0758: 4, H0265: 3, H0039: 3, H0038: 3, L0769: 3, L0766: 3, L0775: 3, H0144: 3, L0755: 3, S0444: 2, S0476: 2, H0318: 2, H0050: 2, L0471: 2, H0266: 2, |
| | | | | L0374: 2, L0649: 2, L0805: 2, L0663: 2, L0664: 2, H0547: 2, S0126: 2, H0670: 2, L0740: 2, L0754: 2, L0750: 2, L0593: 2, H0667: 2, H0170: 1, H0171: 1, H0685: 1, |
| | | | | H0662: 1, S0354: 1, S0360: 1, H0580: 1, H0728: 1, H0151: 1, H0747: 1, L3388: 1, H0357: 1, H0586: 1, H0331: 1, H0574: 1, H0635: 1, H0575: 1, H0263: 1, |
| | | | | H0596: 1, H0545: 1, H0012: 1, H0620: 1, H0350: 1, H0355: 1, H0510: 1, H0428: 1, H0604: 1, H0031: 1, H0553: 1, S0366: 1, H0040: 1, H0063: 1, H0059: 1, |
| | | | | H0560: 1, H0561: 1, S0440: 1, S0422: 1, H0529: 1, L0640: 1, L0637: 1, L0761: 1, L0772: 1, L0646: 1, L4556: 1, L0774: 1, L0375: 1, L0653: 1, L0382: 1, L5622: 1, |
| | | | | L0793: 1, L4501: 1, H0723: 1, L0352: 1, S0152: 1, S0350: 1, H0521: 1, H0696: 1, S0044: 1, H0627: 1, S0027: 1, L0749: 1, L0752: 1, H0595: 1, S0436: 1, L0591: 1, |
| | | | | L0595: 1, L0361: 1, S0011: 1, S0194: 1, S0276: 1 and H0423: 1. |
| 161 | HLDRM43 | 846330 | 171 | AR060: 31, AR185: 19, AR055: 19, AR283: 17, AR299: 16, AR282: 14, AR104: 11, AR089: 10, AR316: 9, AR277: 9, AR300: 8, AR096: 6, AR240: 6, AR039: 5, |
| | | | | AR219: 5, AR313: 4, AR218: 3, S0410: 26, S0444: 6, S0358: 4, S0440: 4, L0748: 4, H0661: 3, S0442: 3, S0408: 3, H0393: 3, H0574: 3, S0438: 3, H0509: 3, |
| | | | | S0406: 3, S0360: 2, H0510: 2, L0764: 2, S0374: 2, H0742: 1, H0730: 1, H0722: 1, H0331: 1, H0204: 1, H0150: 1, H0615: 1, H0059: 1, L0772: 1, L0648: 1, L0803: 1, |
| | | | | L0774: 1 and L0791: 1. |
| | HLDRM43 | 638939 | 430 | |
| 162 | HLDRP33 | 647430 | 172 | AR241: 11, AR184: 11, AR196: 11, AR242: 9, AR165: 9, AR164: 9, AR166: 8, AR161: 8, AR162: 8, AR163: 8, AR313: 8, AR173: 8, AR229: 7, AR192: 6, |
| | | | | AR183: 6, AR199: 6, AR180: 6, AR262: 6, AR198: 6, AR203: 5, AR265: 5, AR264: 5, AR247: 5, AR238: 5, AR191: 5, AR181: 5, AR250: 5, AR178: 5, AR240: 5, |
| | | | | AR053: 5, AR257: 5, AR175: 5, AR177: 5, AR293: 5, AR212: 5, AR299: 5, AR258: 5, AR182: 5, AR269: 4, AR200: 4, AR089: 4, AR292: 4, AR176: 4, AR226: 4, |
| | | | | AR174: 4, AR206: 4, AR297: 4, AR193: 4, AR189: 4, AR296: 4, AR171: 4, AR312: 4, AR213: 4, AR204: 4, AR197: 4, AR243: 4, AR300: 4, AR223: 4, AR234: 4, |
| | | | | AR270: 4, AR236: 4, AR195: 4, AR179: 4, AR230: 4, AR248: 4, AR294: 3, AR268: 3, AR228: 3, AR282: 3, AR233: 3, AR310: 3, AR235: 3, AR261: 3, AR185: 3, |
| | | | | AR052: 3, AR286: 3, AR275: 3, AR285: 3, AR231: 3, AR237: 3, AR295: 3, AR277: 3, AR315: 3, AR188: 3, AR309: 3, AR311: 3, AR284: 3, AR290: 3, AR227: 3, |
| | | | | AR224: 3, AR186: 3, AR202: 3, AR308: 3, AR215: 3, AR255: 3, AR274: 3, AR239: 3, AR266: 3, AR033: 3, AR314: 3, AR096: 3, AR298: 3, AR289: 3, AR267: 3, |
| | | | | AR190: 3, AR291: 3, AR207: 3, AR039: 2, AR288: 2, AR316: 2, AR251: 2, AR225: 2, AR263: 2, AR218: 2, AR287: 2, AR260: 2, AR060: 2, AR221: 2, AR217: 2, |
| | | | | AR232: 2, AR222: 2, AR272: 2, AR253: 2, AR104: 2, AR055: 2, AR216: 2, AR271: 2, AR219: 2, AR061: 1, AR194: 1, AR210: 1, AR280: 1, AR259: 1, AR245: 1, |
| | | | | AR283: 1, AR256: 1, S0222: 1 and H0510: 1. |
| 163 | HLHAL68 | 684216 | 173 | AR089: 14, AR060: 10, AR299: 10, AR185: 8, AR096: 7, AR055: 7, AR039: 6, AR283: 5, AR316: 5, AR313: 5, AR282: 5, AR240: 4, AR218: 4, AR104: 4, |
| | | | | AR300: 3, AR221: 3, AR277: 3, AR219: 3, AR168: 3, AR053: 2, AR207: 2, AR264: 2, AR217: 2, AR266: 2, AR172: 2, AR171: 1, AR294: 1, AR166: 1, AR291: 1, |
| | | | | AR213: 1, AR210: 1, AR199: 1, AR215: 1, AR161: 1, AR230: 1, AR162: 1, AR163: 1, H0024: 1 |
| 164 | HLHFP03 | 460467 | 174 | AR194: 6, AR186: 6, AR169: 6, AR170: 5, AR202: 5, AR060: 5, AR206: 5, AR184: 5, AR176: 5, AR273: 4, AR249: 4, AR248: 4, AR223: 4, AR161: 4, AR055: 4, |
| | | | | AR162: 4, AR251: 4, AR163: 4, AR061: 4, AR282: 4, AR244: 4, AR052: 4, AR310: 4, AR053: 4, AR267: 4, AR253: 3, AR235: 3, AR183: 3, AR269: 3, AR182: 3, |
| | | | | AR312: 3, AR204: 3, AR266: 3, AR192: 3, AR246: 3, AR275: 3, AR270: 3, AR104: 3, AR185: 3, AR298: 3, AR089: 3, AR295: 3, AR241: 3, AR271: 3, AR309: 3, |
| | | | | AR181: 3, AR166: 3, AR291: 3, AR263: 3, AR257: 3, AR217: 3, AR289: 3, AR296: 3, AR033: 3, AR238: 3, AR283: 3, AR277: 3, AR292: 3, AR205: 2, AR247: 2, |
| | | | | AR299: 2, AR193: 2, AR231: 2, AR213: 2, AR268: 2, AR168: 2, AR284: 2, AR262: 2, AR237: 2, AR212: 2, AR243: 2, AR274: 2, AR297: 2, AR300: 2, AR286: 2, |
| | | | | AR228: 2, AR240: 2, AR233: 2, AR272: 2, AR285: 2, AR316: 2, AR165: 2, AR229: 2, AR096: 2, AR226: 2, AR293: 2, AR313: 2, AR255: 2, AR294: 2, AR191: 2, |
| | | | | AR290: 2, AR164: 2, AR172: 2, AR264: 2, AR227: 2, AR174: 2, AR039: 2, AR287: 2, AR198: 2, AR265: 2, AR232: 2, AR171: 2, AR216: 2, AR177: 2, AR311: 1, |
| | | | | AR234: 1, AR175: 1, AR239: 1, AR203: 1, AR236: 1, AR230: 1, AR218: 1, AR196: 1, AR261: 1, AR260: 1, AR259: 1, AR201: 1, AR189: 1, AR179: 1, L0742: 4 |
| | | | | and H0024: 1. |
| 165 | HLIBD68 | 778073 | 175 | AR253: 19, AR313: 9, AR212: 8, AR312: 7, AR053: 7, AR250: 7, AR264: 6, AR161: 6, AR162: 6, AR263: 6, AR309: 6, AR163: 6, AR165: 6, AR197: 6, AR096: 6, |
| | | | | AR166: 6, AR164: 6, AR089: 6, AR173: 6, AR180: 6, AR178: 5, AR198: 5, AR240: 5, AR213: 5, AR221: 4, AR308: 4, AR311: 4, AR300: 4, AR175: 4, AR229: 4, |
| | | | | AR269: 4, AR181: 4, AR242: 4, AR274: 4, AR247: 4, AR168: 4, AR257: 4, AR193: 4, AR177: 4, AR192: 4, AR183: 4, AR195: 4, AR235: 3, AR270: 3, AR262: 3, |
| | | | | AR266: 3, AR282: 3, AR316: 3, AR225: 3, AR060: 3, AR196: 3, AR275: 3, AR299: 3, AR182: 3, AR277: 3, AR245: 3, AR293: 3, AR207: 3, AR174: 3, AR254: 3, |
| | | | | AR179: 3, AR296: 3, AR261: 3, AR238: 3, AR233: 3, AR185: 3, AR218: 3, AR258: 3, AR268: 3, AR295: 3, AR205: 3, AR226: 3, AR219: 3, AR271: 3, AR199: 3, |
| | | | | AR236: 3, AR289: 3, AR234: 2, AR224: 2, AR267: 2, AR201: 2, AR297: 2, AR287: 2, AR033: 2, AR188: 2, AR191: 2, AR189: 2, AR286: 2, AR231: 2, AR230: 2, |
| | | | | AR255: 2, AR237: 2, AR291: 2, AR200: 2, AR246: 2, AR288: 2, AR272: 2, AR203: 2, AR239: 2, AR285: 2, AR190: 2, AR290: 2, AR227: 2, AR204: 2, AR222: 2, |
| | | | | AR243: 2, AR228: 2, AR104: 2, AR055: 1, AR216: 1, AR171: 1, AR294: 1, AR170: 1, AR172: 1, AR217: 1, AR211: 1, L0157: 7, L0794: 6, H0040: 4, L0439: 4, |
| | | | | L0758: 4, H0556: 3, L0803: 3, L0005: 2, L0471: 2, H0059: 2, T0004: 2, L0769: 2, L0761: 2, L0805: 2, T0002: 1, H0685: 1, S0134: 1, S0110: 1, H0176: 1, S0356: 1, |
| | | | | S0222: 1, H0441: 1, H0370: 1, H0486: 1, H0014: 1, H0083: 1, H0355: 1, H0286: 1, H0606: 1, H0163: 1, H0090: 1, H0561: 1, L0521: 1, L0766: 1, L0774: 1, |
| | | | | L0809: 1, L0788: 1, L0665: 1, H0539: 1, H0696: 1, L0748: 1, L0749: 1, L0777: 1, H0543: 1 and H0423: 1. |
| 166 | HLICQ90 | 791828 | 176 | AR263: 79, AR264: 68, AR252: 65, AR246: 63, AR254: 61, AR311: 60, AR308: 54, AR053: 52, AR309: 51, AR312: 46, AR212: 41, AR205: 40, AR250: 39, |
| | | | | AR213: 38, AR096: 37, AR272: 37, AR245: 36, AR218: 36, AR219: 36, AR243: 35, AR039: 32, AR197: 29, AR240: 26, AR198: 25, AR201: 24, AR274: 22, |
| | | | | AR200: 22, AR313: 22, AR271: 21, AR195: 20, AR242: 18, AR221: 18, AR224: 18, AR174: 18, AR275: 18, AR165: 18, AR316: 17, AR164: 17, AR185: 17, |
| | | | | AR104: 17, AR189: 17, AR290: 17, AR222: 17, AR210: 16, AR223: 16, AR269: 16, AR033: 16, AR188: 16, AR268: 16, AR253: 16, AR211: 16, AR166: 15, |
| | | | | AR192: 15, AR295: 15, AR193: 14, AR173: 14, AR196: 14, AR089: 14, AR175: 14, AR296: 14, AR199: 14, AR172: 14, AR162: 13, AR161: 13, AR207: 13, |
| | | | | AR270: 13, AR190: 13, AR180: 13, AR225: 13, AR177: 13, AR183: 13, AR291: 12, AR299: 12, AR235: 12, AR285: 12, AR163: 12, AR191: 12, AR247: 12, |
| | | | | AR266: 12, AR171: 12, AR178: 11, AR289: 11, AR288: 11, AR060: 11, AR286: 11, AR204: 11, AR300: 11, AR297: 11, AR267: 10, AR282: 10, AR287: 10, |
| | | | | AR255: 10, AR168: 10, AR261: 10, AR257: 10, AR283: 9, AR262: 9, AR203: 9, AR238: 9, AR215: 9, AR214: 9, AR179: 9, AR170: 8, AR181: 8, AR256: 8, |
| | | | | AR293: 8, AR236: 8, AR231: 8, AR229: 7, AR260: 7, AR277: 7, AR182: 7, AR258: 7, AR176: 7, AR234: 7, AR226: 6, AR294: 6, AR237: 6, AR055: 6, AR169: 5, |
| | | | | AR230: 5, AR217: 5, AR232: 5, AR216: 4, AR239: 4, AR061: 4, AR233: 4, AR227: 3, AR228: 3, H0046: 10, L0748: 6, L0758: 3, L0776: 2, L0742: 2, L0744: 2, |
| | | | | L0750: 2, S0444: 1, S0360: 1, H0619: 1, L0717: 1, H0331: 1, H0013: 1, H0235: 1, H0355: 1, H0687: 1, H0674: 1, H0038: 1, H0623: 1, L0805: 1, L0809: 1, L0789: 1, |
| | | | | L0666: 1, L0663: 1, S0428: 1, H0520: 1, H0539: 1, S0404: 1, L0740: 1, L0749: 1, L0756: 1, S0031: 1, S0026: 1 and H0008: 1. |
| 167 | HLMBO76 | 626831 | 177 | AR169: 5, AR204: 5, AR264: 5, AR235: 5, AR176: 4, AR263: 4, AR269: 4, AR161: 4, AR217: 4, AR163: 4, AR162: 4, AR309: 4, AR181: 4, AR183: 3, AR272: 3, |
| | | | | AR268: 3, AR214: 3, AR225: 3, AR196: 3, AR197: 3, AR191: 3, AR257: 3, AR261: 3, AR188: 3, AR216: 3, AR285: 3, AR238: 3, AR182: 3, AR288: 3, AR274: 3, |
| | | | | AR267: 3, AR313: 3, AR189: 3, AR294: 3, AR258: 3, AR282: 3, AR178: 3, AR236: 3, AR296: 2, AR172: 2, AR165: 2, AR255: 2, AR308: 2, AR289: 2, AR270: 2, |
| | | | | AR287: 2, AR164: 2, AR297: 2, AR290: 2, AR262: 2, AR229: 2, AR166: 2, AR173: 2, AR199: 2, AR228: 2, AR312: 2, AR230: 2, AR177: 2, AR266: 2, AR240: 2, |
| | | | | AR239: 2, AR033: 2, AR190: 2, AR193: 2, AR293: 2, AR233: 2, AR171: 2, AR291: 2, AR286: 2, AR174: 2, AR200: 2, AR175: 2, AR179: 2, AR203: 2, AR053: 2, |
| | | | | AR237: 2, AR226: 2, AR168: 2, AR316: 2, AR055: 2, AR104: 2, AR231: 2, AR300: 2, AR295: 2, AR195: 2, AR234: 2, AR089: 2, AR247: 2, AR222: 2, AR221: 2, |
| | | | | AR060: 2, AR311: 2, AR211: 1, AR096: 1, AR201: 1, AR232: 1, AR205: 1, AR218: 1, AR260: 1, AR219: 1, AR039: 1, AR212: 1, AR256: 1, AR185: 1, AR277: 1, |
| | | | | AR061: 1, L0439: 6, S0410: 3, L0794: 2, H0255: 1, H0163: 1, H0745: 1, L0796: 1, L0662: 1, L0766: 1, L0776: 1, L0666: 1, L0438: 1, L0352: 1, H0659: 1, H0521: 1 |
| | | | | and L0755: 1. |
| 168 | HLTEJ06 | 543017 | 178 | AR055: 6, AR183: 5, AR309: 5, AR060: 5, AR104: 5, AR162: 4, AR161: 4, AR163: 4, AR282: 4, AR165: 4, AR274: 4, AR164: 4, AR225: 4, AR266: 3, AR252: 3, |
| | | | | AR166: 3, AR178: 3, AR229: 3, AR182: 3, AR299: 3, AR261: 3, AR089: 3, AR240: 3, AR283: 3, AR264: 3, AR257: 3, AR242: 3, AR177: 3, AR268: 3, AR228: 3, |
| | | | | AR238: 3, AR239: 3, AR269: 3, AR272: 3, AR275: 3, AR267: 2, AR215: 2, AR039: 2, AR300: 2, AR237: 2, AR255: 2, AR176: 2, AR316: 2, AR313: 2, AR181: 2, |
| | | | | AR185: 2, AR231: 2, AR233: 2, AR096: 2, AR226: 2, AR247: 2, AR172: 2, AR061: 2, AR216: 2, AR271: 2, AR234: 2, AR169: 2, AR312: 2, AR270: 2, AR200: 2, |
| | | | | AR033: 2, AR205: 2, AR170: 1, AR227: 1, AR308: 1, AR190: 1, AR198: 1, AR311: 1, AR168: 1, AR230: 1, AR246: 1, AR179: 1, AR173: 1, AR189: 1, AR290: 1, |
| | | | | AR262: 1, AR277: 1, AR217: 1, AR289: 1, AR291: 1, AR236: 1, AR219: 1, AR232: 1, AR218: 1, AR293: 1, AR175: 1, AR174: 1, L0769: 3, L0777: 3, S0422: 2, |
| | | | | L0803: 2, L0775: 2, H0547: 2, S0408: 1, S0278: 1, H0090: 1, L0766: 1, L0774: 1, L0515: 1, H0519: 1, L0748: 1, L0749: 1, L0755: 1, L0759: 1 and L0592: 1. |
| 169 | HLTHR66 | 699812 | 179 | AR282: 6, AR221: 4, AR235: 3, AR176: 3, AR266: 3, AR215: 3, AR269: 3, AR171: 3, AR270: 3, AR308: 2, AR183: 2, AR196: 2, AR217: 2, AR172: 2, AR177: 2, |
| | | | | AR197: 2, AR222: 2, AR268: 2, AR295: 2, AR228: 2, AR236: 2, AR267: 2, AR188: 2, AR238: 2, AR261: 2, AR309: 2, AR255: 2, AR296: 2, AR233: 2, AR207: 2, |
| | | | | AR291: 2, AR257: 2, AR290: 2, AR232: 2, AR193: 1, AR277: 1, AR178: 1, AR283: 1, AR089: 1, AR181: 1, AR164: 1, AR203: 1, AR264: 1, AR212: 1, AR166: 1, |
| | | | | AR231: 1, AR247: 1, AR293: 1, AR205: 1, AR055: 1, AR316: 1, AR300: 1, AR175: 1, AR287: 1, AR189: 1, AR168: 1, AR234: 1, AR161: 1, AR174: 1, AR239: 1, |
| | | | | H0036: 2, S0132: 1, S0010: 1, S0250: 1, H0591: 1 and H0130: 1. |
| 170 | HLTIP94 | 1087335 | 180 | AR060: 7, AR055: 7, AR185: 6, AR313: 6, AR218: 5, AR300: 5, AR240: 5, AR089: 4, AR282: 4, AR299: 4, AR283: 4, AR039: 3, AR096: 3, AR316: 3, AR104: 3, |
| | | | | AR277: 3, AR219: 2, H0170: 1, S6026: 1 and H0591: 1. |
| | HLTIP94 | 1035443 | 431 | |
| | HLTIP94 | 1047690 | 432 | |
| 171 | HLWAA17 | 629552 | 181 | AR273: 12, AR184: 12, AR248: 11, AR281: 9, AR183: 8, AR265: 8, AR314: 7, AR280: 7, AR315: 7, AR269: 7, AR268: 6, AR270: 6, AR241: 6, AR290: 6, |
| | | | | AR249: 5, AR298: 5, AR244: 5, AR292: 5, AR274: 4, AR096: 4, AR291: 4, AR271: 4, AR238: 4, AR251: 4, AR310: 4, AR052: 4, AR309: 4, AR215: 4, AR198: 4, |
| | | | | AR182: 4, AR219: 4, AR226: 4, AR312: 4, AR206: 4, AR275: 4, AR243: 4, AR313: 4, AR267: 4, AR231: 4, AR186: 4, AR218: 4, AR272: 4, AR282: 4, AR253: 4, |
| | | | | AR165: 4, AR225: 4, AR164: 3, AR192: 3, AR296: 3, AR240: 3, AR242: 3, AR039: 3, AR311: 3, AR284: 3, AR232: 3, AR089: 3, AR175: 3, AR237: 3, AR196: 3, |
| | | | | AR207: 3, AR213: 3, AR161: 3, AR061: 3, AR234: 3, AR285: 3, AR247: 3, AR227: 3, AR185: 3, AR216: 3, AR229: 3, AR289: 2, AR053: 2, AR033: 2, AR277: 2, |
| | | | | AR193: 2, AR195: 2, AR205: 2, AR316: 2, AR264: 2, AR212: 2, AR286: 2, AR188: 2, AR293: 2, AR174: 2, AR297: 2, AR222: 2, AR300: 2, AR191: 2, AR190: 2, |
| | | | | AR177: 2, AR288: 2, AR295: 2, AR283: 2, AR162: 2, AR263: 2, AR055: 2, AR299: 2, AR104: 2, AR261: 2, AR166: 2, AR294: 2, AR266: 2, AR181: 2, AR214: 2, |
| | | | | AR189: 2, AR259: 2, AR246: 2, AR201: 1, AR060: 1, AR257: 1, AR204: 1, AR233: 1, AR199: 1, AR179: 1, AR173: 1, AR200: 1, AR258: 1, AR210: 1, AR252: 1, |
| | | | | AR168: 1, AR256: 1, AR194: 1, AR255: 1, AR236: 1, S0410: 24, L0748: 18, S0436: 12, H0547: 8, L0731: 8, H0556: 7, H0039: 6, L0666: 6, H0046: 5, H0059: 5, |
| | | | | L0775: 5, L0439: 5, L0755: 5, H0622: 4, L0662: 4, L0740: 4, L0751: 4, L0779: 4, H0575: 3, H0553: 3, H0529: 3, L0769: 3, L0659: 3, L5623: 3, L0588: 3, L0593: 3, |
| | | | | S0011: 3, H0255: 2, S0418: 2, S0442: 2, S0046: 2, H0586: 2, S0049: 2, H0424: 2, H0644: 2, H0560: 2, H0561: 2, S0002: 2, S0426: 2, L0763: 2, L0772: 2, L0646: 2, |
| | | | | L0655: 2, L0527: 2, L0518: 2, L0783: 2, L0809: 2, L0665: 2, L0438: 2, H0519: 2, H0689: 2, H0672: 2, H0555: 2, H0631: 2, S0206: 2, L0757: 2, L0758: 2, L0485: 2, |
| | | | | L0608: 2, L0601: 2, H0543: 2, H0171: 1, H0265: 1, S0040: 1, H0294: 1, T0049: 1, S0134: 1, H0583: 1, H0657: 1, H0484: 1, H0661: 1, H0125: 1, S0420: 1, S0354: 1, |
| | | | | S0358: 1, S0360: 1, S0408: 1, H0580: 1, H0742: 1, S0132: 1, S0476: 1, H0550: 1, H0431: 1, H0592: 1, H0587: 1, H0333: 1, H0270: 1, H0013: 1, H0599: 1, T0082: 1, |
| | | | | H0318: 1, H0251: 1, T0110: 1, H0545: 1, H0150: 1, H0041: 1, H0620: 1, H0024: 1, H0057: 1, H0014: 1, S0051: 1, H0083: 1, S0024: 1, H0355: 1, H0266: 1, |
| | | | | H0271: 1, H0188: 1, S0250: 1, H0328: 1, H0615: 1, L0483: 1, H0030: 1, H0031: 1, H0111: 1, H0032: 1, H0383: 1, H0674: 1, H0211: 1, L0456: 1, H0068: 1, |
| | | | | H0135: 1, H0040: 1, H0634: 1, H0551: 1, H0412: 1, S0450: 1, H0647: 1, H0646: 1, S0144: 1, S0142: 1, S0344: 1, S0210: 1, L0761: 1, L0372: 1, L0764: 1, L0767: 1, |
| | | | | L0768: 1, L0649: 1, L5574: 1, L0375: 1, L0651: 1, L0784: 1, L0654: 1, L0807: 1, L0515: 1, L0658: 1, L0383: 1, L0663: 1, L0664: 1, S0006: 1, H0520: 1, H0593: 1, |
| | | | | H0682: 1, H0684: 1, H0658: 1, H0670: 1, H0696: 1, S0406: 1, S0027: 1, L0754: 1, L0747: 1, L0750: 1, L0752: 1, S0434: 1, L0591: 1, L0603: 1, S0106: 1, H0668: 1, |
| | | | | H0542: 1 and H0423: 1. |
| 172 | HLWAA88 | 588485 | 182 | AR308: 21, AR311: 17, AR312: 17, AR214: 14, AR246: 13, AR172: 13, AR165: 12, AR170: 11, AR195: 11, AR193: 11, AR171: 11, AR169: 11, AR309: 11, |
| | | | | AR222: 10, AR192: 10, AR223: 10, AR217: 10, AR207: 10, AR216: 10, AR295: 10, AR201: 10, AR271: 10, AR291: 9, AR224: 9, AR264: 9, AR215: 9, AR197: 9, |
| | | | | AR285: 9, AR166: 9, AR164: 9, AR205: 9, AR297: 8, AR162: 8, AR263: 8, AR188: 8, AR287: 8, AR250: 8, AR210: 8, AR296: 8, AR161: 8, AR252: 8, AR235: 7, |
| | | | | AR163: 7, AR213: 7, AR196: 7, AR212: 7, AR243: 7, AR168: 7, AR261: 7, AR238: 7, AR253: 7, AR245: 7, AR262: 7, AR176: 7, AR232: 6, AR183: 6, AR174: 6, |
| | | | | AR191: 6, AR275: 6, AR270: 6, AR200: 6, AR236: 6, AR288: 6, AR177: 6, AR240: 6, AR286: 6, AR247: 6, AR282: 6, AR180: 6, AR226: 6, AR254: 6, AR294: 6, |
| | | | | AR227: 6, AR060: 6, AR231: 6, AR289: 6, AR237: 6, AR242: 6, AR199: 6, AR185: 6, AR204: 6, AR198: 6, AR053: 6, AR225: 6, AR293: 6, AR175: 6, AR268: 5, |
| | | | | AR061: 5, AR189: 5, AR033: 5, AR173: 5, AR299: 5, AR190: 5, AR269: 5, AR239: 5, AR272: 5, AR316: 5, AR300: 5, AR233: 5, AR257: 5, AR228: 5, AR290: 5, |
| | | | | AR179: 5, AR234: 5, AR039: 5, AR211: 5, AR089: 5, AR182: 5, AR255: 5, AR266: 5, AR274: 5, AR277: 5, AR181: 5, AR104: 5, AR258: 4, AR178: 4, AR229: 4, |
| | | | | AR203: 4, AR055: 4, AR313: 4, AR267: 4, AR230: 4, AR096: 4, AR260: 4, AR283: 4, AR256: 3, AR219: 3, AR218: 3, AR221: 3, L0803: 7, L0774: 4, H0553: 3, |
| | | | | L0771: 3, H0662: 2, L5566: 2, L0794: 2, L0752: 2, H0592: 1, H0412: 1, L2270: 1, L0807: 1, L0793: 1, H0593: 1, L0747: 1, L0755: 1 and S0434: 1. |
| | HLWAA88 | 769166 | 433 | |
| 173 | HLWAD77 | 653513 | 183 | AR263: 12, AR219: 10, AR269: 10, AR184: 10, AR089: 10, AR290: 9, AR218: 9, AR238: 9, AR291: 9, AR282: 9, AR241: 8, AR296: 8, AR248: 8, AR268: 8, |
| | | | | AR183: 8, AR096: 8, AR039: 8, AR277: 8, AR231: 8, AR299: 7, AR312: 7, AR316: 7, AR060: 7, AR053: 7, AR185: 7, AR313: 7, AR182: 7, AR251: 7, AR237: 6, |
| | | | | AR192: 6, AR240: 6, AR309: 6, AR253: 6, AR314: 6, AR270: 6, AR249: 6, AR274: 6, AR266: 5, AR234: 5, AR243: 5, AR104: 5, AR186: 5, AR300: 5, AR052: 5, |
| | | | | AR213: 5, AR265: 5, AR285: 5, AR226: 5, AR273: 5, AR298: 5, AR229: 5, AR292: 5, AR310: 4, AR267: 4, AR275: 4, AR247: 4, AR206: 4, AR232: 4, AR280: 4, |
| | | | | AR284: 4, AR289: 4, AR175: 4, AR246: 4, AR033: 3, AR315: 3, AR256: 3, AR055: 3, AR283: 3, AR286: 3, AR294: 3, AR295: 3, AR198: 3, AR227: 3, AR293: 3, |
| | | | | AR233: 2, AR205: 2, AR061: 2, AR179: 2, AR177: 2, AR194: 2, AR281: 2, AR259: 2, AR258: 2, L0748: 10, L0759: 6, S0436: 4, S0007: 3, S0126: 3, H0659: 3, |
| | | | | S0028: 3, L0439: 3, L0740: 3, L0749: 3, L0777: 3, L0755: 3, S0376: 2, H0250: 2, H0046: 2, H0673: 2, H0038: 2, H0412: 2, H0494: 2, H0529: 2, L0770: 2, L0768: 2, |
| | | | | L0766: 2, L0805: 2, L0745: 2, L0750: 2, L0779: 2, L0757: 2, T0002: 1, L3642: 1, L3643: 1, H0583: 1, S0116: 1, H0341: 1, S0358: 1, S0444: 1, S0360: 1, L3645: 1, |
| | | | | L3649: 1, H0580: 1, S0045: 1, S0476: 1, H0261: 1, H0642: 1, H0574: 1, H0485: 1, H0486: 1, T0040: 1, L3655: 1, H0599: 1, H0581: 1, H0052: 1, H0251: 1, |
| | | | | T0110: 1, H0150: 1, H0083: 1, H0266: 1, H0687: 1, S0214: 1, H0553: 1, H0372: 1, H0616: 1, H0100: 1, S0112: 1, S0438: 1, S0150: 1, H0641: 1, S0142: 1, L0764: 1, |
| | | | | L0767: 1, L0775: 1, L0806: 1, L0653: 1, L0776: 1, L0791: 1, L0666: 1, L0665: 1, S0428: 1, L0438: 1, H0689: 1, H0435: 1, H0660: 1, H0648: 1, S0328: 1, S0330: 1, |
| | | | | H0539: 1, L0602: 1, S0152: 1, H0522: 1, S0406: 1, S0027: 1, L0753: 1, L0731: 1, L0758: 1, S0434: 1, S0276: 1, S0196: 1 and H0423: 1. |
| 174 | HLWAE11 | 783071 | 184 | AR242: 67, AR192: 47, AR164: 43, AR173: 37, AR165: 37, AR161: 36, AR195: 36, AR313: 35, AR162: 35, AR198: 34, AR166: 33, AR204: 32, AR212: 32, |
| | | | | AR193: 30, AR163: 30, AR197: 29, AR277: 28, AR275: 28, AR245: 27, AR213: 26, AR243: 26, AR207: 26, AR053: 26, AR257: 25, AR312: 25, AR299: 25, |
| | | | | AR264: 24, AR254: 24, AR191: 23, AR247: 23, AR308: 23, AR205: 22, AR274: 21, AR189: 21, AR263: 21, AR311: 21, AR271: 20, AR039: 19, AR104: 19, |
| | | | | AR201: 19, AR240: 19, AR300: 19, AR199: 18, AR246: 17, AR188: 17, AR089: 17, AR309: 17, AR253: 16, AR272: 15, AR252: 15, AR282: 14, AR185: 14, |
| | | | | AR033: 13, AR250: 12, AR096: 12, AR316: 12, AR203: 12, AR190: 11, AR176: 11, AR175: 10, AR214: 10, AR060: 10, AR258: 9, AR177: 9, AR168: 9, |
| | | | | AR270: 8, AR283: 8, AR180: 8, AR174: 8, AR217: 8, AR235: 7, AR196: 7, AR293: 7, AR216: 7, AR170: 7, AR262: 7, AR171: 7, AR181: 7, AR236: 7, AR169: 6, |
| | | | | AR229: 6, AR297: 6, AR224: 6, AR268: 6, AR286: 6, AR295: 6, AR261: 6, AR172: 6, AR178: 5, AR222: 5, AR238: 5, AR285: 5, AR223: 5, AR221: 5, AR269: 5, |
| | | | | AR183: 5, AR179: 5, AR234: 5, AR289: 5, AR055: 5, AR288: 5, AR237: 5, AR233: 5, AR215: 5, AR296: 5, AR200: 5, AR255: 4, AR061: 4, AR287: 4, AR294: 4, |
| | | | | AR226: 4, AR225: 4, AR230: 4, AR231: 4, AR291: 4, AR290: 4, AR182: 4, AR239: 4, AR266: 3, AR227: 3, AR211: 3, AR228: 3, AR210: 3, AR256: 3, AR260: 3, |
| | | | | AR219: 3, AR267: 3, AR232: 3, AR218: 2, H0056: 2, H0050: 1, H0266: 1, H0553: 1, H0521: 1 and L0748: 1. |
| 175 | HLWAO22 | 587270 | 185 | AR214: 8, AR217: 6, AR222: 5, AR215: 5, AR221: 5, AR172: 5, AR309: 4, AR275: 4, AR163: 4, AR161: 4, AR162: 4, AR170: 4, AR224: 4, AR171: 4, AR165: 4, |
| | | | | AR253: 3, AR225: 3, AR164: 3, AR166: 3, AR168: 3, AR223: 3, AR263: 3, AR169: 3, AR311: 3, AR264: 3, AR197: 3, AR216: 3, AR271: 3, AR183: 3, AR308: 3, |
| | | | | AR053: 3, AR096: 3, AR291: 3, AR296: 3, AR312: 3, AR245: 2, AR289: 2, AR104: 2, AR240: 2, AR316: 2, AR300: 2, AR269: 2, AR196: 2, AR272: 2, AR247: 2, |
| | | | | AR185: 2, AR176: 2, AR177: 2, AR178: 2, AR213: 2, AR192: 2, AR181: 2, AR277: 2, AR234: 2, AR205: 2, AR229: 2, AR282: 2, AR055: 2, AR061: 2, AR274: 2, |
| | | | | AR243: 2, AR060: 2, AR212: 2, AR226: 2, AR257: 2, AR313: 2, AR231: 2, AR255: 2, AR268: 2, AR089: 2, AR179: 2, AR287: 2, AR261: 2, AR203: 2, AR233: 1, |
| | | | | AR283: 1, AR290: 1, AR258: 1, AR288: 1, AR210: 1, AR285: 1, AR039: 1, AR193: 1, AR191: 1, AR299: 1, AR293: 1, AR238: 1, L0439: 8, L0751: 6, L0747: 6, |
| | | | | L0665: 5, L0438: 4, L0779: 4, H0012: 3, L0748: 3, H0620: 2, H0594: 2, H0424: 2, H0553: 2, S0144: 2, L0769: 2, L0771: 2, L0809: 2, H0144: 2, H0593: 2, S0027: 2, |
| | | | | L0777: 2, L0758: 2, L0587: 2, H0422: 2, H0171: 1, H0713: 1, H0664: 1, H0619: 1, S0222: 1, H0492: 1, L3653: 1, H0618: 1, H0253: 1, H0581: 1, H0052: 1, |
| | | | | H0150: 1, H0024: 1, S0388: 1, S0364: 1, H0135: 1, H0040: 1, L0640: 1, L3905: 1, L0761: 1, L0372: 1, L0773: 1, L0648: 1, L0662: 1, L0766: 1, L0774: 1, L0629: 1, |
| | | | | L0666: 1, L0664: 1, H0658: 1, H0521: 1, S3014: 1, H0543: 1 and H0423: 1. |
| 176 | HLWBH18 | 1045194 | 186 | AR223: 70, AR214: 68, AR196: 64, AR169: 59, AR216: 58, AR224: 58, AR313: 57, AR222: 56, AR207: 55, AR212: 55, AR173: 54, AR171: 53, AR236: 53, |
| | | | | AR215: 52, AR213: 49, AR192: 49, AR163: 49, AR217: 48, AR205: 47, AR172: 47, AR245: 46, AR225: 46, AR263: 46, AR221: 46, AR089: 46, AR199: 45, |
| | | | | AR053: 45, AR168: 44, AR218: 44, AR166: 44, AR299: 44, AR164: 42, AR242: 41, AR274: 40, AR219: 40, AR240: 40, AR247: 40, AR165: 40, AR170: 40, |
| | | | | AR175: 40, AR161: 40, AR312: 39, AR188: 38, AR235: 38, AR162: 37, AR195: 37, AR264: 36, AR174: 36, AR177: 36, AR096: 36, AR246: 36, AR308: 36, |
| | | | | AR189: 35, AR039: 35, AR210: 35, AR229: 34, AR311: 34, AR198: 34, AR316: 34, AR261: 33, AR262: 32, AR296: 32, AR309: 32, AR288: 32, AR181: 32, |
| | | | | AR258: 32, AR185: 32, AR300: 32, AR295: 31, AR191: 30, AR178: 30, AR060: 30, AR179: 29, AR291: 29, AR285: 29, AR200: 28, AR297: 28, AR180: 27, |
| | | | | AR197: 27, AR183: 27, AR270: 27, AR193: 27, AR275: 27, AR290: 27, AR234: 26, AR230: 26, AR201: 26, AR226: 26, AR282: 26, AR286: 25, AR293: 24, |
| | | | | AR203: 24, AR287: 23, AR033: 23, AR268: 23, AR231: 23, AR204: 23, AR277: 23, AR271: 23, AR257: 23, AR182: 23, AR238: 23, AR190: 22, AR272: 22, |
| | | | | AR237: 21, AR252: 21, AR269: 21, AR176: 21, AR211: 21, AR294: 21, AR289: 21, AR260: 20, AR104: 20, AR233: 20, AR239: 19, AR256: 19, AR283: 19, |
| | | | | AR255: 19, AR243: 19, AR227: 18, AR266: 17, AR232: 16, AR228: 16, AR267: 15, AR254: 13, AR250: 13, AR253: 12, AR055: 11, AR061: 9, H0553: 1 |
| | HLWBH18 | 889277 | 434 | |
| 177 | HLWBY76 | 797609 | 187 | AR180: 20, AR181: 14, AR268: 6, AR219: 5, AR218: 5, AR269: 5, AR179: 5, AR273: 5, AR178: 4, AR173: 4, AR184: 4, AR183: 4, AR176: 4, AR270: 3, |
| | | | | AR221: 3, AR215: 3, AR175: 3, AR282: 3, AR214: 3, AR052: 3, AR267: 2, AR309: 2, AR202: 2, AR253: 2, AR312: 2, AR162: 2, AR266: 2, AR182: 2, AR165: 2, |
| | | | | AR216: 2, AR171: 2, AR190: 1, AR213: 1, AR192: 1, AR243: 1, AR186: 1, AR229: 1, AR257: 1, AR205: 1, AR053: 1, AR313: 1, AR230: 1, AR274: 1, AR174: 1, |
| | | | | AR272: 1, AR280: 1, AR240: 1, AR252: 1, AR316: 1, AR277: 1, AR284: 1, AR263: 1, AR172: 1, AR096: 1, AR271: 1, H0553: 7, H0412: 4, L0747: 4, L0779: 4, |
| | | | | L0777: 4, H0615: 3, L0766: 3, H0519: 3, L0755: 3, L0591: 3, H0413: 2, L0768: 2, L0794: 2, L0754: 2, L0759: 2, L0588: 2, H0624: 1, H0716: 1, T0049: 1, S0212: 1, |
| | | | | S0045: 1, S0278: 1, H0497: 1, L0021: 1, T0048: 1, L0471: 1, L0194: 1, H0644: 1, L0142: 1, H0269: 1, H0056: 1, H0059: 1, L0475: 1, S0422: 1, L0761: 1, L0646: 1, |
| | | | | L0806: 1, L0655: 1, L0789: 1, L0791: 1, H0144: 1, H0726: 1, H0547: 1, H0659: 1, H0214: 1, L0780: 1, L0757: 1, L0758: 1, L0362: 1, S0026: 1, H0665: 1, H0542: 1 |
| | | | | and H0543: 1. |
| 178 | HLYAC95 | 778075 | 188 | AR176: 19, AR182: 14, AR261: 10, AR192: 9, AR262: 9, AR191: 8, AR255: 7, AR296: 7, AR231: 7, AR201: 6, AR232: 6, AR234: 6, AR233: 6, AR228: 6, |
| | | | | AR183: 6, AR246: 6, AR229: 6, AR239: 6, AR200: 6, AR287: 5, AR207: 5, AR291: 5, AR260: 5, AR294: 5, AR245: 5, AR179: 5, AR243: 5, AR266: 5, AR177: 5, |
| | | | | AR168: 5, AR285: 5, AR162: 5, AR289: 5, AR185: 4, AR237: 4, AR161: 4, AR221: 4, AR236: 4, AR264: 4, AR274: 4, AR227: 4, AR215: 4, AR222: 4, AR223: 4, |
| | | | | AR309: 4, AR193: 4, AR290: 4, AR313: 3, AR196: 3, AR263: 3, AR174: 3, AR204: 3, AR293: 3, AR205: 3, AR189: 3, AR217: 3, AR282: 3, AR033: 3, AR257: 3, |
| | | | | AR288: 3, AR203: 3, AR312: 2, AR267: 2, AR275: 2, AR277: 2, AR216: 2, AR295: 2, AR311: 2, AR258: 2, AR316: 2, AR181: 2, AR225: 2, AR061: 2, AR214: 2, |
| | | | | AR240: 2, AR039: 2, AR299: 2, AR170: 2, AR252: 2, AR199: 2, AR238: 2, AR247: 2, AR256: 2, AR089: 2, AR224: 2, AR219: 2, AR096: 2, AR211: 2, AR060: 1, |
| | | | | AR188: 1, AR175: 1, AR300: 1, AR226: 1, AR173: 1, AR286: 1, AR269: 1, H0445: 1 |
| 179 | HMADK33 | 561941 | 189 | AR283: 32, AR096: 20, AR089: 18, AR218: 17, AR104: 17, AR277: 16, AR039: 16, AR316: 15, AR282: 15, AR055: 13, AR219: 13, AR060: 13, AR313: 13, |
| | | | | AR299: 12, AR252: 9, AR185: 8, AR240: 8, AR300: 8, AR253: 8, AR271: 7, AR245: 6, AR309: 6, AR215: 6, AR170: 6, AR198: 6, AR195: 5, AR169: 5, AR053: 5, |
| | | | | AR254: 5, AR311: 5, AR214: 5, AR264: 5, AR225: 5, AR223: 5, AR224: 5, AR197: 5, AR263: 5, AR266: 4, AR217: 4, AR312: 4, AR193: 4, AR308: 4, AR161: 4, |
| | | | | AR213: 4, AR162: 4, AR180: 4, AR212: 4, AR163: 4, AR216: 4, AR168: 4, AR291: 4, AR222: 4, AR295: 4, AR177: 4, AR183: 4, AR165: 4, AR275: 4, AR192: 4, |
| | | | | AR221: 4, AR235: 4, AR261: 4, AR269: 3, AR270: 3, AR176: 3, AR164: 3, AR210: 3, AR288: 3, AR172: 3, AR033: 3, AR205: 3, AR181: 3, AR246: 3, AR166: 3, |
| | | | | AR171: 3, AR175: 3, AR236: 3, AR296: 3, AR285: 3, AR188: 3, AR207: 3, AR247: 3, AR199: 3, AR201: 3, AR243: 3, AR267: 3, AR297: 3, AR293: 3, AR255: 3, |
| | | | | AR182: 3, AR294: 3, AR268: 2, AR286: 2, AR289: 2, AR257: 2, AR204: 2, AR287: 2, AR258: 2, AR230: 2, AR200: 2, AR173: 2, AR196: 2, AR238: 2, AR274: 2, |
| | | | | AR174: 2, AR262: 2, AR189: 2, AR228: 2, AR179: 2, AR211: 2, AR191: 2, AR231: 2, AR290: 2, AR203: 2, AR232: 2, AR229: 2, AR233: 2, AR190: 2, AR227: 2, |
| | | | | AR272: 2, AR234: 2, AR239: 2, AR178: 2, AR237: 2, AR061: 1, AR226: 1, AR260: 1, AR256: 1, L0438: 9, L0439: 9, L0776: 8, H0144: 7, L0741: 7, H0271: 6, |
| | | | | S0222: 5, L0769: 5, H0052: 4, L0770: 4, L0766: 4, L0659: 4, L0666: 4, L0759: 4, H0295: 3, S0360: 3, L0370: 3, L0510: 3, H0556: 2, S0007: 2, H0261: 2, L0021: 2, |
| | | | | H0046: 2, H0009: 2, S0051: 2, S0366: 2, H0059: 2, L0763: 2, L0784: 2, L0633: 2, L0783: 2, L0789: 2, L0790: 2, L0792: 2, L0743: 2, L0747: 2, L0749: 2, L0756: 2, |
| | | | | L0757: 2, L0758: 2, H0445: 2, L0588: 2, L0594: 2, L0366: 2, H0265: 1, S6024: 1, H0638: 1, S0376: 1, S0045: 1, H0550: 1, H0370: 1, H0587: 1, N0009: 1, H0013: 1, |
| | | | | S0280: 1, H0599: 1, S0010: 1, S0049: 1, H0545: 1, H0457: 1, H0569: 1, H0012: 1, H0373: 1, H0051: 1, H0510: 1, H0266: 1, H0179: 1, H0416: 1, H0328: 1, |
| | | | | S0036: 1, H0634: 1, H0087: 1, H0412: 1, L0351: 1, S0144: 1, L0638: 1, L0761: 1, L0646: 1, L0662: 1, L0767: 1, L0768: 1, L0388: 1, L0803: 1, L0774: 1, L0775: 1, |
| | | | | L0375: 1, L0651: 1, L0806: 1, L0515: 1, L0809: 1, S0428: 1, S0216: 1, H0699: 1, H0693: 1, H0684: 1, H0648: 1, H0710: 1, H0521: 1, H0696: 1, H0187: 1, H0436: 1, |
| | | | | S0028: 1, L0750: 1, L0779: 1, L0731: 1, S0260: 1, H0595: 1, L0599: 1, S0192: 1, S0276: 1, H0542: 1 and H0352: 1. |
| 180 | HMADS41 | 596831 | 190 | AR218: 19, AR219: 19, AR283: 12, AR096: 12, AR313: 11, AR316: 10, AR240: 10, AR300: 9, AR185: 9, AR055: 9, AR277: 9, AR039: 8, AR089: 8, AR282: 8, |
| | | | | AR060: 8, AR299: 7, AR104: 7, L0794: 4, L0375: 3, H0575: 2, L0800: 2, L0789: 2, H0556: 1, H0662: 1, S0418: 1, H0619: 1, H0549: 1, H0590: 1, H0052: 1, |
| | | | | H0083: 1, H0266: 1, H0286: 1, H0644: 1, S0036: 1, H0433: 1, H0412: 1, H0413: 1, T0042: 1, S0144: 1, S0142: 1, S0344: 1, L0770: 1, L0761: 1, L0774: 1, H0518: 1, |
| | | | | L0777: 1, L0758: 1 and H0665: 1. |
| 181 | HMAMI15 | 1352406 | 191 | AR060: 14, AR283: 13, AR055: 10, AR277: 9, AR282: 9, AR185: 9, AR104: 9, AR300: 8, AR096: 8, AR316: 8, AR299: 8, AR218: 7, AR219: 7, AR039: 7, |
| | | | | AR313: 6, AR240: 6, AR089: 6, H0624: 2, S0354: 2, S0442: 1, S0444: 1, S0278: 1, S0222: 1, H0586: 1, L0021: 1, H0036: 1, H0031: 1, L0769: 1, L0804: 1, |
| | | | | L0774: 1, H0658: 1, H0521: 1, S0406: 1, L0748: 1 and S0462: 1. |
| | HMAMI15 | 1049263 | 435 | |
| 182 | HMCFY13 | 635301 | 192 | AR176: 8, AR161: 6, AR162: 6, AR266: 6, AR181: 6, AR269: 6, AR163: 6, AR172: 6, AR228: 5, AR267: 5, AR233: 5, AR055: 5, AR268: 5, AR229: 5, AR165: 5, |
| | | | | AR309: 5, AR238: 4, AR183: 4, AR178: 4, AR164: 4, AR237: 4, AR215: 4, AR257: 4, AR182: 4, AR166: 4, AR168: 4, AR217: 4, AR236: 4, AR239: 4, AR261: 4, |
| | | | | AR180: 4, AR291: 4, AR222: 4, AR290: 4, AR270: 4, AR170: 4, AR177: 4, AR060: 4, AR240: 4, AR282: 4, AR247: 4, AR272: 4, AR275: 4, AR293: 4, AR288: 4, |
| | | | | AR171: 3, AR169: 3, AR255: 3, AR289: 3, AR179: 3, AR203: 3, AR175: 3, AR264: 3, AR231: 3, AR061: 3, AR225: 3, AR191: 3, AR294: 3, AR287: 3, AR230: 3, |
| | | | | AR223: 3, AR226: 3, AR173: 3, AR232: 3, AR234: 3, AR200: 3, AR214: 3, AR216: 3, AR221: 3, AR224: 3, AR196: 3, AR227: 3, AR104: 3, AR199: 3, AR285: 3, |
| | | | | AR262: 3, AR277: 2, AR311: 2, AR297: 2, AR300: 2, AR096: 2, AR190: 2, AR295: 2, AR174: 2, AR188: 2, AR316: 2, AR286: 2, AR312: 2, AR089: 2, AR263: 2, |
| | | | | AR189: 2, AR313: 2, AR258: 2, AR274: 2, AR053: 2, AR283: 2, AR299: 2, AR185: 1, AR296: 1, AR204: 1, AR260: 1, AR210: 1, AR039: 1, AR218: 1, L0800: 2, |
| | | | | H0550: 1, H0497: 1, S0344: 1, L0769: 1, L0789: 1 and L0749: 1. |
| 183 | HMDAB56 | 560676 | 193 | AR168: 4, AR161: 4, AR162: 4, AR212: 4, AR163: 4, AR223: 4, AR222: 4, AR216: 4, AR172: 4, AR264: 3, AR214: 3, AR282: 3, AR311: 3, AR170: 3, AR270: 3, |
| | | | | AR250: 3, AR277: 3, AR225: 3, AR299: 3, AR165: 3, AR313: 3, AR164: 3, AR171: 2, AR253: 2, AR096: 2, AR199: 2, AR201: 2, AR308: 2, AR221: 2, AR263: 2, |
| | | | | AR039: 2, AR312: 2, AR205: 2, AR196: 2, AR294: 2, AR213: 2, AR267: 2, AR217: 2, AR290: 2, AR274: 2, AR166: 2, AR291: 2, AR295: 2, AR089: 2, AR193: 2, |
| | | | | AR191: 1, AR316: 1, AR033: 1, AR240: 1, AR269: 1, AR215: 1, AR266: 1, AR224: 1, AR195: 1, AR293: 1, AR283: 1, AR183: 1, AR189: 1, AR262: 1, AR104: 1, |
| | | | | AR210: 1, AR247: 1, AR239: 1, AR268: 1, AR169: 1, L0809: 2, H0346: 1, H0271: 1, L0774: 1 and L0532: 1. |
| 184 | HMDAM24 | 514394 | 194 | AR313: 9, AR162: 9, AR161: 8, AR163: 8, AR235: 7, AR165: 6, AR164: 6, AR096: 5, AR166: 5, AR089: 5, AR264: 5, AR275: 4, AR196: 4, AR300: 4, AR282: 4, |
| | | | | AR193: 4, AR271: 4, AR173: 4, AR274: 4, AR261: 4, AR242: 4, AR247: 4, AR199: 3, AR240: 3, AR312: 3, AR257: 3, AR258: 3, AR263: 3, AR185: 3, AR172: 3, |
| | | | | AR175: 3, AR229: 3, AR181: 3, AR262: 3, AR053: 3, AR174: 3, AR272: 3, AR299: 3, AR308: 3, AR309: 3, AR236: 3, AR296: 3, AR316: 3, AR270: 3, AR311: 3, |
| | | | | AR200: 3, AR182: 3, AR191: 2, AR234: 2, AR277: 2, AR033: 2, AR217: 2, AR218: 2, AR104: 2, AR230: 2, AR060: 2, AR233: 2, AR293: 2, AR179: 2, AR291: 2, |
| | | | | AR212: 2, AR246: 2, AR243: 2, AR169: 2, AR295: 2, AR178: 2, AR297: 2, AR214: 2, AR188: 2, AR177: 2, AR195: 2, AR226: 2, AR203: 2, AR238: 2, AR268: 2, |
| | | | | AR189: 2, AR198: 2, AR266: 2, AR168: 2, AR183: 2, AR227: 2, AR269: 2, AR255: 2, AR237: 2, AR231: 2, AR176: 1, AR171: 1, AR061: 1, AR228: 1, AR239: 1, |
| | | | | AR267: 1, AR287: 1, AR201: 1, AR213: 1, AR285: 1, AR252: 1, AR283: 1, AR294: 1, AR289: 1, AR180: 1, AR286: 1, L0748: 9, L0754: 6, L0605: 6, H0031: 4, |
| | | | | S0126: 4, H0740: 3, S0046: 3, H0052: 2, S0422: 2, L0803: 2, L0666: 2, L0663: 2, S0330: 2, L0750: 2, H0686: 1, H0346: 1, S0420: 1, H0733: 1, H0619: 1, H0431: 1, |
| | | | | H0156: 1, H0575: 1, H0590: 1, H0581: 1, H0046: 1, H0123: 1, H0050: 1, H0373: 1, H0083: 1, H0266: 1, H0553: 1, H0628: 1, H0598: 1, S0036: 1, H0100: 1, |
| | | | | H0494: 1, H0561: 1, S0440: 1, L0662: 1, L0794: 1, L0381: 1, L0650: 1, L0776: 1, L0540: 1, L0791: 1, H0144: 1, S0328: 1, S0152: 1, H0696: 1, S0406: 1, S3014: 1, |
| | | | | H0752: 1, S0260: 1, S0436: 1, L0604: 1, L0593: 1, S0242: 1 and H0543: 1. |
| 185 | HMEAI48 | 1352290 | 195 | AR096: 11, AR270: 10, AR253: 10, AR243: 9, AR242: 8, AR213: 8, AR264: 7, AR263: 7, AR039: 7, AR250: 6, AR300: 6, AR309: 6, AR161: 6, AR162: 6, |
| | | | | AR313: 6, AR163: 5, AR268: 5, AR312: 5, AR173: 5, AR282: 5, AR275: 5, AR176: 4, AR166: 4, AR246: 4, AR212: 4, AR240: 4, AR165: 4, AR254: 4, AR164: 4, |
| | | | | AR089: 4, AR193: 4, AR195: 4, AR170: 4, AR311: 4, AR269: 4, AR308: 4, AR197: 3, AR247: 3, AR245: 3, AR299: 3, AR235: 3, AR252: 3, AR221: 3, AR316: 3, |
| | | | | AR266: 3, AR225: 3, AR053: 3, AR177: 3, AR214: 2, AR228: 2, AR201: 2, AR234: 2, AR060: 2, AR283: 2, AR267: 2, AR229: 2, AR272: 2, AR231: 2, AR198: 2, |
| | | | | AR104: 2, AR185: 2, AR174: 2, AR175: 2, AR237: 2, AR181: 2, AR055: 2, AR289: 2, AR207: 2, AR226: 2, AR179: 2, AR290: 2, AR239: 2, AR233: 2, AR257: 2, |
| | | | | AR217: 2, AR277: 1, AR261: 1, AR061: 1, AR238: 1, AR171: 1, AR223: 1, AR260: 1, H0266: 1 |
| | HMEAI48 | 709671 | 436 | |
| 186 | HMEED18 | 560775 | 196 | AR252: 37, AR186: 32, AR250: 28, AR169: 20, AR254: 19, AR207: 17, AR244: 17, AR195: 16, AR033: 15, AR284: 15, AR291: 15, AR214: 14, AR165: 14, |
| | | | | AR298: 14, AR264: 14, AR222: 14, AR181: 13, AR245: 13, AR164: 13, AR197: 13, AR246: 13, AR224: 13, AR168: 13, AR253: 13, AR308: 13, AR223: 12, |
| | | | | AR269: 12, AR285: 12, AR255: 12, AR263: 12, AR212: 12, AR172: 12, AR166: 12, AR274: 12, AR311: 12, AR162: 12, AR161: 12, AR163: 12, AR184: 12, |
| | | | | AR215: 11, AR192: 11, AR221: 11, AR052: 11, AR240: 11, AR104: 11, AR183: 11, AR171: 11, AR171: 11, AR174: 11, AR170: 11, AR176: 11, AR173: 11, AR193: 11, |
| | | | | AR206: 11, AR201: 11, AR053: 11, AR292: 10, AR288: 10, AR231: 10, AR237: 10, AR261: 10, AR235: 10, AR295: 10, AR273: 10, AR236: 10, AR293: 10, |
| | | | | AR312: 10, AR216: 10, AR205: 10, AR217: 10, AR178: 10, AR196: 10, AR213: 10, AR061: 10, AR270: 9, AR243: 9, AR290: 9, AR282: 9, AR191: 9, AR182: 9, |
| | | | | AR268: 9, AR188: 9, AR286: 9, AR267: 9, AR189: 9, AR238: 9, AR229: 9, AR177: 9, AR226: 9, AR294: 9, AR242: 9, AR289: 9, AR175: 8, AR299: 8, AR310: 8, |
| | | | | AR266: 8, AR199: 8, AR096: 8, AR247: 8, AR039: 8, AR297: 8, AR180: 8, AR227: 8, AR296: 8, AR271: 8, AR190: 8, AR313: 8, AR309: 8, AR194: 7, AR287: 7, |
| | | | | AR234: 7, AR185: 7, AR275: 7, AR248: 7, AR210: 7, AR200: 7, AR089: 7, AR277: 7, AR300: 7, AR316: 7, AR204: 7, AR272: 7, AR179: 7, AR251: 6, AR259: 6, |
| | | | | AR262: 6, AR211: 6, AR255: 6, AR241: 6, AR314: 6, AR055: 6, AR198: 6, AR256: 6, AR257: 6, AR258: 6, AR232: 6, AR203: 5, AR239: 5, AR233: 5, AR060: 5, |
| | | | | AR219: 5, AR218: 5, AR202: 5, AR249: 5, AR280: 5, AR260: 4, AR228: 4, AR283: 4, AR315: 4, AR230: 4, AR265: 2, L0439: 20, L0157: 8, L0794: 8, L0805: 6, |
| | | | | H0739: 5, L0731: 5, L0804: 4, S0222: 3, L0766: 3, L0438: 3, S0356: 2, H0741: 2, H0050: 2, S0144: 2, L0803: 2, L0655: 2, L0663: 2, L2654: 2, H0521: 2, H0522: 2, |
| | | | | L0749: 2, L0779: 2, L0777: 2, L0755: 2, L0759: 2, H0265: 1, S6024: 1, S0116: 1, S0444: 1, H0733: 1, S6026: 1, H0298: 1, H0592: 1, L0622: 1, H0486: 1, H0013: 1, |
| | | | | H0250: 1, H0635: 1, H0156: 1, S0474: 1, H0581: 1, H0046: 1, L0471: 1, H0012: 1, H0014: 1, H0373: 1, H0073: 1, H0266: 1, S0336: 1, H0039: 1, S0036: 1, |
| | | | | H0040: 1, H0634: 1, H0551: 1, H0561: 1, S0438: 1, S0440: 1, H0529: 1, L0769: 1, L0764: 1, L0662: 1, L0774: 1, L0775: 1, L0809: 1, L0790: 1, L0792: 1, L0666: 1, |
| | | | | L0664: 1, L0665: 1, L0709: 1, L2653: 1, H0144: 1, H0659: 1, H0658: 1, H0670: 1, S0378: 1, H0696: 1, H0555: 1, H0576: 1, S0028: 1, L0745: 1, L0747: 1, L0780: 1, |
| | | | | S0434: 1, S0436: 1 and H0668: 1. |
| 187 | HMEFT54 | 520307 | 197 | AR060: 7, AR055: 7, AR039: 6, AR282: 6, AR223: 5, AR196: 5, AR089: 5, AR104: 5, AR269: 5, AR176: 5, AR161: 5, AR162: 5, AR182: 5, AR240: 5, AR163: 5, |
| | | | | AR096: 5, AR231: 5, AR165: 5, AR299: 5, AR235: 5, AR207: 5, AR309: 5, AR204: 5, AR313: 4, AR243: 4, AR181: 4, AR246: 4, AR316: 4, AR164: 4, AR166: 4, |
| | | | | AR300: 4, AR277: 4, AR183: 4, AR170: 4, AR228: 4, AR185: 4, AR229: 4, AR255: 4, AR274: 4, AR221: 4, AR266: 4, AR283: 4, AR247: 4, AR290: 4, AR236: 4, |
| | | | | AR261: 4, AR294: 4, AR267: 3, AR192: 3, AR270: 3, AR178: 3, AR175: 3, AR169: 3, AR234: 3, AR179: 3, AR275: 3, AR262: 3, AR252: 3, AR199: 3, AR197: 3, |
| | | | | AR219: 3, AR253: 3, AR233: 3, AR061: 3, AR264: 3, AR271: 3, AR180: 3, AR173: 3, AR263: 3, AR295: 3, AR193: 3, AR177: 3, AR288: 3, AR237: 3, AR257: 3, |
| | | | | AR268: 3, AR195: 3, AR174: 3, AR286: 3, AR218: 3, AR191: 3, AR239: 3, AR171: 3, AR203: 3, AR250: 3, AR285: 3, AR287: 3, AR188: 3, AR216: 3, AR297: 3, |
| | | | | AR296: 3, AR189: 3, AR201: 3, AR214: 2, AR226: 2, AR291: 2, AR293: 2, AR232: 2, AR222: 2, AR200: 2, AR190: 2, AR258: 2, AR168: 2, AR227: 2, AR312: 2, |
| | | | | AR289: 2, AR308: 2, AR260: 2, AR230: 2, AR272: 1, AR210: 1, AR311: 1, AR242: 1, AR256: 1, AR033: 1, L0757: 3, L0662: 2, H0686: 1, S0444: 1, H0266: 1, |
| | | | | L0055: 1, L0763: 1, L0800: 1, L0764: 1, L0768: 1, L0805: 1, L0653: 1, L0666: 1, H0690: 1, H0672: 1, L0751: 1, L0777: 1 and L0758: 1. |
| 188 | HMEGF92 | 520304 | 198 | AR233: 16, AR178: 13, AR176: 13, AR261: 11, AR061: 11, AR257: 11, AR104: 11, AR228: 10, AR182: 10, AR196: 10, AR238: 10, AR299: 9, AR236: 9, |
| | | | | AR293: 8, AR239: 8, AR190: 8, AR231: 8, AR288: 8, AR232: 8, AR291: 8, AR161: 8, AR229: 8, AR162: 8, AR175: 8, AR163: 7, AR258: 7, AR269: 7, AR185: 7, |
| | | | | AR266: 7, AR033: 7, AR174: 7, AR164: 6, AR200: 6, AR191: 6, AR300: 6, AR250: 6, AR237: 6, AR234: 6, AR267: 6, AR287: 6, AR166: 6, AR165: 5, AR294: 5, |
| | | | | AR203: 5, AR286: 5, AR268: 5, AR262: 5, AR055: 5, AR247: 5, AR226: 5, AR285: 5, AR179: 5, AR295: 5, AR089: 5, AR230: 5, AR216: 5, AR316: 5, AR183: 5, |
| | | | | AR252: 5, AR297: 5, AR181: 5, AR060: 5, AR271: 5, AR168: 4, AR172: 4, AR193: 4, AR240: 4, AR264: 4, AR227: 4, AR180: 4, AR207: 4, AR309: 4, AR188: 4, |
| | | | | AR296: 4, AR177: 4, AR275: 4, AR289: 4, AR189: 4, AR255: 3, AR198: 3, AR235: 3, AR215: 3, AR260: 3, AR171: 3, AR246: 3, AR096: 3, AR313: 3, AR290: 3, |
| | | | | AR214: 3, AR221: 3, AR274: 2, AR039: 2, AR217: 2, AR197: 2, AR210: 2, AR204: 2, AR312: 2, AR213: 2, AR277: 2, AR272: 2, AR225: 2, AR199: 2, AR222: 2, |
| | | | | AR211: 2, AR053: 2, AR308: 2, AR311: 2, AR224: 2, AR173: 1, AR270: 1, AR282: 1, AR283: 1, AR201: 1, H0266: 1, L0438: 1 and L0439: 1. |
| 189 | HMSDL37 | 973996 | 199 | AR169: 5, AR282: 3, AR170: 3, AR225: 2, AR257: 2, AR224: 2, AR205: 2, AR171: 2, AR294: 2, AR217: 1, AR309: 1, AR168: 1, AR261: 1, AR173: 1, AR163: 1, |
| | | | | AR222: 1, AR178: 1, L0517: 2, S0050: 1, H0014: 1, H0510: 1, H0040: 1, H0264: 1, S0002: 1, S0374: 1 and L0758: 1. |
| | HMSDL37 | 895429 | 437 | |
| | HMSDL37 | 904241 | 438 | |
| | HMSDL37 | 750927 | 439 | |
| 190 | HMSF126 | 560229 | 200 | AR313: 11, AR039: 11, AR089: 8, AR096: 8, AR218: 8, AR176: 7, AR162: 7, AR219: 7, AR163: 7, AR161: 7, AR299: 6, AR165: 6, AR300: 6, AR221: 6, |
| | | | | AR180: 6, AR060: 6, AR164: 6, AR166: 6, AR207: 6, AR197: 6, AR178: 6, AR182: 6, AR175: 6, AR316: 6, AR181: 6, AR173: 6, AR055: 6, AR104: 5, AR266: 5, |
| | | | | AR247: 5, AR270: 5, AR204: 5, AR229: 5, AR185: 5, AR240: 5, AR183: 5, AR312: 5, AR177: 5, AR309: 5, AR196: 4, AR257: 4, AR297: 4, AR263: 4, AR243: 4, |
| | | | | AR277: 4, AR193: 4, AR293: 4, AR225: 4, AR269: 4, AR264: 4, AR179: 4, AR275: 4, AR282: 4, AR226: 4, AR261: 4, AR205: 4, AR242: 4, AR268: 4, AR294: 4, |
| | | | | AR291: 4, AR233: 4, AR267: 4, AR262: 4, AR296: 4, AR238: 3, AR234: 3, AR228: 3, AR289: 3, AR174: 3, AR199: 3, AR237: 3, AR231: 3, AR271: 3, AR195: 3, |
| | | | | AR258: 3, AR236: 3, AR245: 3, AR198: 3, AR215: 3, AR283: 3, AR227: 3, AR239: 3, AR212: 3, AR203: 3, AR170: 3, AR246: 3, AR286: 3, AR290: 3, AR285: 3, |
| | | | | AR230: 3, AR295: 3, AR053: 3, AR201: 3, AR191: 3, AR255: 2, AR308: 2, AR272: 2, AR168: 2, AR033: 2, AR287: 2, AR217: 2, AR188: 2, AR222: 2, AR200: 2, |
| | | | | AR061: 2, AR232: 2, AR189: 2, AR216: 2, AR288: 2, AR213: 2, AR274: 2, AR311: 2, AR171: 2, AR260: 2, AR190: 2, AR224: 2, AR210: 1, AR169: 1, S0002: 1 |
| 191 | HMSGT42 | 383470 | 201 | AR252: 134, AR188: 50, AR246: 49, AR218: 49, AR264: 47, AR250: 47, AR311: 46, AR309: 44, AR312: 43, AR308: 42, AR172: 42, AR263: 41, AR290: 40, |
| | | | | AR224: 39, AR191: 39, AR245: 38, AR210: 37, AR189: 36, AR221: 35, AR269: 35, AR190: 35, AR223: 34, AR205: 33, AR212: 33, AR253: 32, AR217: 32, |
| | | | | AR053: 31, AR225: 30, AR219: 30, AR171: 30, AR254: 29, AR271: 29, AR222: 28, AR275: 28, AR174: 28, AR096: 28, AR216: 28, AR173: 27, AR165: 26, |
| | | | | AR272: 26, AR211: 25, AR268: 25, AR270: 25, AR164: 25, AR213: 25, AR166: 24, AR196: 24, AR089: 24, AR170: 24, AR175: 24, AR169: 23, AR183: 23, |
| | | | | AR214: 23, AR199: 23, AR163: 22, AR313: 22, AR316: 21, AR267: 21, AR285: 20, AR060: 20, AR255: 20, AR240: 20, AR185: 20, AR161: 19, AR180: 19, |
| | | | | AR162: 19, AR197: 19, AR274: 19, AR295: 19, AR243: 19, AR291: 18, AR168: 18, AR195: 17, AR231: 17, AR201: 17, AR299: 17, AR182: 16, AR238: 16, |
| | | | | AR178: 16, AR288: 16, AR039: 16, AR181: 16, AR215: 16, AR193: 15, AR200: 14, AR176: 14, AR266: 14, AR179: 14, AR300: 14, AR033: 13, AR198: 13, |
| | | | | AR104: 13, AR296: 13, AR257: 13, AR236: 12, AR261: 12, AR258: 12, AR282: 12, AR242: 12, AR177: 12, AR203: 12, AR297: 11, AR256: 11, AR289: 11, |
| | | | | AR294: 11, AR192: 10, AR287: 10, AR286: 10, AR247: 10, AR293: 9, AR239: 9, AR235: 9, AR226: 9, AR262: 9, AR237: 9, AR260: 9, AR232: 9, AR234: 8, |
| | | | | AR233: 7, AR207: 7, AR277: 7, AR229: 6, AR204: 6, AR230: 5, AR228: 5, AR227: 5, AR283: 5, AR061: 3, AR055: 3, L0754: 14, L0752: 14, S0360: 11, |
| | | | | L0742: 10, L0758: 9, H0341: 8, H0551: 8, L0750: 8, H0046: 7, S0003: 7, L0749: 7, H0170: 6, S0354: 6, S0408: 6, L0483: 6, H0038: 6, L0771: 6, H0144: 6, |
| | | | | S0152: 6, L0439: 6, L0747: 6, H0543: 6, H0486: 5, S0440: 5, L0775: 5, S0374: 5, S0126: 5, S0380: 5, L0745: 5, H0013: 4, T0067: 4, S0002: 4, L0769: 4, L0662: 4, |
| | | | | L0774: 4, L0806: 4, L0664: 4, L0665: 4, L0740: 4, S0026: 4, S0192: 4, H0624: 3, H0657: 3, H0580: 3, H0581: 3, H0050: 3, H0039: 3, H0622: 3, H0031: 3, S0142: 3, |
| | | | | L0520: 3, L0646: 3, L0766: 3, L0518: 3, L0438: 3, H0547: 3, H0659: 3, L0731: 3, L0596: 3, S0116: 2, H0662: 2, H0638: 2, S0358: 2, S0376: 2, S0046: 2, H0393: 2, |
| | | | | H0431: 2, S0280: 2, H0156: 2, H0575: 2, H0327: 2, L0471: 2, H0620: 2, H0051: 2, H0083: 2, H0553: 2, H0644: 2, H0032: 2, H0090: 2, H0616: 2, T0042: 2, |
| | | | | S0438: 2, H0529: 2, L0761: 2, L0764: 2, L0649: 2, L0653: 2, L0776: 2, L0659: 2, L0666: 2, L0663: 2, H0520: 2, H0519: 2, H0658: 2, H0670: 2, H0660: 2, H0539: 2, |
| | | | | H0521: 2, H0522: 2, H0696: 2, S3012: 2, L0759: 2, S0031: 2, H0595: 2, S0434: 2, L0589: 2, L0605: 2, L0608: 2, L0604: 2, L0593: 2, L0601: 2, H0667: 2, S0194: 2, |
| | | | | H0171: 1, T0002: 1, H0220: 1, H0159: 1, S0342: 1, S0218: 1, H0650: 1, H0656: 1, H0669: 1, H0664: 1, L0481: 1, S0418: 1, S0356: 1, S0442: 1, H0637: 1, S0045: 1, |
| | | | | H0619: 1, H0437: 1, H0549: 1, S0222: 1, H0600: 1, H0586: 1, H0587: 1, H0574: 1, T0114: 1, H0427: 1, L0021: 1, H0599: 1, H0042: 1, H0590: 1, H0004: 1, |
| | | | | S0010: 1, S0346: 1, H0251: 1, H0545: 1, H0172: 1, H0012: 1, H0014: 1, H0373: 1, S0388: 1, H0275: 1, S0250: 1, S0214: 1, H0328: 1, H0615: 1, H0628: 1, |
| | | | | H0598: 1, H0591: 1, H0634: 1, H0264: 1, H0412: 1, H0413: 1, H0623: 1, H0059: 1, T0041: 1, H0560: 1, H0625: 1, H0366: 1, S0450: 1, H0130: 1, H0641: 1, |
| | | | | H0647: 1, H0649: 1, H0652: 1, S0144: 1, S0344: 1, S0422: 1, L0762: 1, L0763: 1, L0637: 1, L0772: 1, L0372: 1, L0768: 1, L0794: 1, L0387: 1, L0661: 1, L0629: 1, |
| | | | | L0788: 1, L0792: 1, H0593: 1, H0689: 1, H0711: 1, H0435: 1, H0666: 1, H0648: 1, H0672: 1, H0710: 1, H0518: 1, S0190: 1, H0694: 1, H0436: 1, S3014: 1, |
| | | | | S0028: 1, L0777: 1, L0780: 1, L0757: 1, H0444: 1, H0445: 1, H0343: 1, L0592: 1, H0665: 1, S0196: 1, H0542: 1, H0423: 1 and H0506: 1. |
| 192 | HMSHM14 | 461897 | 202 | AR055: 34, AR060: 32, AR089: 16, AR104: 16, AR283: 14, AR299: 13, AR172: 12, AR039: 12, AR096: 11, AR185: 11, AR282: 10, AR277: 10, AR316: 9, |
| | | | | AR300: 9, AR161: 7, AR162: 7, AR253: 7, AR163: 7, AR171: 7, AR236: 7, AR250: 6, AR312: 6, AR168: 6, AR235: 6, AR169: 6, AR264: 5, AR274: 5, AR245: 5, |
| | | | | AR195: 5, AR240: 5, AR197: 5, AR291: 5, AR218: 5, AR254: 5, AR313: 5, AR053: 5, AR246: 4, AR193: 4, AR275: 4, AR295: 4, AR308: 4, AR285: 4, AR272: 4, |
| | | | | AR198: 4, AR271: 4, AR212: 4, AR170: 4, AR191: 4, AR311: 4, AR201: 4, AR252: 4, AR269: 4, AR181: 4, AR225: 4, AR309: 4, AR204: 3, AR286: 3, AR033: 3, |
| | | | | AR178: 3, AR266: 3, AR222: 3, AR165: 3, AR175: 3, AR257: 3, AR180: 3, AR268: 3, AR221: 3, AR243: 3, AR196: 3, AR219: 3, AR176: 3, AR182: 3, AR189: 3, |
| | | | | AR190: 3, AR247: 3, AR261: 3, AR293: 3, AR188: 3, AR287: 3, AR173: 3, AR297: 3, AR258: 3, AR199: 3, AR177: 3, AR183: 3, AR223: 3, AR262: 3, AR289: 3, |
| | | | | AR174: 3, AR179: 3, AR232: 3, AR228: 3, AR224: 3, AR288: 2, AR294: 2, AR290: 2, AR233: 2, AR267: 2, AR255: 2, AR210: 2, AR270: 2, AR229: 2, AR296: 2, |
| | | | | AR213: 2, AR231: 2, AR238: 2, AR164: 2, AR200: 2, AR166: 2, AR239: 2, AR226: 2, AR237: 2, AR211: 2, AR217: 2, AR263: 2, AR203: 2, AR256: 2, AR227: 2, |
| | | | | AR061: 2, AR260: 2, AR205: 2, AR234: 1, AR215: 1, AR216: 1, S0002: 1 |
| 193 | HMSHS36 | 1127691 | 203 | AR039: 6, AR055: 5, AR218: 5, AR060: 5, AR300: 5, AR185: 4, AR313: 4, AR299: 4, AR240: 4, AR104: 3, AR316: 3, AR096: 3, AR282: 3, AR089: 3, AR283: 2, |
| | | | | AR277: 1, S0002: 1 |
| | HMSHS36 | 1028961 | 440 | |
| 194 | HMSKC04 | 799540 | 204 | AR313: 12, AR173: 10, AR161: 9, AR162: 9, AR163: 9, AR258: 7, AR196: 7, AR175: 7, AR257: 7, AR240: 7, AR247: 6, AR262: 6, AR264: 6, AR180: 6, |
| | | | | AR096: 6, AR179: 6, AR183: 6, AR185: 6, AR269: 6, AR176: 6, AR274: 6, AR234: 6, AR299: 5, AR191: 5, AR233: 5, AR229: 5, AR181: 5, AR293: 5, AR178: 5, |
| | | | | AR291: 5, AR300: 5, AR287: 5, AR270: 5, AR089: 5, AR275: 5, AR236: 5, AR255: 5, AR266: 5, AR218: 5, AR296: 4, AR199: 4, AR294: 4, AR231: 4, AR238: 4, |
| | | | | AR177: 4, AR182: 4, AR268: 4, AR297: 4, AR226: 4, AR260: 4, AR174: 4, AR219: 4, AR228: 4, AR261: 4, AR267: 4, AR203: 4, AR316: 4, AR200: 4, AR285: 4, |
| | | | | AR290: 4, AR288: 3, AR239: 3, AR215: 3, AR309: 3, AR189: 3, AR230: 3, AR286: 3, AR237: 3, AR172: 3, AR295: 3, AR190: 3, AR245: 3, AR033: 3, AR188: 3, |
| | | | | AR217: 3, AR053: 3, AR312: 3, AR311: 3, AR060: 3, AR272: 3, AR104: 2, AR165: 2, AR164: 2, AR250: 2, AR166: 2, AR282: 2, AR263: 2, AR227: 2, AR232: 2, |
| | | | | AR171: 2, AR243: 2, AR170: 2, AR289: 2, AR308: 2, AR039: 2, AR213: 2, AR061: 2, AR055: 2, AR210: 2, AR225: 2, AR256: 2, AR212: 1, AR235: 1, AR211: 1, |
| | | | | AR193: 1, AR216: 1, AR201: 1, AR205: 1, H0264: 2, S0002: 2, S0114: 1 and H0416: 1. |
| 195 | HMUAP70 | 872208 | 205 | AR104: 41, AR281: 39, AR194: 37, AR202: 37, AR283: 37, AR089: 36, AR246: 33, AR265: 33, AR315: 31, AR280: 31, AR244: 30, AR263: 30, AR096: 29, |
| | | | | AR205: 29, AR310: 28, AR282: 27, AR198: 27, AR274: 26, AR273: 25, AR314: 25, AR316: 25, AR060: 25, AR271: 25, AR206: 24, AR309: 24, AR243: 24, |
| | | | | AR219: 23, AR312: 23, AR241: 22, AR218: 22, AR213: 22, AR192: 21, AR299: 21, AR033: 20, AR313: 20, AR251: 20, AR053: 19, AR277: 19, AR247: 19, |
| | | | | AR204: 19, AR055: 18, AR039: 18, AR300: 18, AR240: 17, AR295: 17, AR232: 16, AR052: 16, AR185: 16, AR275: 15, AR183: 14, AR177: 13, AR229: 11, |
| | | | | AR238: 11, AR227: 10, AR226: 10, AR292: 10, AR256: 10, AR231: 10, AR175: 10, AR234: 10, AR186: 9, AR293: 9, AR248: 9, AR253: 9, AR237: 8, AR258: 8, |
| | | | | AR294: 8, AR249: 8, AR259: 8, AR061: 8, AR285: 7, AR266: 7, AR284: 7, AR233: 7, AR268: 6, AR286: 5, AR291: 5, AR289: 5, AR179: 5, AR267: 4, AR270: 4, |
| | | | | AR296: 4, AR298: 4, AR182: 4, AR269: 4, AR184: 3, AR290: 3, H0556: 4, H0013: 3, H0052: 3, H0090: 3, H0591: 3, S0010: 2, H0046: 2, S0214: 2, H0032: 2, |
| | | | | H0056: 2, H0529: 2, S0432: 2, H0171: 1, S0134: 1, S0212: 1, H0431: 1, H0587: 1, H0559: 1, T0039: 1, T0112: 1, H0575: 1, H0421: 1, S0049: 1, H0050: 1, H0012: 1, |
| | | | | H0510: 1, S6028: 1, H0181: 1, H0617: 1, S0036: 1, H0413: 1, H0623: 1, H0059: 1, S0386: 1, H0494: 1, S0126: 1, H0539: 1, H0543: 1 and H0423: 1. |
| | HMUAP70 | 723302 | 441 | |
| | HMUAP70 | 778820 | 442 | |
| | HMUAP70 | 674913 | 443 | |
| | HMUAP70 | 646810 | 444 | |
| | HMUAP70 | 381964 | 445 | |
| 196 | HMVBS81 | 639203 | 206 | AR215: 22, AR223: 21, AR214: 21, AR172: 20, AR225: 18, AR210: 16, AR170: 15, AR291: 14, AR199: 14, AR169: 14, AR224: 14, AR216: 14, AR171: 14, |
| | | | | AR222: 13, AR168: 13, AR211: 12, AR221: 11, AR165: 11, AR231: 11, AR164: 11, AR166: 11, AR219: 11, AR289: 10, AR217: 10, AR061: 10, AR266: 10, |
| | | | | AR235: 10, AR285: 10, AR283: 9, AR196: 9, AR218: 9, AR162: 9, AR243: 9, AR161: 9, AR261: 9, AR089: 9, AR163: 9, AR238: 8, AR255: 8, AR240: 8, |
| | | | | AR200: 8, AR297: 8, AR296: 8, AR254: 8, AR287: 8, AR269: 8, AR245: 8, AR295: 7, AR290: 7, AR039: 7, AR246: 7, AR316: 7, AR282: 7, AR257: 7, AR247: 7, |
| | | | | AR189: 7, AR226: 7, AR173: 7, AR188: 7, AR239: 7, AR183: 7, AR232: 7, AR180: 7, AR178: 7, AR256: 7, AR203: 6, AR250: 6, AR288: 6, AR267: 6, AR193: 6, |
| | | | | AR234: 6, AR268: 6, AR237: 6, AR182: 6, AR176: 6, AR229: 6, AR293: 6, AR262: 6, AR175: 6, AR270: 5, AR212: 5, AR177: 5, AR205: 5, AR258: 5, AR272: 5, |
| | | | | AR198: 5, AR236: 5, AR191: 5, AR185: 5, AR104: 5, AR312: 5, AR311: 5, AR174: 5, AR300: 5, AR060: 5, AR286: 5, AR195: 5, AR260: 5, AR233: 4, AR294: 4, |
| | | | | AR263: 4, AR190: 4, AR308: 4, AR228: 4, AR230: 4, AR299: 4, AR179: 4, AR277: 4, AR227: 4, AR271: 4, AR096: 4, AR213: 4, AR275: 4, AR055: 4, AR264: 4, |
| | | | | AR313: 4, AR201: 4, AR053: 4, AR197: 3, AR033: 3, AR181: 3, AR242: 3, AR253: 3, AR274: 3, AR207: 2, AR204: 2, AR309: 2, AR252: 2, AR192: 1, H0544: 4, |
| | | | | L0775: 3, L0748: 3, H0265: 2, H0046: 2, T0010: 2, H0424: 2, L0769: 2, L0771: 2, L0774: 2, L0659: 2, L0382: 2, H0696: 2, L0750: 2, L0755: 2, L0731: 2, L0757: 2, |
| | | | | L0758: 2, L0608: 2, H0685: 1, S0040: 1, S0114: 1, S0218: 1, L0785: 1, H0341: 1, S0212: 1, H0484: 1, H0662: 1, S0360: 1, H0411: 1, H0592: 1, L0623: 1, H0156: 1, |
| | | | | H0253: 1, H0263: 1, H0204: 1, H0150: 1, H0050: 1, H0012: 1, H0510: 1, H0606: 1, L0055: 1, S0364: 1, H0124: 1, H0163: 1, H0090: 1, H0087: 1, H0413: 1, |
| | | | | H0494: 1, H0509: 1, S0210: 1, L0770: 1, L0764: 1, L0773: 1, L0794: 1, L0766: 1, L0658: 1, L0666: 1, S0126: 1, S3012: 1, S3014: 1, L0745: 1, L0747: 1, L0777: 1, |
| | | | | S0031: 1, S0434: 1, L0605: 1, L0366: 1 and H0543: 1. |
| 197 | HMWDC28 | 460487 | 207 | AR245: 5, AR176: 5, AR198: 5, AR161: 5, AR162: 4, AR204: 4, AR163: 4, AR207: 4, AR271: 4, AR309: 4, AR266: 4, AR164: 4, AR165: 4, AR166: 4, AR181: 3, |
| | | | | AR221: 3, AR039: 3, AR252: 3, AR089: 3, AR254: 3, AR216: 3, AR182: 3, AR291: 3, AR177: 3, AR257: 3, AR224: 3, AR264: 3, AR312: 3, AR268: 3, AR238: 3, |
| | | | | AR275: 3, AR296: 3, AR178: 2, AR179: 2, AR228: 2, AR215: 2, AR267: 2, AR196: 2, AR229: 2, AR295: 2, AR311: 2, AR055: 2, AR233: 2, AR282: 2, AR096: 2, |
| | | | | AR270: 2, AR288: 2, AR269: 2, AR191: 2, AR246: 2, AR289: 2, AR053: 2, AR185: 2, AR300: 2, AR285: 2, AR286: 2, AR234: 2, AR236: 2, AR262: 2, AR316: 2, |
| | | | | AR174: 2, AR255: 2, AR231: 2, AR313: 2, AR060: 2, AR201: 2, AR294: 2, AR287: 2, AR237: 2, AR243: 2, AR212: 2, AR240: 2, AR226: 2, AR232: 2, AR290: 2, |
| | | | | AR283: 2, AR061: 2, AR261: 2, AR308: 2, AR168: 2, AR247: 2, AR203: 2, AR239: 2, AR253: 2, AR175: 2, AR277: 2, AR217: 2, AR293: 1, AR190: 1, AR272: 1, |
| | | | | AR193: 1, AR227: 1, AR297: 1, AR213: 1, AR230: 1, AR258: 1, AR188: 1, AR180: 1, AR033: 1, AR195: 1, AR199: 1, AR183: 1, AR211: 1, AR235: 1, H0341: 2, |
| | | | | L0803: 2, L0439: 2, L0747: 2, S0376: 1, S0360: 1, S0222: 1, H0674: 1, H0038: 1, L0655: 1, L0809: 1, L0666: 1, L0754: 1, L0756: 1, L0757: 1 and L0591: 1. |
| 198 | HMWFT65 | 562063 | 208 | AR176: 6, AR183: 6, AR313: 6, AR173: 6, AR269: 6, AR290: 6, AR180: 6, AR247: 5, AR189: 5, AR162: 5, AR191: 5, AR161: 5, AR163: 5, AR039: 5, AR266: 5, |
| | | | | AR274: 4, AR182: 4, AR055: 4, AR060: 4, AR165: 4, AR190: 4, AR263: 4, AR164: 4, AR270: 4, AR166: 4, AR264: 4, AR089: 4, AR267: 4, AR096: 4, AR175: 4, |
| | | | | AR181: 4, AR168: 3, AR255: 3, AR170: 3, AR257: 3, AR169: 3, AR179: 3, AR293: 3, AR196: 3, AR178: 3, AR217: 3, AR268: 3, AR275: 3, AR262: 3, AR291: 3, |
| | | | | AR233: 3, AR229: 3, AR240: 3, AR237: 3, AR238: 3, AR218: 3, AR185: 3, AR228: 3, AR294: 3, AR171: 3, AR250: 3, AR316: 3, AR300: 3, AR188: 3, AR104: 3, |
| | | | | AR174: 3, AR231: 3, AR296: 3, AR225: 3, AR224: 3, AR177: 3, AR261: 3, AR236: 3, AR061: 3, AR239: 3, AR226: 3, AR299: 3, AR285: 3, AR288: 3, AR277: 2, |
| | | | | AR198: 2, AR272: 2, AR193: 2, AR201: 2, AR221: 2, AR200: 2, AR287: 2, AR230: 2, AR203: 2, AR286: 2, AR232: 2, AR289: 2, AR227: 2, AR214: 2, AR199: 2, |
| | | | | AR295: 2, AR172: 2, AR297: 2, AR033: 2, AR282: 2, AR308: 2, AR219: 2, AR223: 2, AR258: 2, AR283: 2, AR271: 2, AR311: 1, AR260: 1, AR216: 1, AR234: 1, |
| | | | | AR312: 1, AR245: 1, AR211: 1, AR212: 1, AR235: 1, AR195: 1, H0341: 1 |
| 199 | HMWGY65 | 1308287 | 209 | AR252: 173, AR197: 148, AR254: 148, AR178: 122, AR242: 117, AR195: 115, AR230: 108, AR198: 97, AR170: 89, AR180: 88, AR207: 86, AR204: 86, |
| | | | | AR171: 82, AR297: 78, AR250: 78, AR257: 76, AR260: 75, AR181: 75, AR228: 73, AR261: 71, AR176: 70, AR233: 69, AR245: 67, AR272: 67, AR203: 67, |
| | | | | AR235: 65, AR200: 64, AR255: 62, AR296: 62, AR239: 62, AR287: 59, AR201: 58, AR234: 57, AR258: 57, AR243: 57, AR293: 56, AR168: 56, AR193: 56, |
| | | | | AR288: 54, AR262: 53, AR192: 52, AR253: 52, AR266: 52, AR165: 51, AR308: 49, AR172: 48, AR169: 48, AR179: 48, AR162: 47, AR289: 47, AR174: 46, |
| | | | | AR164: 44, AR182: 44, AR033: 44, AR256: 44, AR161: 43, AR236: 43, AR191: 43, AR188: 43, AR212: 43, AR166: 43, AR173: 41, AR227: 41, AR185: 41, |
| | | | | AR053: 40, AR237: 40, AR163: 40, AR275: 38, AR229: 36, AR300: 35, AR294: 35, AR210: 33, AR267: 32, AR295: 32, AR190: 32, AR286: 31, AR189: 31, |
| | | | | AR199: 31, AR269: 31, AR225: 31, AR183: 30, AR285: 30, AR226: 27, AR231: 27, AR291: 27, AR232: 26, AR175: 26, AR061: 25, AR271: 25, AR246: 25, |
| | | | | AR104: 25, AR282: 24, AR213: 24, AR211: 24, AR238: 23, AR205: 23, AR177: 22, AR316: 22, AR060: 22, AR270: 22, AR274: 21, AR196: 21, AR264: 21, |
| | | | | AR247: 20, AR055: 19, AR290: 19, AR313: 18, AR299: 18, AR283: 18, AR268: 17, AR277: 17, AR089: 16, AR039: 16, AR240: 15, AR217: 14, AR224: 13, |
| | | | | AR221: 13, AR218: 13, AR263: 12, AR312: 12, AR216: 12, AR309: 11, AR311: 11, AR219: 10, AR096: 10, AR223: 6, AR222: 6, AR284: 5, AR214: 4, AR184: 4, |
| | | | | AR215: 4, AR310: 3, AR265: 3, AR259: 3, AR298: 2, AR292: 2, AR052: 2, AR186: 2, AR206: 1, AR273: 1, H0251: 6, L0803: 4, L0439: 4, L0794: 3, L0659: 3, |
| | | | | S0206: 3, L0749: 3, H0624: 2, H0713: 2, H0341: 2, H0599: 2, H0575: 2, H0050: 2, H0328: 2, H0413: 2, L0805: 2, L0776: 2, H0716: 1, H0662: 1, S0356: 1, |
| | | | | S0360: 1, H0733: 1, H0208: 1, H0586: 1, H0333: 1, H0486: 1, H0618: 1, H0318: 1, H0123: 1, L0471: 1, H0024: 1, T0006: 1, H0644: 1, S0210: 1, L0769: 1, |
| | | | | L0638: 1, L0648: 1, L0662: 1, L0804: 1, L0375: 1, L0806: 1, L0783: 1, L0809: 1, L5622: 1, L0789: 1, L0790: 1, H0689: 1, H0539: 1, H0789: 1, S3014: 1, L0744: 1, |
| | | | | L0751: 1, L0777: 1, L0731: 1, H0445: 1 and L2174: 1. |
| | HMWGY65 | 794987 | 446 | |
| 200 | HNEAC05 | 519340 | 210 | AR176: 8, AR224: 6, AR266: 6, AR171: 6, AR223: 6, AR162: 5, AR161: 5, AR181: 5, AR182: 5, AR178: 5, AR163: 5, AR267: 5, AR228: 5, AR055: 5, AR269: 5, |
| | | | | AR235: 5, AR238: 5, AR233: 5, AR309: 4, AR236: 4, AR268: 4, AR239: 4, AR270: 4, AR183: 4, AR290: 4, AR261: 4, AR214: 4, AR053: 4, AR255: 4, AR218: 4, |
| | | | | AR257: 4, AR060: 4, AR229: 4, AR180: 4, AR237: 4, AR177: 4, AR263: 4, AR226: 4, AR288: 4, AR179: 4, AR061: 3, AR169: 3, AR287: 3, AR222: 3, AR240: 3, |
| | | | | AR190: 3, AR173: 3, AR168: 3, AR264: 3, AR175: 3, AR262: 3, AR231: 3, AR293: 3, AR170: 3, AR230: 3, AR291: 3, AR289: 3, AR275: 3, AR172: 3, AR300: 3, |
| | | | | AR234: 3, AR227: 3, AR216: 3, AR272: 3, AR282: 3, AR033: 3, AR217: 3, AR316: 3, AR096: 3, AR165: 3, AR286: 3, AR213: 3, AR185: 3, AR225: 3, AR191: 3, |
| | | | | AR252: 3, AR174: 3, AR247: 3, AR164: 3, AR308: 3, AR188: 3, AR219: 3, AR295: 3, AR166: 3, AR311: 3, AR285: 2, AR089: 2, AR232: 2, AR297: 2, AR313: 2, |
| | | | | AR104: 2, AR312: 2, AR283: 2, AR199: 2, AR294: 2, AR189: 2, AR203: 2, AR299: 2, AR196: 2, AR200: 2, AR274: 2, AR277: 2, AR212: 2, AR246: 2, AR211: 2, |
| | | | | AR258: 2, AR260: 2, AR256: 2, AR039: 2, AR296: 2, H0179: 1 |
| 201 | HNEEB45 | 1036397 | 211 | H0179: 1 and H0100: 1. |
| | HNEEB45 | 842650 | 447 | |
| 202 | HNEEE24 | 553558 | 212 | AR161: 8, AR162: 8, AR163: 8, AR055: 6, AR165: 5, AR166: 5, AR164: 5, AR060: 5, AR172: 5, AR313: 4, AR169: 4, AR053: 4, AR269: 4, AR275: 4, AR089: 4, |
| | | | | AR242: 4, AR263: 4, AR176: 4, AR264: 4, AR192: 4, AR240: 3, AR182: 3, AR205: 3, AR039: 3, AR235: 3, AR096: 3, AR212: 3, AR257: 3, AR268: 3, AR282: 3, |
| | | | | AR195: 3, AR270: 3, AR104: 3, AR200: 3, AR197: 3, AR228: 3, AR185: 3, AR173: 3, AR316: 3, AR299: 3, AR233: 3, AR236: 3, AR189: 3, AR191: 3, AR283: 3, |
| | | | | AR311: 3, AR300: 2, AR309: 2, AR267: 2, AR255: 2, AR229: 2, AR225: 2, AR245: 2, AR290: 2, AR295: 2, AR193: 2, AR308: 2, AR312: 2, AR277: 2, AR266: 2, |
| | | | | AR237: 2, AR221: 2, AR199: 2, AR274: 2, AR238: 2, AR224: 2, AR262: 2, AR213: 2, AR181: 2, AR216: 2, AR180: 2, AR218: 2, AR261: 2, AR061: 2, AR247: 2, |
| | | | | AR289: 2, AR178: 2, AR287: 2, AR175: 2, AR293: 2, AR297: 2, AR177: 2, AR190: 2, AR285: 2, AR226: 2, AR231: 2, AR219: 2, AR183: 2, AR179: 2, AR239: 2, |
| | | | | AR196: 2, AR291: 2, AR217: 2, AR201: 2, AR288: 2, AR227: 1, AR272: 1, AR258: 1, AR294: 1, AR296: 1, AR232: 1, AR214: 1, AR260: 1, AR168: 1, AR174: 1, |
| | | | | AR171: 1, L0747: 2, L0758: 2, H0580: 1 and H0179: 1. |
| 203 | HNFFC43 | 753337 | 213 | AR273: 25, AR052: 20, AR274: 13, AR218: 10, AR241: 9, AR248: 9, AR277: 8, AR265: 8, AR186: 8, AR249: 8, AR312: 8, AR271: 8, AR313: 8, AR309: 7, |
| | | | | AR183: 7, AR253: 7, AR299: 7, AR244: 6, AR251: 6, AR292: 6, AR219: 6, AR175: 6, AR310: 6, AR096: 5, AR213: 5, AR185: 5, AR053: 5, AR275: 5, AR202: 5, |
| | | | | AR282: 5, AR039: 4, AR269: 4, AR270: 4, AR206: 4, AR055: 4, AR177: 4, AR225: 4, AR089: 4, AR060: 4, AR192: 4, AR293: 4, AR243: 4, AR280: 4, AR247: 4, |
| | | | | AR300: 4, AR104: 4, AR033: 4, AR240: 4, AR061: 3, AR204: 3, AR217: 3, AR246: 3, AR316: 3, AR268: 3, AR165: 3, AR180: 3, AR198: 3, AR315: 3, AR164: 3, |
| | | | | AR166: 3, AR184: 3, AR205: 3, AR264: 3, AR294: 3, AR314: 3, AR284: 3, AR290: 3, AR295: 2, AR168: 2, AR259: 2, AR267: 2, AR256: 2, AR179: 2, AR161: 2, |
| | | | | AR221: 2, AR257: 2, AR163: 2, AR162: 2, AR170: 2, AR291: 2, AR200: 2, AR236: 2, AR262: 2, AR193: 2, AR283: 2, AR174: 2, AR197: 2, AR298: 2, AR233: 1, |
| | | | | AR181: 1, AR222: 1, AR287: 1, AR258: 1, AR195: 1, AR194: 1, AR229: 1, AR196: 1, AR182: 1, AR173: 1, AR234: 1, AR239: 1, AR235: 1, AR230: 1, AR216: 1 |
| | | | | H0521: 6, H0036: 2, H0052: 2, H0271: 2, H0551: 2, H0543: 2, H0265: 1, H0556: 1, S0354: 1, H0392: 1, H0581: 1, H0063: 1, H0059: 1, H0494: 1, H0561: 1, |
| | | | | L3829: 1, H0520: 1, H0522: 1, S0436: 1, L0595: 1, H0506: 1 and L0600: 1. |
| 204 | HNFIY77 | 634551 | 214 | AR241: 9, AR313: 8, AR194: 8, AR186: 7, AR192: 7, AR242: 7, AR202: 7, AR206: 7, AR161: 7, AR162: 7, AR163: 6, AR204: 6, AR246: 6, AR229: 6, AR165: 6, |
| | | | | AR238: 6, AR164: 6, AR166: 5, AR271: 5, AR198: 5, AR251: 5, AR089: 5, AR207: 5, AR197: 5, AR052: 5, AR309: 5, AR312: 5, AR274: 5, AR243: 5, AR061: 4, |
| | | | | AR185: 4, AR292: 4, AR177: 4, AR298: 4, AR245: 4, AR226: 4, AR273: 4, AR240: 4, AR053: 4, AR225: 4, AR286: 4, AR233: 4, AR272: 4, AR300: 4, AR096: 4, |
| | | | | AR293: 4, AR247: 4, AR264: 4, AR205: 4, AR039: 4, AR234: 4, AR275: 3, AR237: 3, AR231: 3, AR195: 3, AR253: 3, AR060: 3, AR228: 3, AR201: 3, AR182: 3, |
| | | | | AR284: 3, AR282: 3, AR174: 3, AR227: 3, AR269: 3, AR193: 3, AR199: 3, AR289: 3, AR033: 3, AR294: 3, AR239: 3, AR285: 3, AR290: 3, AR184: 3, AR270: 3, |
| | | | | AR265: 3, AR308: 3, AR181: 3, AR248: 3, AR232: 3, AR296: 3, AR291: 3, AR299: 3, AR297: 3, AR252: 3, AR259: 3, AR277: 3, AR310: 2, AR263: 2, AR230: 2, |
| | | | | AR258: 2, AR288: 2, AR224: 2, AR257: 2, AR295: 2, AR203: 2, AR213: 2, AR179: 2, AR055: 2, AR268: 2, AR104: 2, AR200: 2, AR316: 2, AR255: 2, AR212: 2, |
| | | | | AR267: 2, AR215: 2, AR266: 2, AR183: 2, AR173: 2, AR175: 2, AR191: 2, AR287: 2, AR217: 2, AR222: 2, AR172: 2, AR196: 2, AR281: 1, AR189: 1, AR283: 1, |
| | | | | AR218: 1, AR219: 1, AR214: 1, AR256: 1, AR262: 1, AR216: 1, AR210: 1, L0539: 1, S0442: 1, H0619: 1, H0581: 1, T0010: 1, H0416: 1, H0622: 1, H0131: 1, |
| | | | | H0521: 1 and H0653: 1. |
| 205 | HNFJF07 | 577013 | 215 | AR104: 20, AR055: 15, AR060: 14, AR229: 13, AR283: 12, AR039: 11, AR313: 10, AR089: 10, AR096: 9, AR316: 9, AR161: 8, AR162: 8, AR299: 8, AR163: 8, |
| | | | | AR165: 7, AR282: 7, AR164: 7, AR166: 7, AR185: 6, AR240: 6, AR300: 6, AR274: 6, AR219: 5, AR053: 5, AR277: 5, AR263: 5, AR309: 5, AR275: 5, AR172: 5, |
| | | | | AR181: 4, AR250: 4, AR257: 4, AR236: 4, AR177: 4, AR218: 4, AR261: 4, AR228: 4, AR171: 4, AR266: 4, AR183: 4, AR178: 4, AR238: 4, AR264: 4, AR225: 4, |
| | | | | AR235: 4, AR255: 3, AR215: 3, AR293: 3, AR286: 3, AR233: 3, AR179: 3, AR222: 3, AR234: 3, AR262: 3, AR237: 3, AR247: 3, AR182: 3, AR287: 3, AR168: 3, |
| | | | | AR272: 3, AR294: 3, AR288: 3, AR170: 3, AR196: 3, AR174: 3, AR269: 3, AR175: 3, AR297: 3, AR268: 3, AR226: 3, AR223: 3, AR201: 3, AR311: 3, AR239: 3, |
| | | | | AR290: 3, AR200: 3, AR231: 3, AR308: 2, AR195: 2, AR199: 2, AR061: 2, AR227: 2, AR216: 2, AR285: 2, AR312: 2, AR296: 2, AR271: 2, AR232: 2, AR180: 2, |
| | | | | AR270: 2, AR291: 2, AR258: 2, AR230: 2, AR191: 2, AR289: 2, AR224: 1, AR246: 1, AR295: 1, AR188: 1, AR193: 1, AR217: 1, AR242: 1, AR214: 1, H0271: 2, |
| | | | | H0581: 1, H0051: 1, H0163: 1, L0599: 1 and H0422: 1. |
| 206 | HNGAK47 | 561488 | 216 | AR250: 13, AR176: 5, AR235: 5, AR204: 5, AR266: 4, AR267: 4, AR309: 4, AR162: 4, AR161: 4, AR163: 3, AR253: 3, AR228: 3, AR274: 3, AR261: 3, AR254: 3, |
| | | | | AR268: 3, AR237: 3, AR181: 3, AR239: 3, AR233: 3, AR282: 3, AR262: 3, AR229: 3, AR289: 3, AR247: 3, AR236: 3, AR238: 3, AR224: 2, AR183: 2, AR255: 2, |
| | | | | AR178: 2, AR214: 2, AR182: 2, AR257: 2, AR221: 2, AR245: 2, AR053: 2, AR226: 2, AR225: 2, AR313: 2, AR271: 2, AR234: 2, AR179: 2, AR223: 2, AR231: 2, |
| | | | | AR232: 2, AR269: 2, AR061: 2, AR270: 2, AR227: 2, AR240: 2, AR217: 2, AR205: 2, AR175: 2, AR033: 2, AR200: 2, AR165: 2, AR312: 2, AR264: 2, AR272: 2, |
| | | | | AR164: 2, AR283: 2, AR222: 2, AR197: 1, AR188: 1, AR177: 1, AR172: 1, AR287: 1, AR055: 1, AR290: 1, AR190: 1, AR193: 1, AR212: 1, AR299: 1, AR060: 1, |
| | | | | AR201: 1, AR180: 1, AR286: 1, AR293: 1, AR294: 1, AR316: 1, AR213: 1, AR210: 1, AR295: 1, H0271: 1 and S0052: 1. |
| 207 | HNGBC07 | 1037631 | 217 | AR060: 4, AR264: 3, AR055: 3, AR309: 3, AR225: 3, AR235: 3, AR283: 3, AR162: 3, AR282: 3, AR165: 3, AR166: 3, AR181: 3, AR161: 2, AR176: 2, AR163: 2, |
| | | | | AR236: 2, AR185: 2, AR205: 2, AR089: 2, AR196: 2, AR295: 2, AR216: 2, AR164: 2, AR104: 2, AR178: 2, AR257: 2, AR213: 2, AR299: 2, AR217: 2, AR308: 2, |
| | | | | AR053: 2, AR174: 2, AR291: 2, AR247: 2, AR096: 2, AR177: 2, AR277: 2, AR312: 2, AR240: 2, AR311: 2, AR171: 2, AR201: 2, AR316: 2, AR286: 2, AR193: 2, |
| | | | | AR215: 2, AR242: 2, AR271: 2, AR204: 2, AR287: 2, AR296: 2, AR223: 2, AR269: 2, AR289: 2, AR190: 2, AR261: 2, AR272: 2, AR262: 2, AR300: 2, AR033: 2, |
| | | | | AR212: 2, AR191: 2, AR233: 2, AR293: 2, AR218: 2, AR182: 1, AR221: 1, AR061: 1, AR228: 1, AR179: 1, AR039: 1, AR229: 1, AR263: 1, AR268: 1, AR172: 1, |
| | | | | AR227: 1, AR274: 1, AR245: 1, AR246: 1, AR270: 1, AR254: 1, AR222: 1, AR231: 1, AR175: 1, AR313: 1, AR195: 1, AR234: 1, AR230: 1, AR285: 1, AR267: 1, |
| | | | | AR224: 1, AR203: 1, AR297: 1, AR214: 1, AR290: 1, AR243: 1, AR173: 1, AR189: 1, S0052: 2 |
| | HNGBC07 | 904311 | 448 | |
| | HNGBC07 | 904812 | 449 | |
| 208 | HNGDG40 | 532617 | 218 | AR192: 7, AR169: 4, AR188: 4, AR180: 3, AR253: 3, AR274: 3, AR230: 3, AR176: 2, AR171: 2, AR224: 2, AR252: 2, AR207: 2, AR257: 2, AR282: 2, AR168: 2, |
| | | | | AR172: 2, AR277: 2, AR177: 2, AR297: 2, AR266: 2, AR243: 2, AR237: 2, AR233: 1, AR161: 1, AR300: 1, AR228: 1, AR175: 1, AR195: 1, AR162: 1, AR163: 1, |
| | | | | AR239: 1, AR285: 1, AR311: 1, AR269: 1, AR181: 1, AR231: 1, AR166: 1, AR215: 1, AR291: 1, AR255: 1, S0052: 1 |
| 209 | HNGEP09 | 499076 | 219 | AR221: 6, AR223: 3, AR264: 3, AR168: 3, AR170: 3, AR282: 3, AR172: 2, AR252: 2, AR197: 2, AR245: 2, AR300: 2, AR217: 2, AR176: 2, AR183: 2, AR311: 2, |
| | | | | AR225: 1, AR215: 1, AR096: 1, AR224: 1, AR240: 1, AR291: 1, AR188: 1, AR309: 1, AR089: 1, AR277: 1, AR181: 1, AR283: 1, AR171: 1, S0052: 2 |
| 210 | HNGFR31 | 553552 | 220 | AR060: 6, AR252: 6, AR055: 6, AR053: 5, AR161: 4, AR162: 4, AR254: 4, AR163: 4, AR309: 4, AR089: 4, AR235: 3, AR236: 3, AR104: 3, AR283: 3, AR165: 3, |
| | | | | AR216: 3, AR164: 3, AR300: 3, AR166: 3, AR181: 3, AR185: 3, AR177: 3, AR228: 3, AR263: 3, AR299: 3, AR183: 3, AR267: 3, AR039: 3, AR182: 3, AR176: 2, |
| | | | | AR197: 2, AR240: 2, AR201: 2, AR277: 2, AR289: 2, AR291: 2, AR282: 2, AR266: 2, AR293: 2, AR316: 2, AR255: 2, AR096: 2, AR238: 2, AR180: 2, AR257: 2, |
| | | | | AR175: 2, AR218: 2, AR233: 2, AR215: 2, AR285: 2, AR264: 2, AR231: 2, AR239: 2, AR274: 2, AR229: 2, AR207: 2, AR262: 2, AR179: 2, AR286: 2, AR173: 2, |
| | | | | AR288: 2, AR188: 2, AR198: 2, AR214: 2, AR192: 2, AR287: 2, AR190: 2, AR261: 2, AR237: 2, AR211: 2, AR297: 2, AR313: 2, AR178: 2, AR200: 2, AR247: 2, |
| | | | | AR227: 2, AR270: 2, AR203: 2, AR269: 2, AR226: 2, AR290: 2, AR191: 2, AR212: 1, AR219: 1, AR268: 1, AR271: 1, AR275: 1, AR272: 1, AR189: 1, AR168: 1, |
| | | | | AR294: 1, AR312: 1, AR174: 1, AR224: 1, AR234: 1, AR061: 1, AR193: 1, AR213: 1, AR258: 1, AR311: 1, AR222: 1, S0052: 1 |
| 211 | HNGIJ31 | 519120 | 221 | AR231: 7, AR039: 6, AR221: 5, AR313: 4, AR096: 4, AR180: 4, AR055: 4, AR060: 4, AR104: 4, AR161: 4, AR162: 4, AR163: 4, AR275: 4, AR183: 4, AR089: 3, |
| | | | | AR205: 3, AR300: 3, AR272: 3, AR246: 3, AR274: 3, AR225: 3, AR269: 3, AR181: 3, AR299: 3, AR165: 3, AR164: 3, AR166: 3, AR175: 3, AR173: 3, AR191: 3, |
| | | | | AR198: 3, AR277: 3, AR185: 3, AR270: 3, AR182: 3, AR240: 3, AR033: 3, AR316: 3, AR176: 2, AR267: 2, AR261: 2, AR204: 2, AR266: 2, AR257: 2, AR291: 2, |
| | | | | AR216: 2, AR218: 2, AR264: 2, AR214: 2, AR219: 2, AR222: 2, AR224: 2, AR195: 2, AR189: 2, AR190: 2, AR201: 2, AR283: 2, AR288: 2, AR196: 2, AR309: 2, |
| | | | | AR179: 2, AR285: 2, AR271: 2, AR290: 2, AR263: 2, AR296: 2, AR282: 2, AR172: 2, AR178: 2, AR293: 2, AR193: 2, AR226: 2, AR233: 1, AR199: 1, AR312: 1, |
| | | | | AR234: 1, AR228: 1, AR247: 1, AR230: 1, AR061: 1, AR255: 1, AR188: 1, AR238: 1, AR287: 1, AR268: 1, AR236: 1, AR217: 1, AR258: 1, AR262: 1, AR174: 1, |
| | | | | AR295: 1, AR192: 1 |
| 212 | HNGJE50 | 561568 | 222 | AR039: 15, AR313: 14, AR161: 14, AR162: 14, AR163: 13, AR165: 12, AR166: 11, AR164: 11, AR089: 11, AR096: 10, AR178: 9, AR229: 9, AR299: 8, |
| | | | | AR300: 8, AR198: 8, AR060: 7, AR185: 7, AR245: 7, AR271: 7, AR182: 7, AR176: 7, AR053: 7, AR180: 7, AR316: 7, AR247: 7, AR240: 6, AR173: 6, AR274: 6, |
| | | | | AR055: 6, AR266: 6, AR181: 6, AR257: 6, AR175: 6, AR179: 6, AR183: 6, AR233: 6, AR252: 6, AR239: 6, AR204: 6, AR282: 6, AR177: 6, AR104: 5, AR174: 5, |
| | | | | AR277: 5, AR309: 5, AR264: 5, AR269: 5, AR228: 5, AR243: 5, AR197: 5, AR207: 5, AR312: 5, AR226: 5, AR275: 5, AR192: 5, AR219: 5, AR196: 5, AR270: 5, |
| | | | | AR212: 5, AR293: 5, AR237: 5, AR238: 5, AR253: 5, AR236: 5, AR218: 4, AR268: 4, AR262: 4, AR261: 4, AR267: 4, AR234: 4, AR246: 4, AR201: 4, AR283: 4, |
| | | | | AR258: 4, AR191: 4, AR296: 4, AR171: 4, AR254: 4, AR213: 4, AR272: 4, AR230: 4, AR308: 4, AR255: 4, AR231: 4, AR235: 4, AR289: 3, AR199: 3, AR061: 3, |
| | | | | AR291: 3, AR297: 3, AR286: 3, AR288: 3, AR205: 3, AR222: 3, AR263: 3, AR227: 3, AR193: 3, AR200: 3, AR214: 3, AR290: 3, AR033: 3, AR294: 3, AR203: 3, |
| | | | | AR256: 2, AR295: 2, AR285: 2, AR232: 2, AR287: 2, AR189: 2, AR195: 2, AR224: 2, AR225: 2, AR216: 2, AR188: 2, AR311: 2, AR260: 2, AR190: 2, AR242: 2, |
| | | | | AR210: 1, AR172: 1, AR170: 1, AR211: 1, S0052: 1 |
| 213 | HNGJT54 | 498272 | 223 | AR183: 5, AR266: 5, AR214: 4, AR161: 4, AR162: 4, AR267: 4, AR192: 4, AR269: 4, AR163: 4, AR282: 4, AR181: 4, AR236: 4, AR228: 4, AR182: 3, AR233: 3, |
| | | | | AR221: 3, AR309: 3, AR257: 3, AR177: 3, AR288: 3, AR291: 3, AR178: 3, AR180: 3, AR169: 3, AR173: 3, AR176: 3, AR229: 3, AR231: 3, AR294: 3, AR238: 3, |
| | | | | AR168: 3, AR270: 3, AR289: 3, AR293: 3, AR237: 3, AR255: 3, AR171: 3, AR262: 3, AR217: 3, AR230: 3, AR287: 3, AR261: 3, AR224: 3, AR268: 2, AR300: 2, |
| | | | | AR216: 2, AR239: 2, AR207: 2, AR286: 2, AR053: 2, AR190: 2, AR285: 2, AR191: 2, AR290: 2, AR232: 2, AR179: 2, AR225: 2, AR234: 2, AR295: 2, AR196: 2, |
| | | | | AR226: 2, AR055: 2, AR316: 2, AR235: 2, AR258: 2, AR061: 2, AR227: 2, AR175: 2, AR089: 2, AR174: 2, AR297: 2, AR200: 2, AR3111: 2, AR247: 2, AR222: 2, |
| | | | | AR104: 2, AR189: 2, AR183: 2, AR188: 2, AR271: 2, AR203: 2, AR246: 2, AR240: 2, AR096: 1, AR256: 1, AR185: 1, AR272: 1, AR060: 1, AR277: 1, AR296: 1, |
| | | | | AR033: 1, AR260: 1, AR199: 1, AR172: 1, AR193: 1, AR243: 1, AR223: 1, AR201: 1, AR299: 1, AR211: 1, AR308: 1, S0052: 1 and S0428: 1. |
| 214 | HNGND37 | 839224 | 224 | AR161: 7, AR162: 7, AR163: 7, AR176: 6, AR055: 5, AR181: 5, AR180: 5, AR269: 5, AR266: 5, AR178: 5, AR267: 5, AR268: 5, AR229: 5, AR060: 4, AR104: 4, |
| | | | | AR271: 4, AR222: 4, AR261: 4, AR225: 4, AR224: 4, AR228: 4, AR165: 4, AR089: 4, AR177: 4, AR257: 4, AR233: 4, AR053: 4, AR300: 4, AR164: 4, AR182: 4, |
| | | | | AR270: 4, AR033: 4, AR166: 4, AR264: 4, AR183: 3, AR168: 3, AR289: 3, AR235: 3, AR237: 3, AR236: 3, AR290: 3, AR255: 3, AR061: 3, AR296: 3, AR238: 3, |
| | | | | AR231: 3, AR277: 3, AR250: 3, AR239: 3, AR240: 3, AR175: 3, AR226: 3, AR293: 3, AR230: 3, AR221: 3, AR170: 3, AR287: 3, AR174: 3, AR185: 3, AR179: 3, |
| | | | | AR216: 2, AR239: 2, AR207: 2, AR286: 2, AR053: 2, AR190: 2, AR285: 2, AR191: 2, AR290: 2, AR232: 2, AR179: 2, AR225: 2, AR234: 2, AR295: 2, AR196: 2, |
| | | | | AR234: 2, AR262: 2, AR263: 2, AR232: 2, AR196: 2, AR299: 2, AR286: 2, AR275: 2, AR171: 2, AR203: 2, AR285: 2, AR173: 2, AR295: 2, AR189: 2, AR204: 2, |
| | | | | AR274: 2, AR190: 2, AR312: 2, AR172: 2, AR246: 2, AR200: 2, AR217: 2, AR308: 2, AR211: 2, AR258: 2, AR188: 2, AR201: 2, AR260: 2, AR313: 2, AR272: 2, |
| | | | | AR039: 2, AR243: 1, AR218: 1, AR219: 1, AR210: 1, AR199: 1, AR213: 1, AR205: 1, AR256: 1, AR252: 1, L0749: 4, L0439: 3, H0100: 2, L0770: 2, L0776: 2, |
| | | | | H0556: 1, H0638: 1, H0441: 1, T0010: 1, H0687: 1, L0055: 1, L0769: 1, L0809: 1, S0428: 1, H0522: 1, H0694: 1, L0758: 1, L0589: 1 and L0592: 1. |
| 215 | HNGOI12 | 1041375 | 225 | AR225: 30, AR223: 24, AR221: 18, AR224: 17, AR215: 14, AR168: 12, AR214: 9, AR222: 9, AR216: 9, AR171: 8, AR217: 8, AR266: 8, AR172: 8, AR176: 7, |
| | | | | AR269: 7, AR182: 7, AR288: 7, AR180: 7, AR245: 7, AR289: 6, AR161: 6, AR162: 6, AR204: 6, AR255: 6, AR197: 6, AR270: 6, AR183: 6, AR297: 6, AR163: 6, |
| | | | | AR178: 6, AR268: 6, AR181: 6, AR282: 6, AR236: 5, AR231: 5, AR039: 5, AR293: 5, AR207: 5, AR179: 5, AR294: 5, AR201: 5, AR295: 5, AR198: 5, AR169: 5, |
| | | | | AR240: 5, AR286: 5, AR261: 5, AR229: 5, AR165: 5, AR205: 5, AR170: 4, AR285: 4, AR233: 4, AR309: 4, AR290: 4, AR257: 4, AR177: 4, AR055: 4, AR175: 4, |
| | | | | AR246: 4, AR300: 4, AR287: 4, AR256: 4, AR173: 4, AR243: 4, AR271: 4, AR267: 4, AR235: 4, AR264: 4, AR164: 4, AR263: 4, AR247: 4, AR313: 4, AR166: 4, |
| | | | | AR277: 4, AR262: 4, AR060: 4, AR238: 4, AR260: 4, AR191: 4, AR291: 4, AR316: 4, AR258: 4, AR239: 4, AR053: 4, AR296: 4, AR228: 4, AR174: 4, AR250: 4, |
| | | | | AR199: 4, AR096: 3, AR192: 3, AR230: 3, AR237: 3, AR196: 3, AR193: 3, AR234: 3, AR283: 3, AR104: 3, AR203: 3, AR190: 3, AR272: 3, AR200: 3, AR253: 3, |
| | | | | AR189: 3, AR061: 3, AR185: 3, AR311: 3, AR275: 3, AR226: 3, AR299: 3, AR089: 3, AR227: 3, AR188: 3, AR312: 3, AR232: 2, AR219: 2, AR274: 2, AR033: 2, |
| | | | | AR195: 2, AR212: 2, AR213: 2, AR211: 2, AR218: 1, AR242: 1, AR210: 1, AR308: 1, S0428: 1 |
| | HNGOI12 | 838184 | 450 | |
| | HNGOI12 | 839283 | 451 | |
| 216 | HNGOM56 | 836064 | 226 | AR039: 15, AR313: 14, AR089: 11, AR161: 10, AR162: 10, AR165: 10, AR096: 10, AR166: 9, AR163: 9, AR164: 9, AR299: 9, AR242: 8, AR300: 8, AR277: 8, |
| | | | | AR185: 7, AR192: 7, AR060: 7, AR178: 7, AR316: 7, AR282: 7, AR180: 6, AR055: 6, AR104: 6, AR181: 6, AR176: 6, AR309: 6, AR173: 6, AR053: 6, AR196: 6, |
| | | | | AR179: 6, AR183: 6, AR197: 6, AR175: 6, AR229: 6, AR240: 6, AR182: 6, AR174: 5, AR247: 5, AR264: 5, AR198: 5, AR245: 5, AR177: 5, AR233: 5, AR262: 5, |
| | | | | AR275: 5, AR204: 5, AR269: 5, AR261: 5, AR243: 5, AR218: 5, AR226: 5, AR271: 4, AR239: 4, AR171: 4, AR238: 4, AR228: 4, AR236: 4, AR246: 4, AR193: 4, |
| | | | | AR237: 4, AR257: 4, AR212: 4, AR283: 4, AR234: 4, AR293: 4, AR217: 4, AR272: 4, AR221: 4, AR312: 4, AR268: 4, AR270: 4, AR258: 4, AR263: 4, AR219: 4, |
| | | | | AR267: 4, AR266: 4, AR308: 4, AR170: 4, AR199: 4, AR231: 4, AR201: 4, AR200: 4, AR191: 4, AR195: 3, AR230: 3, AR252: 3, AR291: 3, AR203: 3, AR253: 3, |
| | | | | AR274: 3, AR188: 3, AR205: 3, AR189: 3, AR296: 3, AR061: 3, AR294: 3, AR297: 3, AR227: 3, AR235: 3, AR215: 3, AR311: 3, AR232: 3, AR289: 3, AR288: 3, |
| | | | | AR255: 3, AR213: 3, AR287: 3, AR295: 3, AR286: 2, AR033: 2, AR250: 2, AR285: 2, AR216: 2, AR222: 2, AR260: 2, AR290: 2, AR214: 2, AR256: 2, AR169: 2, |
| | | | | AR168: 2, AR224: 2, AR190: 2, AR210: 2, AR211: 1, AR172: 1, AR223: 1, S0428: 2 and L0368: 1. |
| 217 | HNGOU56 | 843515 | 227 | AR250: 11, AR252: 9, AR201: 9, AR176: 9, AR235: 9, AR254: 8, AR245: 8, AR169: 8, AR180: 8, AR269: 8, AR197: 8, AR204: 7, AR162: 7, AR161: 7, AR163: 7, |
| | | | | AR181: 7, AR193: 7, AR271: 6, AR192: 6, AR229: 6, AR224: 6, AR266: 6, AR207: 6, AR178: 6, AR228: 6, AR239: 6, AR267: 6, AR055: 5, AR261: 5, AR060: 5, |
| | | | | AR164: 5, AR233: 5, AR236: 5, AR309: 5, AR182: 5, AR165: 5, AR183: 5, AR268: 5, AR231: 5, AR166: 5, AR177: 5, AR214: 5, AR257: 5, AR243: 5, AR198: 5, |
| | | | | AR253: 5, AR227: 5, AR270: 5, AR033: 5, AR293: 5, AR053: 5, AR222: 5, AR291: 5, AR237: 5, AR223: 4, AR312: 4, AR195: 4, AR226: 4, AR300: 4, AR264: 4, |
| | | | | AR221: 4, AR179: 4, AR308: 4, AR175: 4, AR263: 4, AR238: 4, AR216: 4, AR240: 4, AR287: 4, AR288: 4, AR247: 4, AR262: 4, AR246: 4, AR225: 4, AR274: 4, |
| | | | | AR234: 4, AR290: 4, AR061: 4, AR282: 4, AR205: 4, AR174: 4, AR196: 4, AR230: 4, AR173: 4, AR286: 4, AR171: 4, AR104: 4, AR313: 4, AR272: 4, AR294: 4, |
| | | | | AR275: 4, AR285: 4, AR283: 3, AR039: 3, AR255: 3, AR316: 3, AR168: 3, AR297: 3, AR191: 3, AR213: 3, AR289: 3, AR089: 3, AR295: 3, AR299: 3, AR096: 3, |
| | | | | AR189: 3, AR185: 3, AR199: 3, AR203: 3, AR311: 3, AR277: 3, AR296: 3, AR258: 3, AR188: 3, AR200: 3, AR172: 3, AR210: 2, AR211: 2, AR232: 2, AR218: 2, |
| | | | | AR190: 2, AR217: 2, AR256: 2, AR212: 2, AR260: 2, AR219: 1, AR170: 1, S0428: 1 |
| 218 | HNGOW62 | 892160 | 228 | AR176: 7, AR282: 6, AR266: 5, AR163: 5, AR055: 5, AR216: 5, AR060: 5, AR171: 4, AR175: 4, AR172: 4, AR254: 3, AR104: 3, AR309: 3, AR161: 3, AR229: 3, |
| | | | | AR245: 3, AR204: 3, AR228: 3, AR162: 3, AR089: 3, AR262: 3, AR178: 3, AR183: 3, AR207: 3, AR096: 3, AR214: 3, AR239: 3, AR291: 3, AR221: 3, AR182: 3, |
| | | | | AR240: 3, AR270: 3, AR283: 3, AR165: 3, AR164: 2, AR222: 2, AR227: 2, AR277: 2, AR269: 2, AR226: 2, AR218: 2, AR316: 2, AR223: 2, AR233: 2, AR236: 2, |
| | | | | AR166: 2, AR264: 2, AR268: 2, AR286: 2, AR257: 2, AR224: 2, AR289: 2, AR299: 2, AR211: 2, AR225: 2, AR185: 2, AR177: 2, AR295: 2, AR181: 2, AR061: 2, |
| | | | | AR039: 2, AR219: 2, AR271: 2, AR296: 2, AR217: 2, AR179: 2, AR234: 2, AR267: 2, AR201: 2, AR196: 2, AR275: 2, AR033: 2, AR237: 2, AR168: 1, AR313: 1, |
| | | | | AR230: 1, AR300: 1, AR173: 1, AR290: 1, AR231: 1, AR285: 1, AR174: 1, AR293: 1, AR205: 1, AR180: 1, AR272: 1, AR053: 1, H0556: 1 and S0428: 1. |
| 219 | HNHEU93 | 634851 | 229 | AR313: 24, AR173: 20, AR162: 16, AR161: 16, AR163: 16, AR165: 14, AR166: 14, AR175: 13, AR258: 13, AR242: 13, AR293: 12, |
| | | | | AR257: 11, AR270: 10, AR262: 10, AR178: 10, AR299: 10, AR300: 10, AR240: 9, AR269: 9, AR176: 9, AR233: 9, AR254: 9, AR229: 9, AR264: 9, AR180: 9, |
| | | | | AR196: 9, AR179: 9, AR312: 9, AR199: 9, AR177: 9, AR182: 9, AR181: 9, AR275: 8, AR296: 8, AR183: 8, AR294: 8, AR238: 8, AR191: 8, AR197: 8, AR193: 8, |
| | | | | AR297: 8, AR274: 7, AR234: 7, AR253: 7, AR174: 7, AR226: 7, AR053: 7, AR260: 7, AR267: 7, AR285: 7, AR268: 7, AR237: 7, AR286: 6, AR089: 6, AR189: 6, |
| | | | | AR290: 6, AR252: 6, AR291: 6, AR287: 6, AR096: 6, AR204: 6, AR231: 6, AR192: 6, AR255: 6, AR228: 6, AR250: 6, AR188: 6, AR288: 6, AR185: 6, AR033: 6, |
| | | | | AR263: 6, AR261: 6, AR198: 6, AR282: 6, AR309: 6, AR272: 6, AR203: 5, AR212: 5, AR239: 5, AR245: 5, AR207: 5, AR295: 5, AR289: 5, AR266: 5, AR195: 5, |
| | | | | AR308: 5, AR190: 5, AR218: 5, AR200: 5, AR277: 5, AR201: 4, AR256: 4, AR219: 4, AR230: 4, AR227: 4, AR316: 4, AR246: 4, AR213: 4, AR271: 4, AR236: 4, |
| | | | | AR215: 4, AR243: 4, AR232: 3, AR061: 3, AR205: 3, AR039: 3, AR224: 3, AR060: 3, AR172: 3, AR225: 2, AR210: 2, AR211: 2, AR104: 2, AR171: 2, AR221: 2, |
| | | | | AR223: 2, AR311: 2, AR283: 2, AR216: 1, AR055: 1, S0053: 1 |
| 220 | HNHFM14 | 664507 | 230 | AR270: 26, AR273: 17, AR052: 17, AR186: 12, AR290: 12, AR309: 11, AR269: 10, AR268: 9, AR313: 8, AR175: 7, AR267: 7, AR184: 6, AR312: 6, AR183: 5, |
| | | | | AR213: 5, AR298: 5, AR219: 5, AR274: 4, AR218: 4, AR293: 4, AR249: 4, AR194: 4, AR089: 4, AR185: 4, AR162: 3, AR161: 3, AR265: 3, AR163: 3, AR198: 3, |
| | | | | AR060: 3, AR261: 3, AR104: 3, AR096: 3, AR204: 3, AR192: 3, AR207: 3, AR251: 3, AR282: 3, AR172: 3, AR217: 3, AR236: 3, AR264: 3, AR181: 3, AR221: 3, |
| | | | | AR225: 2, AR195: 2, AR240: 2, AR248: 2, AR246: 2, AR231: 2, AR299: 2, AR171: 2, AR271: 2, AR239: 2, AR176: 2, AR201: 2, AR228: 2, AR277: 2, AR295: 2, |
| | | | | AR316: 2, AR178: 2, AR179: 2, AR061: 2, AR216: 2, AR224: 2, AR291: 2, AR193: 2, AR033: 2, AR287: 2, AR234: 2, AR300: 1, AR310: 1, AR233: 1, AR296: 1, |
| | | | | AR286: 1, AR238: 1, AR237: 1, AR174: 1, AR262: 1, AR285: 1, AR191: 1, AR294: 1, AR227: 1, AR255: 1, AR257: 1, AR297: 1, AR247: 1, AR232: 1, AR289: 1, |
| | | | | L0747: 5, H0619: 4, S0406: 4, L0439: 4, L0777: 4, H0617: 2, L0770: 2, L0769: 2, L0803: 2, L0438: 2, L3827: 2, S0328: 2, L0749: 2, L0779: 2, H0265: 1, L3643: 1, |
| | | | | H0484: 1, S0418: 1, H0747: 1, L3388: 1, H0618: 1, S0010: 1, H0052: 1, H0570: 1, H0012: 1, H0014: 1, H0510: 1, H0288: 1, H0622: 1, S0366: 1, H0040: 1, |
| | | | | H0623: 1, L0351: 1, T0042: 1, L0761: 1, L0764: 1, L0767: 1, L0805: 1, L0655: 1, L0809: 1, S0053: 1, L3828: 1, H0520: 1, H0435: 1, H0659: 1, S3014: 1, L0743: 1, |
| | | | | L0756: 1, L0758: 1 and H0136: 1. |
| 221 | HNHFO29 | 463568 | 231 | AR089: 9, AR313: 8, AR039: 8, AR060: 7, AR268: 6, AR299: 6, AR096: 6, AR310: 5, AR055: 5, AR249: 5, AR291: 5, AR185: 5, AR186: 4, AR104: 4, AR277: 4, |
| | | | | AR052: 4, AR309: 4, AR316: 4, AR270: 4, AR282: 4, AR061: 4, AR162: 4, AR161: 4, AR165: 4, AR164: 3, AR269: 3, AR235: 3, AR300: 3, AR289: 3, AR166: 3, |
| | | | | AR170: 3, AR183: 3, AR272: 3, AR271: 3, AR182: 3, AR283: 3, AR184: 3, AR053: 3, AR218: 3, AR312: 3, AR176: 3, AR298: 3, AR251: 3, AR248: 3, AR266: 3, |
| | | | | AR169: 3, AR163: 3, AR240: 3, AR247: 3, AR180: 3, AR172: 3, AR173: 3, AR284: 2, AR296: 2, AR253: 2, AR292: 2, AR219: 2, AR263: 2, AR245: 2, AR233: 2, |
| | | | | AR229: 2, AR294: 2, AR286: 2, AR308: 2, AR228: 2, AR033: 2, AR293: 2, AR201: 2, AR225: 2, AR174: 2, AR234: 2, AR237: 2, AR181: 2, AR231: 2, AR238: 2, |
| | | | | AR262: 2, AR175: 2, AR197: 2, AR223: 2, AR206: 2, AR177: 2, AR198: 2, AR285: 2, AR188: 2, AR171: 1, AR295: 1, AR214: 1, AR196: 1, AR243: 1, AR226: 1, |
| | | | | AR297: 1, AR204: 1, AR227: 1, AR287: 1, AR274: 1, AR230: 1, AR179: 1, AR239: 1, AR210: 1, AR190: 1, AR264: 1, AR222: 1, AR290: 1, AR257: 1, AR241: 1, |
| | | | | AR191: 1, T0042: 1 and S0053: 1. |
| 222 | HNHNB29 | 895462 | 232 | AR313: 23, AR254: 22, AR162: 20, AR161: 20, AR163: 19, AR173: 17, AR165: 16, AR164: 16, AR166: 15, AR229: 14, AR176: 13, AR178: 13, AR247: 13, |
| | | | | AR268: 13, AR271: 13, AR269: 12, AR183: 12, AR193: 12, AR180: 12, AR175: 11, AR096: 11, AR270: 11, AR257: 11, AR214: 11, AR293: 11, AR170: 11, |
| | | | | AR181: 10, AR267: 10, AR179: 10, AR182: 10, AR300: 10, AR253: 10, AR192: 10, AR197: 10, AR174: 9, AR258: 9, AR226: 9, AR242: 9, AR275: 9, AR262: 9, |
| | | | | AR240: 9, AR296: 9, AR274: 9, AR238: 9, AR266: 9, AR169: 8, AR312: 8, AR233: 8, AR250: 8, AR264: 8, AR199: 8, AR196: 8, AR246: 8, AR309: 8, AR245: 8, |
| | | | | AR237: 8, AR189: 8, AR272: 8, AR291: 8, AR195: 8, AR204: 7, AR172: 7, AR089: 7, AR243: 7, AR191: 7, AR290: 7, AR177: 7, AR297: 7, AR286: 7, AR234: 7, |
| | | | | AR198: 7, AR255: 6, AR277: 6, AR235: 6, AR239: 6, AR228: 6, AR294: 6, AR190: 6, AR201: 6, AR033: 6, AR203: 6, AR215: 6, AR308: 6, AR231: 6, AR289: 6, |
| | | | | AR188: 5, AR236: 5, AR185: 5, AR039: 5, AR285: 5, AR261: 5, AR230: 5, AR282: 5, AR168: 5, AR299: 5, AR225: 5, AR288: 5, AR205: 5, AR287: 5, AR295: 5, |
| | | | | AR053: 5, AR060: 5, AR263: 5, AR227: 4, AR213: 4, AR200: 4, AR316: 4, AR224: 4, AR311: 4, AR212: 4, AR260: 4, AR061: 4, AR171: 4, AR219: 4, AR211: 3, |
| | | | | AR256: 3, AR232: 3, AR252: 3, AR218: 3, AR222: 3, AR207: 3, AR055: 3, AR221: 3, AR216: 3, AR104: 2, AR223: 2, AR217: 1, AR210: 1, S0216: 1 |
| 223 | HNHOD46 | 843488 | 233 | AR039: 32, AR313: 28, AR096: 21, AR089: 19, AR299: 16, AR185: 11, AR277: 11, AR316: 11, AR300: 10, AR104: 10, AR060: 9, AR219: 8, AR218: 8, |
| | | | | AR240: 7, AR055: 7, AR161: 6, AR162: 6, AR173: 6, AR282: 6, AR163: 6, AR165: 6, AR164: 6, AR166: 6, AR183: 5, AR247: 5, AR270: 5, AR229: 5, AR176: 4, |
| | | | | AR175: 4, AR181: 4, AR269: 4, AR257: 4, AR179: 4, AR238: 4, AR283: 4, AR178: 4, AR196: 4, AR293: 4, AR309: 4, AR262: 4, AR268: 4, AR250: 4, AR182: 4, |
| | | | | AR174: 3, AR236: 3, AR199: 3, AR177: 3, AR213: 3, AR230: 3, AR234: 3, AR171: 3, AR291: 3, AR296: 3, AR233: 3, AR258: 3, AR255: 3, AR286: 3, AR180: 3, |
| | | | | AR191: 3, AR189: 3, AR237: 3, AR297: 3, AR312: 3, AR261: 3, AR294: 3, AR295: 3, AR168: 3, AR053: 3, AR263: 3, AR226: 3, AR274: 3, AR287: 2, AR225: 2, |
| | | | | AR188: 2, AR231: 2, AR308: 2, AR203: 2, AR267: 2, AR239: 2, AR285: 2, AR289: 2, AR033: 2, AR169: 2, AR275: 2, AR227: 2, AR266: 2, AR264: 2, AR290: 2, |
| | | | | AR224: 2, AR200: 2, AR190: 2, AR243: 2, AR311: 2, AR228: 2, AR212: 2, AR222: 2, AR216: 2, AR272: 1, AR172: 1, AR211: 1, AR260: 1, AR235: 1, AR061: 1 |
| | | | | S0216: 1 |
| 224 | HNHOG73 | 835026 | 234 | AR309: 14, AR263: 13, AR252: 12, AR207: 12, AR214: 11, AR264: 11, AR253: 11, AR223: 11, AR224: 11, AR195: 10, AR225: 10, AR171: 10, AR161: 10, |
| | | | | AR192: 9, AR222: 9, AR308: 9, AR163: 9, AR162: 9, AR170: 9, AR169: 9, AR311: 9, AR168: 9, AR235: 9, AR245: 9, AR197: 8, AR176: 8, AR254: 8, AR165: 8, |
| | | | | AR164: 8, AR215: 8, AR216: 8, AR172: 8, AR261: 8, AR282: 8, AR166: 8, AR250: 7, AR053: 7, AR312: 7, AR288: 7, AR246: 7, AR291: 7, AR217: 7, AR212: 6, |
| | | | | AR221: 6, AR213: 6, AR193: 6, AR198: 6, AR295: 6, AR275: 6, AR181: 6, AR266: 6, AR180: 6, AR236: 6, AR178: 6, AR177: 6, AR285: 6, AR196: 6, AR268: 6, |
| | | | | AR060: 6, AR289: 6, AR297: 6, AR257: 6, AR175: 6, AR204: 5, AR255: 5, AR183: 5, AR271: 5, AR272: 5, AR055: 5, AR240: 5, AR033: 5, AR237: 5, AR270: 5, |
| | | | | AR182: 5, AR293: 5, AR247: 5, AR300: 5, AR201: 5, AR258: 5, AR174: 5, AR243: 5, AR287: 5, AR296: 5, AR286: 5, AR191: 5, AR189: 5, AR231: 5, AR228: 5, |
| | | | | AR269: 5, AR205: 5, AR173: 5, AR233: 5, AR210: 5, AR227: 5, AR229: 5, AR199: 5, AR267: 4, AR185: 4, AR277: 4, AR294: 4, AR061: 4, AR239: 4, AR316: 4, |
| | | | | AR089: 4, AR274: 4, AR218: 4, AR262: 4, AR200: 4, AR232: 4, AR234: 4, AR290: 4, AR211: 4, AR238: 4, AR190: 4, AR256: 4, AR179: 4, AR226: 4, AR260: 4, |
| | | | | AR039: 4, AR188: 4, AR299: 4, AR203: 4, AR230: 4, AR283: 3, AR096: 3, AR104: 3, AR242: 3, AR313: 3, AR219: 3, L0365: 1 and S0216: 1. |
| 225 | HNTBI26 | 1310821 | 235 | AR195: 19, AR214: 19, AR194: 18, AR225: 16, AR223: 16, AR164: 16, AR165: 16, AR281: 16, AR166: 15, AR224: 15, AR172: 15, AR216: 15, AR215: 15, |
| | | | | AR202: 15, AR161: 14, AR162: 14, AR222: 14, AR221: 14, AR199: 14, AR217: 14, AR280: 14, AR244: 14, AR169: 14, AR163: 14, AR206: 14, AR171: 13, |
| | | | | AR168: 13, AR315: 13, AR207: 12, AR235: 12, AR211: 12, AR170: 12, AR246: 12, AR268: 11, AR192: 11, AR265: 11, AR197: 11, AR263: 11, AR314: 11, |
| | | | | AR196: 11, AR311: 10, AR243: 10, AR241: 10, AR205: 10, AR245: 10, AR264: 10, AR297: 9, AR242: 9, AR288: 9, AR198: 9, AR212: 9, AR191: 9, AR308: 9, |
| | | | | AR213: 8, AR269: 8, AR273: 8, AR309: 8, AR270: 8, AR310: 8, AR290: 8, AR053: 8, AR272: 8, AR275: 8, AR200: 8, AR252: 8, AR189: 8, AR173: 8, AR261: 8, |
| | | | | AR289: 8, AR180: 8, AR089: 8, AR210: 7, AR312: 7, AR188: 7, AR251: 7, AR234: 7, AR183: 7, AR284: 7, AR271: 7, AR236: 7, AR190: 7, AR238: 7, AR295: 7, |
| | | | | AR181: 7, AR253: 7, AR291: 7, AR282: 7, AR248: 7, AR247: 7, AR266: 7, AR285: 7, AR283: 7, AR193: 7, AR177: 7, AR182: 7, AR033: 7, AR250: 7, AR174: 7, |
| | | | | AR204: 7, AR176: 6, AR240: 6, AR274: 6, AR254: 6, AR052: 6, AR060: 6, AR286: 6, AR239: 6, AR175: 6, AR249: 6, AR299: 6, AR277: 6, AR257: 6, AR218: 6, |
| | | | | AR316: 6, AR061: 5, AR298: 5, AR096: 5, AR287: 5, AR178: 5, AR300: 5, AR255: 5, AR231: 5, AR185: 5, AR296: 5, AR203: 5, AR313: 5, AR292: 5, AR201: 5, |
| | | | | AR232: 5, AR039: 5, AR186: 5, AR227: 5, AR055: 5, AR219: 5, AR258: 5, AR267: 5, AR294: 5, AR262: 5, AR293: 4, AR229: 4, AR179: 4, AR260: 4, AR226: 4, |
| | | | | AR237: 4, AR228: 4, AR233: 4, AR104: 4, AR184: 3, AR230: 3, AR256: 3, AR259: 2, H0124: 23, L0774: 4, L0740: 3, S0212: 2, S0360: 2, L3388: 2, L0659: 2, |
| | | | | L0757: 2, S0436: 2, H0170: 1, H0713: 1, H0580: 1, S0045: 1, H0393: 1, S0220: 1, H0333: 1, H0643: 1, H0574: 1, H0013: 1, S0280: 1, H0581: 1, H0544: 1, |
| | | | | H0150: 1, H0059: 1, H0509: 1, L0369: 1, L0640: 1, L0521: 1, L0363: 1, L0775: 1, L0654: 1, L0776: 1, L0559: 1, L0384: 1, L0790: 1, L0664: 1, L2258: 1, L2260: 1, |
| | | | | H0519: 1, S0027: 1, S0206: 1, L0747: 1, L0749: 1, L0780: 1, L0731: 1, L0759: 1 and H0542: 1. |
| | HNTBI26 | 796807 | 452 | |
| | HNTBI26 | 590738 | 453 | |
| 226 | HNTBL27 | 545534 | 236 | AR218: 6, AR240: 5, AR282: 5, AR277: 5, AR316: 5, AR096: 4, AR219: 4, AR185: 4, AR104: 4, AR300: 3, AR299: 3, AR060: 3, AR283: 3, AR055: 3, AR313: 3, |
| | | | | AR089: 3, AR039: 3, L0794: 3, L0663: 2, S0360: 1, H0042: 1, H0253: 1, H0150: 1, H0633: 1, S0142: 1, H0538: 1, L0804: 1, L0790: 1, L0791: 1, L0666: 1, |
| | | | | L0664: 1, L0665: 1, H0519: 1, L0747: 1, L0749: 1, L0779: 1, L0777: 1, L0755: 1 and L0731: 1. |
| 227 | HNTCE26 | 1160395 | 237 | AR291: 7, AR164: 5, AR295: 5, AR296: 5, AR285: 5, AR166: 5, AR165: 5, AR170: 4, AR297: 4, AR287: 4, AR162: 4, AR286: 4, AR161: 4, AR235: 4, AR311: 4, |
| | | | | AR257: 4, AR288: 4, AR223: 4, AR225: 4, AR053: 4, AR089: 4, AR060: 4, AR308: 4, AR261: 4, AR169: 4, AR262: 4, AR176: 4, AR096: 4, AR264: 4, AR266: 3, |
| | | | | AR283: 3, AR199: 3, AR246: 3, AR178: 3, AR289: 3, AR214: 3, AR267: 3, AR205: 3, AR269: 3, AR312: 3, AR245: 3, AR263: 3, AR195: 3, AR196: 3, AR175: 3, |
| | | | | AR255: 3, AR293: 3, AR236: 3, AR270: 3, AR277: 3, AR173: 3, AR104: 3, AR272: 3, AR188: 3, AR183: 3, AR294: 3, AR268: 3, AR224: 3, AR258: 3, AR242: 3, |
| | | | | AR182: 3, AR238: 3, AR189: 3, AR193: 3, AR316: 3, AR191: 3, AR180: 3, AR174: 3, AR163: 2, AR197: 2, AR253: 2, AR210: 2, AR290: 2, AR200: 2, AR190: 2, |
| | | | | AR203: 2, AR217: 2, AR247: 2, AR181: 2, AR299: 2, AR185: 2, AR260: 2, AR211: 2, AR282: 2, AR313: 2, AR309: 2, AR254: 2, AR256: 2, AR033: 2, AR201: 2, |
| | | | | AR179: 2, AR213: 2, AR227: 2, AR171: 2, AR237: 2, AR168: 2, AR222: 2, AR300: 2, AR240: 2, AR243: 2, AR234: 2, AR274: 2, AR219: 2, AR204: 2, AR239: 2, |
| | | | | AR218: 2, AR233: 1, AR231: 1, AR177: 1, AR216: 1, AR172: 1, AR212: 1, AR055: 1, AR061: 1, AR230: 1, AR232: 1, AR226: 1, H0580: 5, L0754: 5, H0615: 4, |
| | | | | L0805: 4, L0748: 4, L0731: 4, H0031: 3, S0440: 3, L0659: 3, L0758: 3, L2346: 2, S0278: 2, L0804: 2, L0809: 2, H0547: 2, H0352: 2, H0657: 1, H0656: 1, S0418: 1, |
| | | | | S0442: 1, S0444: 1, L3649: 1, H0741: 1, H0645: 1, H0574: 1, H0486: 1, L3521: 1, H0013: 1, S0010: 1, H0327: 1, H0046: 1, L0041: 1, H0510: 1, S0214: 1, H0328: 1, |
| | | | | H0030: 1, H0553: 1, H0644: 1, H0032: 1, S0344: 1, S0002: 1, L0369: 1, L0667: 1, L0364: 1, L0794: 1, L0803: 1, L0775: 1, L0776: 1, L0789: 1, L0666: 1, L0663: 1, |
| | | | | L2653: 1, L0438: 1, H0519: 1, H0670: 1, H0521: 1, L0744: 1, L0439: 1, L0747: 1, L0779: 1, L0591: 1 and L3374: 1. |
| | HNTCE26 | 853373 | 454 | |
| 228 | HNTNI01 | 1352285 | 238 | AR207: 15, AR263: 12, AR169: 11, AR311: 11, AR212: 10, AR198: 10, AR264: 10, AR235: 10, AR252: 9, AR168: 9, AR223: 9, AR224: 9, AR089: 9, AR053: 8, |
| | | | | AR215: 8, AR172: 8, AR161: 8, AR162: 8, AR214: 8, AR222: 8, AR163: 8, AR309: 8, AR165: 8, AR205: 8, AR192: 8, AR164: 8, AR170: 8, AR221: 7, AR166: 7, |
| | | | | AR216: 7, AR242: 7, AR282: 7, AR308: 7, AR195: 7, AR171: 7, AR039: 7, AR213: 7, AR261: 7, AR312: 7, AR245: 6, AR254: 6, AR295: 6, AR225: 6, AR033: 6, |
| | | | | AR197: 6, AR288: 6, AR217: 6, AR060: 5, AR196: 5, AR274: 5, AR096: 5, AR246: 5, AR271: 5, AR291: 5, AR193: 5, AR316: 5, AR286: 5, AR277: 5, AR283: 5, |
| | | | | AR299: 5, AR178: 5, AR272: 5, AR275: 5, AR236: 4, AR243: 4, AR285: 4, AR240: 4, AR104: 4, AR313: 4, AR185: 4, AR176: 4, AR296: 4, AR297: 4, AR204: 4, |
| | | | | AR287: 4, AR210: 4, AR055: 4, AR177: 4, AR253: 4, AR183: 4, AR181: 4, AR290: 4, AR247: 4, AR269: 4, AR258: 4, AR289: 4, AR257: 4, AR201: 4, AR174: 3, |
| | | | | AR238: 3, AR200: 3, AR262: 3, AR300: 3, AR175: 3, AR199: 3, AR294: 3, AR255: 3, AR188: 3, AR268: 3, AR180: 3, AR293: 3, AR211: 3, AR173: 3, AR266: 3, |
| | | | | AR250: 3, AR270: 3, AR061: 3, AR189: 3, AR179: 3, AR267: 3, AR239: 3, AR182: 3, AR190: 3, AR227: 2, AR231: 2, AR234: 2, AR256: 2, AR219: 2, AR237: 2, |
| | | | | AR203: 2, AR191: 2, AR229: 2, AR226: 2, AR230: 2, AR232: 2, AR260: 2, AR233: 2, AR218: 2, AR228: 1, L0747: 5, H0545: 3, H0520: 3, L0439: 3, L0803: 2, |
| | | | | L0790: 2, H0547: 2, L0740: 2, L0751: 2, L0779: 2, L0759: 2, L0593: 2, H0170: 1, S0005: 1, H0485: 1, H0013: 1, L0564: 1, L0770: 1, L0794: 1, L0809: 1, H0519: 1, |
| | | | | S0378: 1, L0756: 1, L0777: 1 and H0667: 1. |
| | HNTN101 | 699848 | 455 | |
| 229 | HODDF13 | 684307 | 239 | AR312: 21, AR308: 20, AR205: 19, AR253: 19, AR250: 19, AR309: 19, AR264: 18, AR311: 16, AR212: 16, AR213: 15, AR218: 14, AR096: 14, AR272: 14, |
| | | | | AR313: 14, AR263: 14, AR161: 13, AR162: 13, AR163: 13, AR165: 13, AR164: 12, AR175: 12, AR053: 12, AR219: 12, AR089: 12, AR166: 12, AR246: 12, |
| | | | | AR178: 11, AR270: 11, AR254: 11, AR271: 11, AR173: 11, AR274: 10, AR039: 10, AR192: 10, AR174: 10, AR176: 10, AR282: 10, AR216: 10, AR189: 10, |
| | | | | AR193: 10, AR183: 9, AR221: 9, AR268: 9, AR191: 9, AR252: 9, AR210: 9, AR245: 9, AR172: 9, AR269: 9, AR290: 9, AR197: 9, AR180: 9, AR242: 8, AR217: 8, |
| | | | | AR224: 8, AR182: 8, AR316: 8, AR215: 8, AR293: 8, AR181: 8, AR288: 8, AR179: 8, AR267: 8, AR060: 8, AR190: 8, AR171: 7, AR247: 7, AR201: 7, AR297: 7, |
| | | | | AR195: 7, AR240: 7, AR185: 7, AR222: 7, AR177: 7, AR199: 6, AR170: 6, AR295: 6, AR291: 6, AR188: 6, AR198: 6, AR211: 6, AR243: 6, AR266: 6, AR275: 6, |
| | | | | AR104: 6, AR299: 6, AR204: 6, AR229: 5, AR300: 5, AR237: 5, AR294: 5, AR169: 5, AR285: 5, AR225: 5, AR033: 5, AR296: 5, AR286: 5, AR287: 5, AR261: 5, |
| | | | | AR238: 5, AR168: 5, AR289: 4, AR231: 4, AR230: 4, AR223: 4, AR277: 4, AR214: 4, AR226: 4, AR228: 4, AR203: 4, AR239: 4, AR196: 4, AR255: 4, AR234: 4, |
| | | | | AR235: 4, AR233: 4, AR262: 4, AR260: 3, AR236: 3, AR257: 3, AR061: 3, AR256: 3, AR232: 3, AR200: 3, AR227: 3, AR258: 3, AR283: 3, AR055: 2, AR207: 2 |
| | | | | H0328: 1 |
| 230 | HODDN92 | 422913 | 240 | AR161: 4, AR162: 4, AR163: 4, AR192: 4, AR165: 4, AR308: 4, AR264: 4, AR176: 4, AR311: 3, AR164: 3, AR309: 3, AR166: 3, AR312: 3, AR213: 3, AR214: 3, |
| | | | | AR193: 3, AR225: 3, AR313: 3, AR096: 3, AR089: 3, AR270: 3, AR172: 3, AR235: 3, AR299: 2, AR201: 2, AR291: 2, AR104: 2, AR269: 2, AR195: 2, AR294: 2, |
| | | | | AR169: 2, AR215: 2, AR290: 2, AR224: 2, AR173: 2, AR060: 2, AR288: 2, AR282: 2, AR285: 2, AR271: 2, AR185: 2, AR175: 2, AR039: 2, AR275: 2, AR277: 2, |
| | | | | AR211: 2, AR268: 2, AR316: 2, AR190: 2, AR267: 2, AR274: 2, AR272: 2, AR171: 2, AR287: 2, AR221: 2, AR237: 2, AR189: 1, AR289: 1, AR217: 1, AR300: 1, |
| | | | | AR247: 1, AR255: 1, AR262: 1, AR257: 1, AR183: 1, AR286: 1, AR236: 1, AR256: 1, AR293: 1, AR254: 1, AR295: 1, AR178: 1, AR297: 1, AR238: 1, AR296: 1, |
| | | | | AR168: 1, L0758: 14, H0457: 10, H0556: 5, S0114: 5, L0748: 5, L0756: 5, H0657: 4, H0620: 4, H0328: 4, H0591: 4, L0754: 4, L0779: 4, H0589: 3, L0532: 3, |
| | | | | H0445: 3, H0341: 2, H0580: 2, H0208: 2, H0619: 2, H0486: 2, H0013: 2, L0471: 2, H0024: 2, H0673: 2, H0674: 2, H0038: 2, H0264: 2, H0561: 2, L0803: 2, |
| | | | | L0606: 2, L0519: 2, S0216: 2, L0749: 2, L0777: 2, L0589: 2, H0171: 1, S0218: 1, S0212: 1, H0255: 1, H0305: 1, S0358: 1, S0444: 1, H0329: 1, L0717: 1, S0222: 1, |
| | | | | H0370: 1, H0438: 1, H0586: 1, H0574: 1, H0632: 1, H0581: 1, H0310: 1, H0544: 1, H0009: 1, H0123: 1, H0350: 1, S0003: 1, H0252: 1, H0615: 1, H0644: 1, |
| | | | | H0598: 1, S0036: 1, H0090: 1, H0063: 1, S0038: 1, H0625: 1, H0538: 1, L0373: 1, L0794: 1, L0650: 1, L0774: 1, L0805: 1, L0559: 1, L0558: 1, L0659: 1, L0526: 1, |
| | | | | H0144: 1, H0520: 1, H0696: 1, S0206: 1, S0434: 1, S0011: 1, S0026: 1, H0543: 1 and H0423: 1. |
| 231 | HODFN71 | 1194866 | 241 | AR282: 12, AR176: 8, AR162: 6, AR163: 5, AR170: 5, AR161: 5, AR266: 5, AR182: 5, AR181: 5, AR055: 5, AR228: 4, AR060: 4, AR204: 4, AR269: 4, AR239: 4, |
| | | | | AR264: 4, AR233: 4, AR268: 4, AR229: 4, AR236: 4, AR177: 4, AR309: 4, AR267: 4, AR257: 3, AR197: 3, AR225: 3, AR224: 3, AR253: 3, AR222: 3, AR201: 3, |
| | | | | AR165: 3, AR242: 3, AR289: 3, AR193: 3, AR183: 3, AR270: 3, AR274: 3, AR237: 3, AR179: 3, AR217: 3, AR196: 3, AR272: 3, AR166: 3, AR207: 3, AR164: 3, |
| | | | | AR235: 3, AR185: 3, AR300: 3, AR180: 3, AR293: 3, AR290: 3, AR286: 3, AR311: 3, AR255: 3, AR238: 3, AR171: 3, AR299: 3, AR089: 3, AR247: 3, AR188: 3, |
| | | | | AR261: 3, AR287: 3, AR234: 3, AR291: 3, AR200: 3, AR175: 2, AR061: 2, AR294: 2, AR295: 2, AR203: 2, AR283: 2, AR316: 2, AR262: 2, AR214: 2, AR191: 2, |
| | | | | AR190: 2, AR271: 2, AR297: 2, AR178: 2, AR231: 2, AR227: 2, AR104: 2, AR288: 2, AR277: 2, AR285: 2, AR243: 2, AR226: 2, AR039: 2, AR096: 2, AR296: 2, |
| | | | | AR232: 2, AR312: 2, AR173: 2, AR260: 2, AR053: 2, AR168: 2, AR313: 2, AR230: 2, AR210: 1, AR258: 1, AR213: 1, AR174: 1, AR215: 1, AR218: 1, AR033: 1, |
| | | | | AR240: 1, AR256: 1, AR308: 1, AR189: 1, AR252: 1, AR211: 1, H0615: 2 and H0624: 1. |
| | HODFN71 | 834999 | 456 | |
| 232 | HODGE68 | 834907 | 242 | AR161: 8, AR162: 8, AR163: 8, AR313: 7, AR039: 6, AR173: 6, AR180: 6, AR176: 6, AR182: 6, AR242: 6, AR060: 6, AR055: 6, AR270: 5, AR181: 5, AR236: 5, |
| | | | | AR293: 5, AR309: 5, AR240: 5, AR096: 5, AR175: 5, AR165: 5, AR300: 5, AR282: 5, AR089: 5, AR053: 5, AR204: 5, AR185: 5, AR275: 5, AR233: 5, AR164: 5, |
| | | | | AR269: 5, AR261: 5, AR177: 5, AR257: 5, AR178: 5, AR229: 5, AR196: 5, AR166: 5, AR264: 4, AR179: 4, AR201: 4, AR228: 4, AR262: 4, AR299: 4, AR294: 4, |
| | | | | AR231: 4, AR274: 4, AR247: 4, AR183: 4, AR174: 4, AR191: 4, AR255: 4, AR266: 4, AR198: 4, AR316: 4, AR271: 4, AR238: 4, AR287: 4, AR218: 4, AR239: 4, |
| | | | | AR277: 4, AR230: 4, AR288: 4, AR267: 4, AR212: 4, AR237: 4, AR268: 4, AR258: 4, AR199: 4, AR297: 4, AR234: 4, AR104: 3, AR197: 3, AR263: 3, AR295: 3, |
| | | | | AR311: 3, AR168: 3, AR226: 3, AR170: 3, AR219: 3, AR285: 3, AR296: 3, AR312: 3, AR250: 3, AR188: 3, AR290: 3, AR291: 3, AR203: 3, AR283: 3, AR272: 3, |
| | | | | AR217: 3, AR286: 3, AR190: 3, AR289: 3, AR214: 3, AR225: 3, AR260: 3, AR207: 3, AR033: 3, AR245: 3, AR195: 3, AR061: 3, AR223: 3, AR216: 2, AR189: 2, |
| | | | | AR200: 2, AR171: 2, AR227: 2, AR254: 2, AR232: 2, AR243: 2, AR193: 2, AR213: 2, AR211: 2, AR210: 2, AR256: 1, AR169: 1, AR246: 1, AR308: 1, AR252: 1, |
| | | | | AR215: 1, AR224: 1, H0615: 1 |
| 233 | HOEDB32 | 634994 | 243 | L0807: 6, L0747: 5, S0126: 4, L0779: 4, L0771: 3, H0696: 3, L0740: 3, L0750: 3, S0358: 2, S0222: 2, L0471: 2, L0772: 2, L0662: 2, L0774: 2, L0809: 2, H0690: 2, |
| | | | | H0670: 2, S0378: 2, L0439: 2, L0755: 2, L0757: 2, L0362: 2, T0049: 1, S0180: 1, S0212: 1, H0662: 1, S0442: 1, S0360: 1, H0722: 1, H0208: 1, H0486: 1, T0039: 1, |
| | | | | T0040: 1, L2637: 1, L0021: 1, H0327: 1, H0546: 1, H0545: 1, H0123: 1, H0012: 1, H0620: 1, H0024: 1, H0687: 1, H0615: 1, H0551: 1, H0413: 1, T0042: 1, |
| | | | | L0065: 1, S0150: 1, L0637: 1, L0646: 1, L0363: 1, L0649: 1, L0775: 1, L0806: 1, L0652: 1, L0661: 1, L0657: 1, L0647: 1, L0793: 1, L0663: 1, L0664: 1, L0708: 1, |
| | | | | L2651: 1, H0144: 1, S0374: 1, S0148: 1, H0547: 1, H0519: 1, H0539: 1, S0152: 1, S0406: 1, S0028: 1, L0745: 1, L0756: 1, L0780: 1, L0759: 1, S0434: 1, S0436: 1, |
| | | | | L0361: 1, S0194: 1 and H0352: 1. |
| 234 | HOFMQ33 | 1184465 | 244 | AR205: 90, AR212: 77, AR245: 75, AR274: 68, AR272: 67, AR216: 65, AR246: 62, AR252: 60, AR308: 59, AR213: 59, AR214: 55, AR312: 54, AR215: 54, |
| | | | | AR197: 50, AR309: 50, AR254: 50, AR053: 50, AR217: 49, AR171: 49, AR221: 49, AR195: 48, AR311: 45, AR225: 45, AR223: 44, AR264: 44, AR170: 44, |
| | | | | AR189: 44, AR199: 43, AR210: 43, AR263: 43, AR168: 43, AR247: 43, AR243: 41, AR224: 41, AR172: 41, AR253: 40, AR222: 40, AR169: 39, AR164: 37, |
| | | | | AR250: 37, AR174: 37, AR271: 36, AR166: 36, AR198: 36, AR165: 36, AR201: 34, AR188: 34, AR162: 34, AR190: 32, AR163: 32, AR242: 32, AR161: 32, |
| | | | | AR204: 29, AR193: 28, AR173: 27, AR192: 26, AR313: 26, AR236: 25, AR291: 24, AR177: 24, AR275: 24, AR290: 24, AR256: 23, AR039: 22, AR262: 22, |
| | | | | AR096: 22, AR191: 22, AR240: 22, AR219: 22, AR200: 22, AR185: 22, AR179: 21, AR218: 21, AR089: 21, AR211: 20, AR300: 20, AR288: 20, AR175: 20, |
| | | | | AR297: 20, AR289: 20, AR295: 19, AR255: 19, AR261: 19, AR299: 19, AR203: 19, AR207: 19, AR293: 18, AR196: 18, AR268: 17, AR237: 17, AR296: 17, |
| | | | | AR258: 17, AR282: 16, AR316: 16, AR285: 16, AR231: 15, AR269: 15, AR257: 15, AR178: 14, AR234: 14, AR287: 14, AR181: 14, AR230: 14, AR033: 14, |
| | | | | AR260: 14, AR267: 14, AR061: 14, AR233: 14, AR239: 14, AR183: 13, AR266: 13, AR270: 13, AR229: 13, AR286: 13, AR277: 12, AR180: 12, AR060: 12, |
| | | | | AR238: 12, AR226: 12, AR232: 12, AR176: 12, AR227: 11, AR294: 11, AR228: 10, AR283: 9, AR235: 9, AR182: 8, AR104: 7, AR055: 5, H0415: 1 |
| | HOFMQ33 | 919896 | 457 | |
| | HOFMQ33 | 906694 | 458 | |
| | HOFMQ33 | 902639 | 459 | |
| | HOFMQ33 | 702186 | 460 | |
| 235 | HOFMT75 | 911180 | 245 | AR192: 4, AR225: 3, AR217: 2, AR235: 2, AR172: 2, AR171: 2, AR183: 2, AR254: 2, AR168: 2, AR266: 2, AR170: 1, AR309: 1, AR193: 1, AR180: 1, AR270: 1, |
| | | | | AR175: 1, AR282: 1, AR165: 1, AR224: 1, AR277: 1, AR164: 1, AR300: 1, AR264: 1, AR039: 1, AR216: 1, AR291: 1, AR240: 1, H0415: 3, S0002: 2, S0212: 1, |
| | | | | H0255: 1, S0358: 1, H0318: 1, H0045: 1, H0264: 1, S0144: 1, H0555: 1 and L0741: 1. |
| | HOFMT75 | 905365 | 461 | |
| | HOFMT75 | 892308 | 462 | |
| | HOFMT75 | 892291 | 463 | |
| 236 | HOFNY91 | 847425 | 246 | AR215: 17, AR221: 11, AR225: 11, AR291: 10, AR217: 10, AR165: 9, AR216: 9, AR189: 8, AR231: 8, AR166: 8, AR169: 7, AR296: 7, AR285: 7, AR250: 7, |
| | | | | AR223: 7, AR182: 7, AR191: 6, AR210: 6, AR234: 6, AR288: 6, AR264: 6, AR168: 6, AR214: 6, AR171: 6, AR275: 6, AR257: 6, AR190: 6, AR161: 6, AR089: 5, |
| | | | | AR174: 5, AR238: 5, AR227: 5, AR175: 5, AR180: 5, AR290: 5, AR222: 5, AR200: 5, AR211: 5, AR228: 4, AR195: 4, AR224: 4, AR237: 4, AR188: 4, AR258: 4, |
| | | | | AR170: 4, AR272: 4, AR172: 3, AR247: 3, AR179: 3, AR055: 3, AR282: 3, AR316: 3, AR277: 3, AR240: 3, AR197: 3, AR289: 3, AR262: 3, AR239: 3, AR219: 3, |
| | | | | AR060: 3, AR096: 3, AR286: 3, AR061: 3, AR300: 2, AR313: 2, AR233: 2, AR269: 2, AR033: 2, AR185: 2, AR308: 2, AR173: 2, AR229: 2, AR287: 2, AR299: 2, |
| | | | | AR295: 2, AR236: 2, AR260: 2, AR255: 1, AR226: 1, AR293: 1, AR164: 1, AR212: 1, AR297: 1, AR104: 1, AR232: 1, AR274: 1, AR162: 1, AR270: 1, AR218: 1, |
| | | | | AR177: 1, AR312: 1, AR178: 1, AR266: 1, AR196: 1, L0803: 8, H0341: 6, L0771: 6, L0766: 6, H0521: 6, L0731: 6, S0354: 5, L0770: 5, H0519: 5, L0439: 5, |
| | | | | L0754: 5, H0009: 4, S0422: 4, L0800: 4, L0521: 4, L0662: 4, L0805: 4, L0438: 4, S0028: 4, L0758: 4, S0436: 4, L0485: 4, L0601: 4, H0657: 3, H0638: 3, S0418: 3, |
| | | | | H0733: 3, S0007: 3, S0222: 3, L3655: 3, S0214: 3, H0673: 3, L0794: 3, L0776: 3, L0809: 3, L3391: 3, H0144: 3, H0670: 3, S0406: 3, L0756: 3, H0667: 3, S0420: 2, |
| | | | | S0358: 2, S0360: 2, H0729: 2, S0476: 2, H0645: 2, S0300: 2, L2543: 2, H0156: 2, S0010: 2, H0178: 2, H0375: 2, S6028: 2, H0266: 2, S0003: 2, H0428: 2, H0169: 2, |
| | | | | S0036: 2, H0634: 2, H0529: 2, L0369: 2, L0640: 2, L0637: 2, L0761: 2, L0646: 2, L0649: 2, L0774: 2, L0775: 2, L0807: 2, L0659: 2, L0783: 2, L5622: 2, L0666: 2, |
| | | | | L0665: 2, L2653: 2, L2264: 2, H0725: 2, L3827: 2, H0547: 2, H0435: 2, H0659: 2, S0380: 2, S3014: 2, S0206: 2, L0752: 2, L0759: 2, S0434: 2, L0596: 2, H0668: 2, |
| | | | | H0170: 1, H0556: 1, S0342: 1, H0713: 1, H0717: 1, H0716: 1, H0294: 1, L2877: 1, T0049: 1, S0218: 1, L2910: 1, L2915: 1, L2991: 1, S0282: 1, S0400: 1, L2289: 1, |
| | | | | H0241: 1, H0402: 1, L0534: 1, L0539: 1, S0376: 1, S0444: 1, S0410: 1, H0728: 1, H0734: 1, H0229: 1, S0045: 1, H0749: 1, S6026: 1, H0406: 1, S0220: 1, H0441: 1, |
| | | | | H0415: 1, H0438: 1, H0362: 1, H0333: 1, H0574: 1, H0486: 1, L1819: 1, L0060: 1, H0013: 1, H0427: 1, H0599: 1, H0575: 1, H0318: 1, S0474: 1, H0581: 1, |
| | | | | H0374: 1, H0085: 1, T0110: 1, H0150: 1, H0563: 1, S0388: 1, S0051: 1, H0687: 1, H0039: 1, H0030: 1, H0553: 1, H0644: 1, H0628: 1, H0166: 1, L0455: 1, |
| | | | | H0708: 1, S0366: 1, H0090: 1, H0591: 1, H0038: 1, H0551: 1, H0380: 1, H0623: 1, S0386: 1, T0042: 1, H0494: 1, H0561: 1, S0370: 1, H0509: 1, H0130: 1, |
| | | | | H0641: 1, L0598: 1, L0769: 1, L0638: 1, L0796: 1, L0667: 1, L0630: 1, L0373: 1, L0641: 1, L0773: 1, L5569: 1, L5574: 1, L0381: 1, L0806: 1, L0661: 1, L0527: 1, |
| | | | | L0518: 1, L5623: 1, L0789: 1, L0790: 1, L0793: 1, L0710: 1, L2262: 1, L2380: 1, L2412: 1, S0374: 1, H0520: 1, S0126: 1, H0648: 1, H0522: 1, H0555: 1, S0392: 1, |
| | | | | S3012: 1, L0742: 1, L0749: 1, L0777: 1, L0753: 1, L0755: 1, L0757: 1, L0366: 1, S0026: 1, S0276: 1, S0196: 1, H0542: 1, H0543: 1, L3357: 1 and L3372: 1. |
| 237 | HOFOC73 | 931871 | 247 | AR294: 16, AR169: 6, AR245: 6, AR192: 6, AR170: 6, AR195: 6, AR263: 5, AR039: 5, AR164: 4, AR165: 4, AR215: 4, AR053: 4, AR266: 4, AR172: 4, AR161: 4, |
| | | | | AR212: 4, AR162: 4, AR089: 4, AR222: 4, AR223: 4, AR213: 4, AR274: 4, AR261: 3, AR254: 3, AR272: 3, AR221: 3, AR264: 3, AR171: 3, AR205: 3, AR225: 3, |
| | | | | AR168: 3, AR193: 3, AR060: 3, AR217: 3, AR277: 3, AR096: 3, AR224: 3, AR282: 3, AR175: 3, AR308: 3, AR312: 3, AR214: 3, AR196: 3, AR288: 3, AR235: 2, |
| | | | | AR180: 2, AR197: 2, AR311: 2, AR283: 2, AR299: 2, AR240: 2, AR316: 2, AR295: 2, AR216: 2, AR297: 2, AR270: 2, AR236: 2, AR291: 2, AR104: 2, AR055: 2, |
| | | | | AR188: 2, AR238: 2, AR201: 2, AR300: 2, AR246: 2, AR191: 2, AR293: 2, AR243: 2, AR309: 2, AR176: 2, AR247: 2, AR289: 2, AR257: 2, AR174: 2, AR285: 2, |
| | | | | AR173: 2, AR185: 2, AR200: 2, AR178: 2, AR190: 2, AR267: 2, AR210: 2, AR177: 2, AR268: 2, AR290: 2, AR233: 2, AR275: 2, AR203: 2, AR189: 2, AR181: 1, |
| | | | | AR286: 1, AR287: 1, AR033: 1, AR313: 1, AR296: 1, AR199: 1, AR228: 1, AR227: 1, AR231: 1, AR262: 1, AR237: 1, AR252: 1, AR218: 1, AR242: 1, AR207: 1, |
| | | | | AR234: 1, AR226: 1, AR258: 1, L0740: 8, L0748: 7, L0749: 7, L0752: 4, L0588: 4, L0750: 3, L0757: 3, L0759: 3, S0436: 3, S0358: 2, H0415: 2, H0090: 2, |
| | | | | L0774: 2, L0805: 2, L0776: 2, L0783: 2, L0809: 2, L0751: 2, L0747: 2, S0040: 1, S0420: 1, S0442: 1, S0376: 1, S0360: 1, S0408: 1, H0580: 1, H0550: 1, L0586: 1, |
| | | | | H0036: 1, S0346: 1, H0581: 1, T0110: 1, H0597: 1, H0530: 1, H0123: 1, H0083: 1, H0354: 1, H0510: 1, T0069: 1, H0560: 1, S0210: 1, L0763: 1, L0637: 1, L0646: 1, |
| | | | | L0800: 1, L0771: 1, L0773: 1, L0775: 1, L0659: 1, L0789: 1, L0666: 1, H0691: 1, H0576: 1, H0478: 1, H0626: 1, L0731: 1, H0444: 1, L0592: 1 and S0242: 1. |
| | HOFOC73 | 907073 | 464 | |
| | HOFOC73 | 907072 | 465 | |
| | HOFOC73 | 878863 | 466 | |
| 238 | HOGAW62 | 579891 | 248 | AR039: 34, AR313: 23, AR299: 21, AR096: 19, AR089: 15, AR104: 11, AR300: 10, AR219: 10, AR185: 10, AR316: 8, AR277: 8, AR060: 7, AR218: 7, AR240: 6, |
| | | | | AR282: 6, AR215: 5, AR055: 4, AR196: 3, AR263: 2, AR169: 2, AR271: 2, AR168: 2, AR182: 2, AR283: 2, AR198: 2, AR163: 2, AR254: 2, AR243: 2, AR257: 2, |
| | | | | AR176: 2, AR165: 2, AR180: 2, AR297: 1, AR164: 1, AR205: 1, AR230: 1, AR275: 1, AR217: 1, AR291: 1, AR270: 1, AR213: 1, AR312: 1, AR247: 1, AR193: 1, |
| | | | | AR269: 1, AR266: 1, H0435: 2, S0114: 1, L0606: 1 and H0779: 1. |
| 239 | HOHCH55 | 827481 | 249 | AR169: 3, AR225: 3, AR223: 3, AR178: 3, AR170: 3, AR253: 3, AR172: 2, AR168: 2, AR161: 2, AR224: 2, AR310: 2, AR284: 2, AR246: 2, AR282: 2, AR171: 2, |
| | | | | AR311: 1, AR217: 1, AR206: 1, AR166: 1, AR213: 1, AR277: 1, AR186: 1, AR265: 1, AR240: 1, AR295: 1, AR266: 1, S0276: 12, S0196: 5, H0024: 4, S0250: 4, |
| | | | | S0022: 3, S0040: 2, S0028: 2, S0298: 1, T0082: 1, H0545: 1, S0206: 1, S0011: 1 and S0194: 1. |
| | HOHCH55 | 815682 | 467 | |
| 240 | HOQBJ82 | 1352356 | 250 | AR207: 16, AR197: 15, AR309: 14, AR195: 13, AR311: 13, AR263: 13, AR224: 13, AR264: 13, AR245: 13, AR223: 12, AR235: 12, AR253: 12, AR252: 12, |
| | | | | AR246: 11, AR201: 11, AR222: 10, AR170: 10, AR171: 10, AR221: 10, AR053: 10, AR312: 10, AR172: 9, AR308: 9, AR198: 9, AR169: 9, AR225: 9, AR168: 9, |
| | | | | AR242: 9, AR214: 9, AR215: 9, AR177: 9, AR192: 9, AR212: 9, AR272: 9, AR165: 9, AR295: 8, AR196: 8, AR089: 8, AR166: 8, AR271: 8, AR261: 8, AR216: 8, |
| | | | | AR164: 8, AR210: 8, AR200: 7, AR199: 7, AR213: 7, AR218: 7, AR277: 7, AR254: 7, AR288: 7, AR176: 7, AR219: 7, AR316: 7, AR193: 7, AR274: 7, AR240: 7, |
| | | | | AR285: 7, AR181: 7, AR236: 7, AR217: 7, AR282: 7, AR204: 7, AR178: 7, AR211: 6, AR291: 6, AR275: 6, AR286: 6, AR162: 6, AR161: 6, AR287: 6, AR060: 6, |
| | | | | AR247: 6, AR203: 6, AR096: 6, AR250: 6, AR163: 6, AR243: 6, AR188: 6, AR183: 6, AR033: 6, AR205: 6, AR266: 6, AR191: 6, AR268: 6, AR174: 6, AR180: 6, |
| | | | | AR189: 6, AR293: 5, AR229: 5, AR104: 5, AR175: 5, AR289: 5, AR055: 5, AR270: 5, AR299: 5, AR297: 5, AR296: 5, AR039: 5, AR313: 5, AR300: 5, AR231: 5, |
| | | | | AR262: 5, AR234: 5, AR290: 5, AR267: 5, AR257: 5, AR239: 5, AR233: 4, AR226: 4, AR238: 4, AR237: 4, AR269: 4, AR258: 4, AR173: 4, AR185: 4, AR228: 4, |
| | | | | AR294: 4, AR283: 4, AR182: 4, AR230: 4, AR061: 4, AR255: 4, AR190: 4, AR232: 4, AR179: 4, AR256: 4, AR260: 4, AR227: 3, L0766: 12, L0758: 7, H0616: 4, |
| | | | | L0439: 4, L0754: 4, L0747: 4, L0779: 4, L0777: 4, L0601: 4, H0657: 3, H0656: 3, H0081: 3, H0031: 3, H0038: 3, S0222: 2, H0455: 2, H0618: 2, H0617: 2, T0042: 2, |
| | | | | H0494: 2, S0210: 2, H0529: 2, L0769: 2, L0662: 2, L0794: 2, L0665: 2, H0445: 2, H0543: 2, H0170: 1, H0394: 1, H0556: 1, T0002: 1, S0029: 1, H0662: 1, S0358: 1, |
| | | | | S0045: 1, S0046: 1, S0140: 1, L0717: 1, H0370: 1, H0392: 1, H0497: 1, H0574: 1, H0253: 1, H0318: 1, H0597: 1, H0544: 1, H0545: 1, H0178: 1, L0157: 1, |
| | | | | L0471: 1, S0050: 1, H0014: 1, H0051: 1, T0010: 1, H0408: 1, H0266: 1, H0188: 1, H0290: 1, S0022: 1, H0135: 1, H0090: 1, H0040: 1, H0634: 1, H0264: 1, |
| | | | | S0448: 1, H0641: 1, S0142: 1, S0344: 1, L0770: 1, L0637: 1, L0645: 1, L0771: 1, L0521: 1, L0768: 1, L0803: 1, L0806: 1, L0805: 1, L0652: 1, L0653: 1, L0776: 1, |
| | | | | L0655: 1, L0629: 1, L0659: 1, L0789: 1, L0791: 1, L0663: 1, L0664: 1, H0519: 1, H0682: 1, H0539: 1, H0521: 1, H0522: 1, H0134: 1, H0214: 1, L0749: 1, L0750: 1, |
| | | | | H0667: 1, H0542: 1, H0423: 1 and H0422: 1. |
| | HOQBJ82 | 858338 | 468 | |
| | HOQBJ82 | 857453 | 469 | |
| 241 | HOSBY40 | 589431 | 251 | AR197: 6, AR309: 6, AR250: 5, AR176: 5, AR245: 4, AR169: 4, AR161: 4, AR162: 4, AR277: 4, AR163: 4, AR201: 4, AR282: 4, AR253: 4, AR198: 4, AR177: 4, |
| | | | | AR229: 3, AR272: 3, AR181: 3, AR089: 3, AR299: 3, AR193: 3, AR264: 3, AR269: 3, AR239: 3, AR190: 3, AR189: 3, AR246: 3, AR233: 3, AR237: 3, AR195: 3, |
| | | | | AR257: 3, AR238: 3, AR300: 3, AR313: 3, AR165: 3, AR270: 3, AR172: 3, AR166: 3, AR271: 3, AR275: 3, AR255: 3, AR240: 3, AR207: 2, AR274: 2, AR216: 2, |
| | | | | AR228: 2, AR312: 2, AR215: 2, AR183: 2, AR196: 2, AR226: 2, AR311: 2, AR096: 2, AR203: 2, AR262: 2, AR191: 2, AR247: 2, AR060: 2, AR268: 2, AR316: 2, |
| | | | | AR199: 2, AR188: 2, AR243: 2, AR205: 2, AR261: 2, AR231: 2, AR178: 2, AR180: 2, AR227: 2, AR223: 2, AR263: 2, AR232: 2, AR266: 2, AR222: 2, AR061: 2, |
| | | | | AR164: 2, AR258: 2, AR217: 1, AR200: 1, AR213: 1, AR224: 1, AR174: 1, AR283: 1, AR182: 1, AR267: 1, AR171: 1, AR185: 1, AR234: 1, AR192: 1, AR297: 1, |
| | | | | AR170: 1, S0418: 1, H0393: 1, S0003: 1, L0766: 1, L0804: 1 and S0052: 1. |
| 242 | HOSDJ25 | 854234 | 252 | AR207: 16, AR263: 14, AR235: 13, AR224: 13, AR225: 13, AR309: 12, AR196: 12, AR311: 12, AR214: 12, AR223: 12, AR172: 12, AR246: 11, AR168: 11, |
| | | | | AR217: 11, AR264: 11, AR171: 11, AR215: 11, AR170: 11, AR291: 10, AR221: 10, AR222: 10, AR295: 10, AR288: 10, AR195: 10, AR039: 10, AR277: 10, |
| | | | | AR192: 10, AR197: 10, AR161: 10, AR169: 10, AR162: 10, AR261: 9, AR216: 9, AR163: 9, AR165: 9, AR205: 9, AR210: 9, AR236: 9, AR177: 9, AR198: 9, |
| | | | | AR164: 9, AR089: 9, AR191: 9, AR245: 9, AR201: 9, AR242: 9, AR212: 9, AR166: 8, AR188: 8, AR285: 8, AR240: 8, AR174: 8, AR252: 8, AR290: 8, AR271: 8, |
| | | | | AR250: 8, AR260: 8, AR176: 8, AR219: 8, AR282: 8, AR200: 8, AR312: 8, AR316: 8, AR253: 8, AR181: 8, AR297: 7, AR060: 7, AR308: 7, AR096: 7, AR199: 7, |
| | | | | AR289: 7, AR286: 7, AR287: 7, AR293: 7, AR213: 7, AR262: 7, AR313: 7, AR180: 7, AR300: 7, AR269: 7, AR257: 7, AR193: 7, AR231: 6, AR275: 6, AR296: 6, |
| | | | | AR258: 6, AR255: 6, AR175: 6, AR218: 6, AR190: 6, AR053: 6, AR266: 6, AR178: 6, AR270: 6, AR268: 6, AR233: 6, AR243: 6, AR182: 6, AR189: 6, AR294: 6, |
| | | | | AR104: 6, AR185: 6, AR239: 6, AR173: 5, AR179: 5, AR204: 5, AR272: 5, AR256: 5, AR299: 5, AR274: 5, AR247: 5, AR033: 5, AR183: 5, AR211: 5, AR229: 5, |
| | | | | AR267: 5, AR234: 5, AR237: 5, AR055: 5, AR238: 4, AR228: 4, AR230: 4, AR203: 4, AR061: 4, AR283: 4, AR232: 4, AR226: 4, AR227: 3, AR254: 3, L0754: 4, |
| | | | | L0749: 4, L0659: 3, L0755: 3, S0356: 2, L0803: 2, L0750: 2, L0779: 2, L0599: 2, S0029: 1, H0661: 1, S0354: 1, H0642: 1, T0040: 1, L0021: 1, H0599: 1, H0510: 1, |
| | | | | S0003: 1, H0674: 1, H0316: 1, H0623: 1, S0422: 1, L0794: 1, L0522: 1, L0774: 1, L0526: 1, L0809: 1, H0520: 1, H0659: 1, H0670: 1, L0752: 1, L0608: 1 and |
| | | | | S0242: 1. |
| | HOSDJ25 | 566845 | 470 | |
| 243 | HOSFD58 | 614040 | 253 | AR238: 482, AR237: 434, AR232: 414, AR226: 409, AR227: 404, AR061: 378, AR273: 187, AR244: 186, AR231: 169, AR052: 154, AR241: 151, AR259: 146, |
| | | | | AR186: 140, AR194: 138, AR233: 132, AR206: 130, AR219: 116, AR184: 112, AR292: 111, AR202: 110, AR229: 107, AR234: 106, AR192: 104, AR205: 98, |
| | | | | AR280: 94, AR309: 89, AR293: 88, AR243: 87, AR033: 87, AR204: 87, AR218: 85, AR175: 85, AR271: 80, AR299: 78, AR096: 77, AR185: 77, AR213: 75, |
| | | | | AR300: 75, AR284: 75, AR177: 74, AR251: 74, AR298: 73, AR267: 73, AR055: 72, AR281: 71, AR315: 71, AR198: 70, AR274: 69, AR314: 69, AR313: 69, |
| | | | | AR312: 68, AR039: 67, AR310: 66, AR183: 66, AR290: 66, AR246: 63, AR282: 62, AR253: 61, AR256: 61, AR247: 59, AR294: 58, AR249: 57, AR053: 57, |
| | | | | AR179: 54, AR316: 52, AR295: 51, AR060: 50, AR265: 49, AR266: 48, AR269: 48, AR286: 48, AR283: 48, AR104: 47, AR289: 47, AR275: 46, AR270: 45, |
| | | | | AR240: 45, AR089: 44, AR248: 43, AR182: 42, AR277: 41, AR296: 40, AR258: 39, AR268: 39, AR285: 34, AR291: 33, AR263: 28, AR250: 20, AR245: 19, |
| | | | | AR272: 19, AR165: 19, AR166: 18, AR164: 18, AR252: 17, AR162: 16, AR163: 15, AR197: 15, AR254: 15, AR308: 14, AR161: 14, AR264: 14, AR225: 14, |
| | | | | AR195: 12, AR212: 12, AR172: 12, AR242: 11, AR178: 10, AR180: 9, AR199: 9, AR216: 9, AR217: 8, AR171: 8, AR224: 8, AR176: 8, AR311: 8, AR215: 8, |
| | | | | AR169: 8, AR214: 8, AR170: 8, AR173: 8, AR193: 8, AR297: 7, AR221: 7, AR174: 7, AR222: 7, AR223: 7, AR201: 7, AR207: 7, AR168: 6, AR211: 6, AR181: 6, |
| | | | | AR188: 6, AR189: 6, AR210: 5, AR288: 5, AR196: 4, AR191: 4, AR257: 4, AR235: 4, AR261: 4, AR287: 4, AR190: 4, AR203: 4, AR239: 4, AR236: 4, AR228: 4, |
| | | | | AR262: 3, AR255: 3, AR230: 3, AR200: 3, AR260: 2, L0666: 8, H0013: 7, H0046: 7, S0126: 7, S0214: 6, L0756: 6, L0439: 5, L0749: 5, L0362: 5, H0670: 4, |
| | | | | H0521: 4, L0777: 4, L0731: 4, H0624: 3, H0170: 3, H0171: 3, H0250: 3, H0024: 3, S0003: 3, H0038: 3, S0422: 3, L0775: 3, L0805: 3, H0144: 3, H0547: 3, S0028: 3, |
| | | | | L0742: 3, L0748: 3, H0341: 2, S0001: 2, S0045: 2, H0427: 2, H0052: 2, H0169: 2, S0036: 2, H0616: 2, S0150: 2, L0761: 2, L0646: 2, L0655: 2, L0659: 2, L0529: 2, |
| | | | | H0520: 2, H0522: 2, S0206: 2, L0747: 2, S0031: 2, H0423: 2, S0412: 2, H0556: 1, S0212: 1, S0282: 1, H0662: 1, H0638: 1, S0348: 1, S0442: 1, S0444: 1, H0208: 1, |
| | | | | S0300: 1, L3388: 1, S0278: 1, H0261: 1, H0550: 1, H0333: 1, H0574: 1, T0114: 1, H0575: 1, S0474: 1, H0581: 1, T0115: 1, H0050: 1, L0471: 1, H0014: 1, H0373: 1, |
| | | | | H0051: 1, S0051: 1, T0010: 1, S6028: 1, H0266: 1, H0687: 1, H0428: 1, H0039: 1, H0553: 1, H0644: 1, H0628: 1, H0674: 1, H0124: 1, H0090: 1, H0551: 1, |
| | | | | T0067: 1, H0268: 1, L0351: 1, T0041: 1, T0042: 1, S0440: 1, H0641: 1, H0646: 1, S0142: 1, S0344: 1, S0002: 1, H0529: 1, L0763: 1, L0769: 1, L0643: 1, L0771: 1, |
| | | | | L0521: 1, L0794: 1, L0766: 1, L0803: 1, L0774: 1, L0651: 1, L0517: 1, L0519: 1, L5622: 1, L0664: 1, L0665: 1, L0352: 1, L3827: 1, H0519: 1, S0122: 1, H0689: 1, |
| | | | | H0648: 1, H0672: 1, H0539: 1, S0380: 1, S0136: 1, H0478: 1, L0744: 1, L0779: 1, L0780: 1, L0758: 1, L0759: 1, S0436: 1, L0599: 1, S0026: 1, H0665: 1, H0136: 1 |
| | | | | and H0542: 1. |
| | HOSFD58 | 383513 | 471 | |
| 244 | HPDDC77 | 1306899 | 254 | AR060: 25, AR104: 24, AR089: 24, AR055: 22, AR185: 18, AR039: 15, AR096: 12, AR316: 11, AR218: 9, AR283: 9, AR300: 9, AR219: 8, AR299: 8, AR240: 7, |
| | | | | AR282: 7, AR207: 7, AR161: 6, AR162: 6, AR313: 6, AR163: 6, AR235: 6, AR198: 6, AR197: 6, AR204: 6, AR277: 5, AR201: 5, AR269: 5, AR228: 5, AR233: 5, |
| | | | | AR236: 5, AR176: 4, AR309: 4, AR246: 4, AR271: 4, AR180: 4, AR182: 4, AR229: 4, AR257: 4, AR181: 4, AR267: 4, AR178: 4, AR237: 4, AR225: 4, AR183: 4, |
| | | | | AR239: 4, AR275: 4, AR192: 4, AR294: 4, AR287: 4, AR177: 4, AR165: 4, AR268: 4, AR179: 4, AR270: 4, AR193: 3, AR164: 3, AR293: 3, AR166: 3, AR288: 3, |
| | | | | AR222: 3, AR311: 3, AR191: 3, AR171: 3, AR266: 3, AR230: 3, AR168: 3, AR261: 3, AR231: 3, AR196: 3, AR213: 3, AR061: 3, AR264: 3, AR173: 3, AR255: 3, |
| | | | | AR205: 3, AR291: 3, AR174: 3, AR175: 3, AR296: 3, AR290: 3, AR216: 3, AR272: 3, AR262: 3, AR234: 3, AR214: 2, AR169: 2, AR227: 2, AR238: 2, AR232: 2, |
| | | | | AR297: 2, AR263: 2, AR295: 2, AR289: 2, AR285: 2, AR053: 2, AR286: 2, AR188: 2, AR226: 2, AR190: 2, AR203: 2, AR033: 2, AR189: 2, AR243: 2, AR247: 2, |
| | | | | AR312: 2, AR199: 2, AR172: 2, AR258: 2, AR217: 2, AR260: 1, AR211: 1, AR256: 1, AR242: 1, AR200: 1, AR308: 1, AR224: 1, AR210: 1, L0754: 5, L0752: 5, |
| | | | | H0616: 4, L0362: 4, L0717: 3, H0587: 3, H0013: 3, L0766: 3, L0804: 3, S0136: 3, L0744: 3, L0745: 3, L0485: 3, L0005: 2, S0360: 2, H0156: 2, L0021: 2, H0575: 2, |
| | | | | H0581: 2, H0271: 2, H0687: 2, H0039: 2, H0553: 2, H0598: 2, H0413: 2, L0649: 2, L0774: 2, L0809: 2, L0666: 2, H0593: 2, S0378: 2, L0751: 2, H0543: 2, |
| | | | | H0624: 1, H0170: 1, H0657: 1, S0116: 1, S0376: 1, T0008: 1, H0586: 1, H0486: 1, H0635: 1, H0427: 1, H0274: 1, H0009: 1, H0123: 1, H0266: 1, S0340: 1, |
| | | | | S0003: 1, H0252: 1, T0023: 1, H0032: 1, H0674: 1, H0040: 1, H0488: 1, S0438: 1, S0422: 1, H0529: 1, L0369: 1, L0762: 1, L0646: 1, L0773: 1, L0648: 1, L0662: 1, |
| | | | | L0775: 1, L0655: 1, L0527: 1, L0659: 1, L0663: 1, L0664: 1, L0665: 1, S0428: 1, H0144: 1, H0702: 1, S0374: 1, H0435: 1, H0658: 1, H0670: 1, H0521: 1, H0187: 1, |
| | | | | H0436: 1, L0750: 1, L0686: 1, L0599: 1, S0192: 1, S0242: 1, S0194: 1 and H0506: 1. |
| | HPDDC77 | 422936 | 472 | |
| 245 | HPEAD79 | 520202 | 255 | AR277: 24, AR176: 5, AR039: 5, AR162: 5, AR205: 5, AR161: 5, AR235: 5, AR163: 5, AR282: 5, AR309: 5, AR168: 4, AR223: 4, AR228: 4, AR181: 4, AR266: 4, |
| | | | | AR182: 4, AR269: 4, AR229: 4, AR257: 3, AR233: 3, AR272: 3, AR178: 3, AR180: 3, AR165: 3, AR264: 3, AR261: 3, AR268: 3, AR195: 3, AR164: 3, AR275: 3, |
| | | | | AR166: 3, AR267: 3, AR183: 3, AR196: 3, AR238: 3, AR237: 3, AR236: 3, AR316: 3, AR171: 3, AR170: 3, AR179: 3, AR245: 3, AR060: 3, AR262: 3, AR193: 3, |
| | | | | AR177: 3, AR255: 3, AR242: 3, AR289: 3, AR201: 3, AR230: 3, AR311: 3, AR254: 3, AR215: 2, AR290: 2, AR294: 2, AR204: 2, AR216: 2, AR231: 2, AR287: 2, |
| | | | | AR299: 2, AR288: 2, AR227: 2, AR300: 2, AR033: 2, AR089: 2, AR191: 2, AR239: 2, AR173: 2, AR271: 2, AR225: 2, AR270: 2, AR295: 2, AR293: 2, AR296: 2, |
| | | | | AR234: 2, AR185: 2, AR285: 2, AR214: 2, AR226: 2, AR274: 2, AR190: 2, AR203: 2, AR096: 2, AR199: 2, AR189: 2, AR247: 2, AR297: 2, AR200: 2, AR217: 2, |
| | | | | AR246: 2, AR055: 2, AR175: 2, AR211: 2, AR232: 2, AR061: 2, AR283: 2, AR286: 2, AR053: 1, AR222: 1, AR263: 1, AR256: 1, AR260: 1, AR258: 1, AR210: 1, |
| | | | | AR291: 1, AR188: 1, AR174: 1, AR312: 1, AR252: 1, AR224: 1, AR219: 1, H0165: 1 |
| 246 | HPFCL43 | 535710 | 256 | AR274: 4, AR221: 3, AR163: 2, AR266: 2, AR171: 2, AR177: 2, AR289: 2, AR205: 2, AR264: 2, AR161: 1, AR225: 1, AR297: 1, AR217: 1, AR162: 1, AR053: 1, |
| | | | | AR269: 1, AR257: 1, AR282: 1, AR313: 1, AR172: 1, AR270: 1, AR212: 1, L0766: 3, L0731: 3, S0358: 2, H0529: 2, L0794: 2, L0777: 2, L0759: 2, H0624: 1, |
| | | | | H0657: 1, S0408: 1, H0441: 1, H0562: 1, H0083: 1, H0169: 1, H0413: 1, L0763: 1, L0500: 1, L0772: 1, L0768: 1, L5574: 1, L0803: 1, L0804: 1, L0655: 1, L0809: 1, |
| | | | | L0664: 1, H0144: 1, S0374: 1, H0648: 1, L0742: 1, L0745: 1, L0750: 1, L0752: 1, L0758: 1 and H0422: 1. |
| 247 | HPIBO15 | 1310868 | 257 | AR240: 10, AR211: 10, AR178: 9, AR270: 8, AR221: 8, AR295: 7, AR235: 7, AR161: 7, AR162: 7, AR189: 7, AR163: 7, AR288: 7, AR255: 6, AR191: 6, |
| | | | | AR175: 6, AR293: 6, AR096: 6, AR183: 6, AR182: 6, AR188: 6, AR269: 5, AR236: 5, AR190: 5, AR173: 5, AR180: 5, AR165: 5, AR174: 5, AR290: 5, AR164: 5, |
| | | | | AR274: 5, AR166: 5, AR060: 5, AR261: 5, AR179: 5, AR203: 5, AR195: 5, AR222: 5, AR055: 4, AR193: 4, AR181: 4, AR297: 4, AR291: 4, AR171: 4, AR197: 4, |
| | | | | AR168: 4, AR289: 4, AR266: 4, AR268: 4, AR296: 4, AR262: 4, AR287: 4, AR104: 4, AR196: 4, AR267: 4, AR247: 4, AR177: 4, AR299: 4, AR176: 4, AR033: 4, |
| | | | | AR246: 4, AR172: 4, AR225: 3, AR263: 3, AR286: 3, AR275: 3, AR217: 3, AR170: 3, AR316: 3, AR294: 3, AR285: 3, AR308: 3, AR228: 3, AR300: 3, AR282: 3, |
| | | | | AR089: 3, AR257: 3, AR277: 3, AR214: 3, AR238: 3, AR224: 3, AR245: 3, AR233: 3, AR210: 3, AR272: 3, AR201: 3, AR254: 3, AR309: 3, AR311: 3, AR243: 3, |
| | | | | AR264: 3, AR212: 3, AR215: 3, AR185: 3, AR312: 3, AR260: 3, AR213: 3, AR313: 3, AR053: 2, AR256: 2, AR200: 2, AR237: 2, AR231: 2, AR283: 2, AR229: 2, |
| | | | | AR061: 2, AR239: 2, AR216: 2, AR227: 2, AR232: 2, AR226: 2, AR258: 2, AR234: 2, AR230: 2, AR271: 2, AR199: 2, AR039: 1, AR223: 1, L0747: 8, L0749: 5, |
| | | | | L0755: 5, H0013: 3, L0769: 3, L0731: 3, S0212: 2, L0770: 2, L0803: 2, H0144: 2, L0756: 2, H0624: 1, H0171: 1, S0282: 1, H0776: 1, H0592: 1, H0427: 1, H0575: 1, |
| | | | | H0041: 1, H0124: 1, H0163: 1, H0038: 1, L0637: 1, L0774: 1, L0775: 1, L0791: 1, H0648: 1, H0756: 1, S0028: 1, L0439: 1, L0771: 1 and S0436: 1. |
| | HPIBO15 | 590741 | 473 | |
| 248 | HPICB53 | 1042309 | 258 | AR313: 55, AR196: 31, AR173: 27, AR165: 25, AR164: 24, AR161: 23, AR162: 23, AR166: 23, AR096: 22, AR242: 22, AR258: 21, AR089: 21, AR229: 20, |
| | | | | AR163: 19, AR180: 19, AR262: 19, AR247: 19, AR175: 19, AR240: 18, AR300: 18, AR199: 18, AR234: 17, AR179: 17, AR185: 17, AR299: 17, AR174: 16, |
| | | | | AR257: 16, AR312: 15, AR238: 14, AR218: 14, AR178: 14, AR182: 14, AR200: 14, AR191: 14, AR296: 14, AR285: 13, AR181: 13, AR293: 13, AR264: 13, |
| | | | | AR269: 13, AR177: 13, AR275: 13, AR226: 13, AR183: 13, AR213: 13, AR233: 13, AR219: 12, AR236: 12, AR192: 12, AR230: 12, AR316: 12, AR060: 12, |
| | | | | AR193: 12, AR189: 12, AR203: 12, AR294: 11, AR270: 11, AR053: 11, AR260: 11, AR039: 11, AR297: 10, AR231: 10, AR282: 10, AR287: 10, AR255: 9, |
| | | | | AR188: 9, AR274: 9, AR237: 9, AR261: 9, AR228: 9, AR212: 9, AR268: 9, AR286: 9, AR295: 8, AR277: 8, AR033: 8, AR288: 8, AR239: 7, AR245: 7, AR104: 7, |
| | | | | AR235: 7, AR263: 7, AR290: 7, AR267: 7, AR190: 7, AR227: 7, AR198: 7, AR308: 7, AR311: 7, AR176: 6, AR250: 6, AR309: 6, AR207: 6, AR254: 6, AR201: 6, |
| | | | | AR197: 6, AR291: 6, AR256: 5, AR266: 5, AR243: 5, AR204: 5, AR195: 5, AR271: 5, AR272: 5, AR211: 5, AR210: 5, AR283: 5, AR221: 4, AR252: 4, AR289: 4, |
| | | | | AR232: 4, AR055: 3, AR253: 3, AR205: 3, AR061: 3, AR217: 2, AR246: 2, AR214: 2, AR223: 2, AR216: 2, AR171: 2, AR168: 2, AR222: 2, AR225: 1, AR215: 1, |
| | | | | AR172: 1, S0150: 1 |
| | HPICB53 | 867835 | 474 | |
| 249 | HPJBI33 | 685699 | 259 | AR161: 12, AR162: 12, AR163: 12, AR313: 8, AR165: 8, AR229: 8, AR164: 8, AR166: 7, AR275: 6, AR247: 6, AR180: 5, AR264: 5, AR270: 5, AR173: 5, |
| | | | | AR233: 5, AR237: 5, AR174: 5, AR274: 5, AR176: 5, AR181: 5, AR177: 5, AR246: 5, AR240: 5, AR312: 4, AR263: 4, AR234: 4, AR309: 4, AR183: 4, AR096: 4, |
| | | | | AR179: 4, AR185: 4, AR182: 4, AR238: 4, AR269: 4, AR178: 4, AR282: 4, AR293: 4, AR272: 3, AR231: 3, AR296: 3, AR268: 3, AR196: 3, AR230: 3, AR104: 3, |
| | | | | AR226: 3, AR170: 3, AR089: 3, AR300: 3, AR228: 3, AR261: 3, AR175: 3, AR297: 3, AR236: 2, AR217: 2, AR291: 2, AR311: 2, AR169: 2, AR316: 2, AR255: 2, |
| | | | | AR033: 2, AR295: 2, AR294: 2, AR191: 2, AR267: 2, AR168: 2, AR171: 2, AR277: 2, AR286: 2, AR290: 2, AR262: 2, AR199: 2, AR227: 2, AR189: 2, AR239: 2, |
| | | | | AR203: 2, AR257: 2, AR285: 2, AR223: 2, AR299: 2, AR266: 2, AR060: 2, AR287: 2, AR214: 2, AR190: 1, AR200: 1, AR061: 1, AR308: 1, AR216: 1, AR213: 1, |
| | | | | AR224: 1, AR195: 1, AR289: 1, AR055: 1, S0152: 1 |
| 250 | HPIBK12 | 1011467 | 260 | AR215: 5, AR197: 4, AR039: 4, AR309: 4, AR245: 4, AR161: 3, AR162: 3, AR163: 3, AR204: 3, AR165: 3, AR225: 3, AR169: 3, AR264: 3, AR282: 3, AR272: 3, |
| | | | | AR089: 3, AR180: 3, AR213: 3, AR172: 3, AR253: 2, AR166: 2, AR212: 2, AR193: 2, AR252: 2, AR271: 2, AR312: 2, AR275: 2, AR164: 2, AR060: 2, AR240: 2, |
| | | | | AR216: 2, AR266: 2, AR201: 2, AR205: 2, AR183: 2, AR176: 2, AR195: 2, AR223: 2, AR283: 2, AR277: 1, AR311: 1, AR247: 1, AR313: 1, AR242: 1, AR199: 1, |
| | | | | AR299: 1, AR316: 1, AR188: 1, AR104: 1, AR168: 1, AR185: 1, AR291: 1, AR287: 1, AR231: 1, AR294: 1, AR230: 1, AR096: 1, S0152: 2 |
| | HPJBK12 | 525375 | 475 | |
| | HPJBK12 | 796925 | 476 | |
| | HPJBK12 | 699587 | 477 | |
| 251 | HPMDK28 | 846357 | 261 | AR055: 9, AR089: 9, AR218: 7, AR060: 7, AR104: 7, AR219: 7, AR299: 6, AR096: 6, AR185: 5, AR316: 4, AR313: 4, AR180: 4, AR039: 4, AR282: 4, AR283: 3, |
| | | | | AR198: 3, AR169: 3, AR165: 3, AR235: 3, AR242: 2, AR207: 2, AR300: 2, AR217: 2, AR223: 2, AR277: 2, AR286: 2, AR270: 2, AR224: 2, AR263: 2, AR163: 2, |
| | | | | AR161: 2, AR240: 2, AR166: 2, AR289: 2, AR272: 1, AR164: 1, AR172: 1, AR261: 1, AR252: 1, AR269: 1, AR295: 1, AR170: 1, AR297: 1, AR177: 1, S0358: 5, |
| | | | | L0809: 4, L0742: 4, L0743: 4, L0590: 4, H0543: 4, S0360: 3, H0031: 3, S0422: 3, L0763: 3, L0764: 3, L0766: 3, L0754: 3, H0716: 2, H0333: 2, H0266: 2, H0617: 2, |
| | | | | L4497: 2, L0769: 2, L0776: 2, H0658: 2, H0696: 2, L0748: 2, L0749: 2, H0445: 2, S0434: 2, S0110: 1, H0663: 1, L0481: 1, H0730: 1, H0747: 1, H0411: 1, H0431: 1, |
| | | | | H0370: 1, H0574: 1, H0632: 1, L2490: 1, H0253: 1, H0052: 1, H0546: 1, H0545: 1, H0150: 1, H0123: 1, H0012: 1, S0050: 1, S0051: 1, H0188: 1, S0003: 1, |
| | | | | H0428: 1, T0006: 1, H0606: 1, H0673: 1, H0090: 1, H0040: 1, H0412: 1, T0069: 1, S0112: 1, S0344: 1, H0538: 1, H0529: 1, L0770: 1, L0761: 1, L0662: 1, L0768: 1, |
| | | | | L0794: 1, L0560: 1, L0775: 1, L0806: 1, L0517: 1, L0540: 1, L0384: 1, L5622: 1, L0666: 1, L0665: 1, L2260: 1, L2654: 1, S0374: 1, H0684: 1, L3832: 1, S0004: 1, |
| | | | | S0390: 1, S3014: 1, L0439: 1, L0740: 1, L0747: 1, L0756: 1, L0779: 1, S0436: 1, L0480: 1, L0596: 1, S0026: 1, S0276: 1, S0196: 1, L2854: 1 and L3612: 1. |
| | HPMDK28 | 639118 | 478 | |
| 252 | HPMFP40 | 638165 | 262 | AR282: 6, AR180: 3, AR197: 3, AR242: 3, AR161: 3, AR245: 3, AR163: 3, AR162: 2, AR263: 2, AR230: 2, AR240: 2, AR224: 2, AR176: 2, AR235: 2, AR177: 2, |
| | | | | AR283: 1, AR223: 1, AR299: 1, AR178: 1, AR272: 1, AR277: 1, AR171: 1, AR089: 1, H0031: 6 |
| 253 | HPRAL78 | 1352342 | 263 | AR104: 11, AR089: 10, AR060: 9, AR283: 7, AR277: 7, AR039: 6, AR055: 6, AR316: 6, AR096: 6, AR219: 6, AR263: 5, AR299: 5, AR218: 5, AR313: 5, |
| | | | | AR185: 5, AR240: 5, AR282: 5, AR206: 3, AR204: 3, AR300: 2, AR312: 2, AR291: 2, AR251: 2, AR246: 2, AR052: 2, AR184: 2, AR202: 2, AR290: 2, AR232: 2, |
| | | | | AR295: 2, AR238: 2, AR237: 2, AR298: 2, AR270: 2, AR309: 2, AR292: 2, AR268: 2, AR285: 1, AR177: 1, AR310: 1, AR182: 1, AR213: 1, AR226: 1, AR053: 1, |
| | | | | AR186: 1, AR175: 1, AR289: 1, AR205: 1, AR183: 1, AR233: 1, AR294: 1, AR284: 1, AR229: 1, H0694: 5, L0759: 5, L0766: 4, H0261: 3, S0222: 3, H0486: 3, |
| | | | | H0052: 3, L0731: 3, L3316: 2, H0252: 2, L0764: 2, L0662: 2, L0775: 2, L0657: 2, L0659: 2, L0530: 2, L0666: 2, L0748: 2, L0439: 2, L0750: 2, L0588: 2, L0594: 2, |
| | | | | H0224: 1, H0717: 1, H0656: 1, S0001: 1, S0360: 1, S0408: 1, H0729: 1, S0045: 1, H0619: 1, L3388: 1, H0592: 1, H0587: 1, H0333: 1, S0474: 1, H0014: 1, L0163: 1, |
| | | | | H0051: 1, H0355: 1, T0006: 1, H0644: 1, H0032: 1, H0212: 1, L0456: 1, H0124: 1, H0708: 1, S0036: 1, H0038: 1, H0616: 1, H0087: 1, H0059: 1, H0280: 1, |
| | | | | S0440: 1, S0150: 1, H0633: 1, L0369: 1, L0763: 1, L0769: 1, L0638: 1, L0637: 1, L5566: 1, L0761: 1, L0772: 1, L0648: 1, L0803: 1, L0650: 1, L0805: 1, L0809: 1, |
| | | | | L0647: 1, L0665: 1, H0539: 1, H0521: 1, H0696: 1, H0555: 1, L0754: 1, L0749: 1, L0753: 1, L0755: 1, L0757: 1, L0605: 1, L0599: 1 and L3352: 1. |
| | HPRAL78 | 844216 | 479 | |
| | HPRAL78 | 484735 | 480 | |
| 254 | HPRBC80 | 829136 | 264 | AR296: 40, AR291: 16, AR295: 15, AR289: 12, AR256: 12, AR235: 11, AR261: 11, AR266: 11, AR165: 11, AR277: 11, AR264: 11, AR164: 11, AR161: 11, |
| | | | | AR162: 11, AR260: 10, AR163: 10, AR297: 10, AR166: 10, AR285: 10, AR039: 9, AR257: 9, AR288: 9, AR089: 9, AR236: 9, AR263: 9, AR313: 8, AR191: 8, |
| | | | | AR204: 8, AR238: 8, AR287: 8, AR255: 8, AR286: 8, AR207: 8, AR253: 8, AR293: 8, AR309: 8, AR198: 8, AR242: 8, AR271: 7, AR096: 7, AR312: 7, AR262: 7, |
| | | | | AR196: 7, AR316: 7, AR205: 7, AR181: 7, AR192: 7, AR254: 7, AR282: 7, AR104: 7, AR311: 6, AR308: 6, AR171: 6, AR250: 6, AR053: 6, AR182: 6, AR055: 6, |
| | | | | AR225: 6, AR294: 6, AR269: 6, AR283: 6, AR240: 6, AR258: 6, AR217: 6, AR199: 6, AR270: 6, AR190: 6, AR173: 6, AR245: 5, AR272: 5, AR243: 5, AR176: 5, |
| | | | | AR224: 5, AR175: 5, AR177: 5, AR183: 5, AR200: 5, AR060: 5, AR299: 5, AR180: 5, AR268: 5, AR197: 5, AR188: 5, AR223: 5, AR170: 5, AR174: 5, AR218: 5, |
| | | | | AR221: 5, AR212: 5, AR246: 5, AR214: 5, AR193: 4, AR300: 4, AR213: 4, AR274: 4, AR195: 4, AR179: 4, AR178: 4, AR231: 4, AR275: 4, AR232: 4, AR189: 4, |
| | | | | AR267: 4, AR185: 4, AR201: 4, AR233: 4, AR168: 4, AR172: 4, AR219: 4, AR222: 4, AR216: 4, AR247: 4, AR290: 4, AR226: 4, AR211: 4, AR203: 4, AR033: 4, |
| | | | | AR239: 4, AR234: 4, AR252: 4, AR237: 3, AR215: 3, AR229: 3, AR228: 3, AR061: 3, AR230: 3, AR210: 2, AR227: 2, AR169: 2, L0805: 5, L0809: 5, L0759: 4, |
| | | | | L0740: 3, L0758: 3, H0657: 2, S0444: 2, H0032: 2, S0422: 2, L0650: 2, L0776: 2, L0789: 2, L0756: 2, L0595: 2, L0601: 2, L3643: 1, H0713: 1, T0049: 1, S0134: 1, |
| | | | | L0002: 1, S0001: 1, L0005: 1, S0442: 1, H0734: 1, H0747: 1, H0586: 1, H0013: 1, H0147: 1, H0070: 1, H0622: 1, H0553: 1, L0055: 1, H0674: 1, H0090: 1, |
| | | | | H0591: 1, H0616: 1, H0264: 1, H0272: 1, L0369: 1, L0641: 1, L0773: 1, L0662: 1, L0767: 1, L0794: 1, L0766: 1, L0649: 1, L0803: 1, L0651: 1, L0655: 1, L0526: 1, |
| | | | | L4501: 1, L0666: 1, L0664: 1, H0658: 1, H0670: 1, H0648: 1, H0710: 1, S0436: 1, L0362: 1, S0026: 1, H0136: 1, H0543: 1 and S0042: 1. |
| | HPRBC80 | 720095 | 481 | |
| 255 | HPTTG19 | 635033 | 265 | AR185: 7, AR060: 6, AR055: 6, AR162: 5, AR161: 5, AR163: 5, AR180: 5, AR176: 4, AR096: 4, AR243: 4, AR235: 4, AR269: 4, AR274: 4, AR182: 4, AR275: 4, |
| | | | | AR204: 4, AR089: 4, AR266: 4, AR236: 4, AR231: 3, AR271: 3, AR229: 3, AR300: 3, AR257: 3, AR261: 3, AR215: 3, AR196: 3, AR214: 3, AR228: 3, AR255: 3, |
| | | | | AR295: 3, AR233: 3, AR165: 3, AR270: 3, AR205: 3, AR201: 3, AR164: 3, AR240: 3, AR316: 3, AR191: 3, AR199: 3, AR193: 3, AR192: 3, AR282: 3, AR183: 3, |
| | | | | AR267: 3, AR238: 3, AR290: 3, AR294: 2, AR217: 2, AR216: 2, AR283: 2, AR181: 2, AR247: 2, AR287: 2, AR239: 2, AR061: 2, AR190: 2, AR286: 2, AR230: 2, |
| | | | | AR200: 2, AR234: 2, AR285: 2, AR237: 2, AR293: 2, AR179: 2, AR309: 2, AR277: 2, AR104: 2, AR039: 2, AR175: 2, AR272: 2, AR288: 2, AR299: 2, AR178: 2, |
| | | | | AR263: 2, AR312: 2, AR188: 2, AR291: 2, AR226: 2, AR219: 2, AR297: 2, AR166: 2, AR262: 2, AR296: 2, AR203: 2, AR258: 2, AR177: 2, AR289: 2, AR227: 2, |
| | | | | AR311: 1, AR264: 1, AR173: 1, AR222: 1, AR254: 1, AR268: 1, AR260: 1, AR198: 1, AR218: 1, AR232: 1, AR174: 1, AR210: 1, H0424: 3, H0637: 2, H0213: 2, |
| | | | | H0265: 1, H0556: 1, L0375: 1 and L0530: 1. |
| 256 | HPZAB47 | 585702 | 266 | AR313: 12, AR165: 9, AR164: 8, AR163: 8, AR166: 8, AR162: 8, AR173: 8, AR161: 7, AR242: 7, AR089: 7, AR180: 6, AR247: 6, AR096: 6, AR300: 6, AR178: 6, |
| | | | | AR175: 5, AR198: 5, AR257: 5, AR293: 5, AR262: 5, AR176: 5, AR183: 5, AR197: 5, AR181: 5, AR039: 5, AR229: 5, AR299: 5, AR309: 5, AR182: 5, AR254: 5, |
| | | | | AR204: 4, AR274: 4, AR258: 4, AR192: 4, AR269: 4, AR233: 4, AR179: 4, AR275: 4, AR226: 4, AR238: 4, AR235: 4, AR312: 4, AR264: 4, AR263: 4, AR291: 4, |
| | | | | AR060: 4, AR053: 4, AR174: 4, AR270: 4, AR316: 4, AR267: 4, AR212: 4, AR177: 4, AR234: 4, AR185: 4, AR271: 3, AR296: 3, AR172: 3, AR196: 3, AR268: 3, |
| | | | | AR168: 3, AR294: 3, AR261: 3, AR199: 3, AR297: 3, AR237: 3, AR250: 3, AR189: 3, AR285: 3, AR277: 3, AR239: 3, AR289: 3, AR228: 3, AR240: 3, AR308: 3, |
| | | | | AR283: 3, AR205: 3, AR203: 3, AR287: 3, AR201: 3, AR286: 3, AR266: 3, AR227: 3, AR224: 3, AR282: 3, AR193: 3, AR246: 3, AR231: 3, AR191: 3, AR260: 3, |
| | | | | AR255: 3, AR311: 2, AR213: 2, AR290: 2, AR188: 2, AR243: 2, AR236: 2, AR288: 2, AR104: 2, AR295: 2, AR218: 2, AR219: 2, AR033: 2, AR061: 2, AR232: 2, |
| | | | | AR190: 2, AR195: 2, AR256: 2, AR272: 2, AR200: 2, AR055: 1, AR230: 1, AR225: 1, AR211: 1, L0530: 2, S0470: 1, S0360: 1, T0003: 1, H0488: 1, L0789: 1, |
| | | | | S0378: 1 and S0168: 1. |
| 257 | HRAAB15 | 658717 | 267 | AR184: 5, AR263: 5, AR170: 5, AR171: 4, AR311: 4, AR265: 4, AR165: 4, AR221: 4, AR164: 4, AR166: 4, AR243: 4, AR308: 4, AR309: 4, AR225: 3, AR252: 3, |
| | | | | AR162: 3, AR169: 3, AR161: 3, AR195: 3, AR163: 3, AR053: 3, AR269: 3, AR282: 3, AR205: 3, AR312: 3, AR215: 3, AR217: 3, AR251: 3, AR267: 3, AR182: 2, |
| | | | | AR178: 2, AR183: 2, AR213: 2, AR310: 2, AR052: 2, AR089: 2, AR193: 2, AR249: 2, AR196: 2, AR264: 2, AR268: 2, AR180: 2, AR212: 2, AR033: 2, AR201: 2, |
| | | | | AR104: 2, AR277: 2, AR176: 2, AR313: 2, AR275: 2, AR291: 2, AR270: 2, AR219: 2, AR175: 2, AR238: 2, AR257: 2, AR247: 2, AR060: 2, AR231: 1, AR173: 1, |
| | | | | AR226: 1, AR191: 1, AR298: 1, AR288: 1, AR190: 1, AR039: 1, AR229: 1, AR223: 1, AR296: 1, AR295: 1, AR186: 1, AR218: 1, AR284: 1, AR234: 1, AR262: 1, |
| | | | | AR292: 1, AR290: 1, AR241: 1, AR203: 1, AR206: 1, AR096: 1, AR300: 1, AR299: 1, AR177: 1, AR274: 1, AR237: 1, AR287: 1, AR240: 1, AR188: 1, AR315: 1, |
| | | | | AR289: 1, AR285: 1, AR316: 1, AR286: 1, AR185: 1, AR230: 1, L0809: 2, S0374: 2, H0556: 1, H0580: 1, S0222: 1, H0551: 1, L0770: 1, L0796: 1, L0800: 1, |
| | | | | L0804: 1, L0655: 1, H0555: 1 and L0779: 1. |
| 258 | HRABA80 | 882176 | 268 | AR060: 929, AR104: 796, AR089: 725, AR055: 678, AR299: 627, AR283: 625, AR282: 494, AR185: 464, AR096: 462, AR316: 387, AR039: 363, AR240: 317, |
| | | | | AR277: 285, AR300: 278, AR218: 153, AR313: 152, AR219: 140, AR242: 4, AR221: 3, AR217: 2, AR291: 2, AR172: 2, AR205: 2, AR163: 2, AR165: 2, |
| | | | | AR178: 2, AR161: 2, AR168: 2, AR166: 2, AR164: 1, AR171: 1, AR195: 1, AR268: 1, AR180: 1, AR266: 1, AR215: 1, AR234: 1, AR230: 1, AR257: 1, AR199: 1, |
| | | | | AR270: 1, AR179: 1, H0555: 1 |
| | HRABA80 | 588460 | 482 | |
| 259 | HRACD15 | 871221 | 269 | AR193: 12, AR165: 11, AR164: 11, AR166: 10, AR299: 10, AR313: 9, AR162: 9, AR161: 9, AR246: 9, AR163: 9, AR205: 9, AR312: 9, AR311: 9, AR089: 8, |
| | | | | AR243: 8, AR245: 8, AR096: 8, AR195: 8, AR242: 7, AR176: 7, AR270: 7, AR291: 7, AR212: 7, AR297: 7, AR264: 7, AR288: 7, AR199: 7, AR197: 7, AR282: 7, |
| | | | | AR300: 6, AR240: 6, AR272: 6, AR196: 6, AR285: 6, AR275: 6, AR201: 6, AR200: 6, AR263: 6, AR213: 6, AR229: 6, AR221: 6, AR225: 6, AR183: 6, AR266: 6, |
| | | | | AR268: 5, AR293: 5, AR283: 5, AR255: 5, AR104: 5, AR247: 5, AR274: 5, AR308: 5, AR180: 5, AR262: 5, AR295: 5, AR236: 5, AR316: 5, AR254: 5, AR053: 5, |
| | | | | AR191: 5, AR215: 5, AR287: 5, AR277: 5, AR203: 5, AR238: 5, AR188: 5, AR223: 5, AR039: 5, AR235: 5, AR269: 4, AR261: 4, AR189: 4, AR309: 4, AR289: 4, |
| | | | | AR060: 4, AR258: 4, AR182: 4, AR175: 4, AR294: 4, AR210: 4, AR185: 4, AR286: 4, AR174: 4, AR178: 4, AR198: 4, AR192: 4, AR257: 4, AR177: 4, AR190: 4, |
| | | | | AR290: 4, AR173: 4, AR179: 4, AR033: 4, AR296: 3, AR214: 3, AR217: 3, AR181: 3, AR267: 3, AR170: 3, AR256: 3, AR231: 3, AR224: 3, AR253: 3, AR234: 3, |
| | | | | AR230: 3, AR239: 3, AR260: 3, AR237: 3, AR252: 3, AR250: 3, AR233: 3, AR216: 3, AR204: 2, AR226: 2, AR227: 2, AR232: 2, AR061: 2, AR228: 2, AR211: 2, |
| | | | | AR171: 2, AR222: 2, AR172: 2, AR168: 2, AR055: 2, AR207: 1, AR218: 1, H0556: 15, H0265: 8, L0751: 8, H0617: 7, L0662: 7, L0766: 5, L0809: 5, H0040: 4, |
| | | | | H0494: 4, S0142: 4, L0769: 4, H0555: 4, L0750: 4, H0543: 4, H0341: 3, L0534: 3, H0486: 3, L0649: 3, L0666: 3, H0658: 3, L0749: 3, L0758: 3, H0624: 2, S0040: 2, |
| | | | | L0415: 2, H0261: 2, H0549: 2, H0550: 2, H0618: 2, H0052: 2, S0150: 2, L0805: 2, L0807: 2, L0657: 2, L0790: 2, H0539: 2, S0380: 2, L0748: 2, L0747: 2, L0731: 2, |
| | | | | L0759: 2, S0434: 2, H0685: 1, S0114: 1, H0583: 1, H0483: 1, H0255: 1, H0305: 1, H0589: 1, H0125: 1, L0539: 1, S0444: 1, S0360: 1, H0729: 1, H0619: 1, S0278: 1, |
| | | | | H0392: 1, H0592: 1, L3817: 1, H0485: 1, H0635: 1, S0280: 1, H0599: 1, H0042: 1, H0194: 1, H0546: 1, H0046: 1, H0571: 1, H0050: 1, H0620: 1, H0024: 1, |
| | | | | H0594: 1, H0266: 1, H0416: 1, H0188: 1, H0290: 1, H0213: 1, H0031: 1, H0644: 1, H0628: 1, H0606: 1, H0166: 1, H0169: 1, H0124: 1, S0366: 1, H0598: 1, |
| | | | | H0135: 1, H0038: 1, H0616: 1, H0087: 1, H0100: 1, H0429: 1, S0016: 1, H0561: 1, H0132: 1, H0646: 1, S0422: 1, L0598: 1, H0529: 1, L0763: 1, L0638: 1, |
| | | | | L4747: 1, L0761: 1, L0800: 1, L0648: 1, L0774: 1, L0651: 1, L0378: 1, L0776: 1, L0629: 1, L0382: 1, L0788: 1, L0791: 1, L0663: 1, H0144: 1, H0593: 1, H0689: 1, |
| | | | | H0659: 1, S0406: 1, S0037: 1, L0745: 1, L0779: 1, L0752: 1, L0755: 1, S0394: 1, L0593: 1, S0026: 1, H0665: 1, H0542: 1, H0423: 1 and H0506: 1. |
| | HRACD15 | 706332 | 483 | |
| 260 | HRACJ35 | 877666 | 270 | AR222: 51, AR224: 51, AR221: 28, AR223: 24, AR225: 20, AR172: 14, AR171: 9, AR170: 9, AR182: 9, AR215: 9, AR214: 9, AR183: 8, AR216: 8, AR169: 8, |
| | | | | AR168: 7, AR268: 7, AR217: 7, AR180: 7, AR176: 5, AR269: 5, AR173: 5, AR266: 5, AR175: 4, AR270: 4, AR165: 4, AR164: 4, AR181: 4, AR166: 4, AR290: 4, |
| | | | | AR163: 4, AR238: 4, AR096: 4, AR161: 4, AR162: 4, AR195: 3, AR267: 3, AR274: 3, AR291: 3, AR243: 3, AR250: 3, AR289: 3, AR179: 3, AR316: 3, AR230: 3, |
| | | | | AR247: 3, AR282: 3, AR060: 3, AR257: 3, AR240: 2, AR104: 2, AR246: 2, AR196: 2, AR255: 2, AR177: 2, AR300: 2, AR228: 2, AR288: 2, AR231: 2, AR237: 2, |
| | | | | AR277: 2, AR174: 2, AR192: 2, AR178: 2, AR297: 2, AR191: 2, AR229: 2, AR226: 2, AR205: 2, AR061: 2, AR185: 2, AR190: 2, AR189: 2, AR263: 2, AR294: 2, |
| | | | | AR203: 2, AR233: 2, AR210: 2, AR275: 2, AR287: 1, AR089: 1, AR283: 1, AR234: 1, AR033: 1, AR311: 1, AR213: 1, AR055: 1, AR293: 1, AR227: 1, AR201: 1, |
| | | | | AR312: 1, AR200: 1, AR039: 1, AR188: 1, AR239: 1, AR296: 1, AR193: 1, L0731: 11, L0803: 7, L0748: 7, L0517: 6, L0809: 6, L0749: 6, L0439: 5, S0410: 4, |
| | | | | S0002: 4, L0770: 4, L0794: 4, L0805: 4, L3212: 4, S0436: 4, L3388: 3, H0553: 3, L0506: 3, L0747: 3, L0752: 3, H0713: 2, H0661: 2, H0244: 2, H0156: 2, H0644: 2, |
| | | | | L0662: 2, L0775: 2, L0666: 2, L0438: 2, H0521: 2, L0757: 2, L0758: 2, L0759: 2, H0171: 1, S0040: 1, H0650: 1, S0212: 1, S0358: 1, S0444: 1, S0360: 1, H0580: 1, |
| | | | | H0722: 1, H0208: 1, H0619: 1, H0441: 1, H0537: 1, H0497: 1, H0333: 1, H0632: 1, T0060: 1, H0013: 1, H0427: 1, S0346: 1, H0052: 1, H0231: 1, H0166: 1, |
| | | | | H0673: 1, S0364: 1, L0455: 1, H0163: 1, H0040: 1, S0015: 1, H0745: 1, H0509: 1, H0652: 1, S0210: 1, S0426: 1, L0796: 1, L0766: 1, L0804: 1, L0774: 1, L0776: 1, |
| | | | | L0659: 1, L0526: 1, L0783: 1, L0529: 1, L0647: 1, L0665: 1, H0144: 1, H0696: 1, H0555: 1, L0611: 1, S0028: 1, S0206: 1, L0751: 1, L0745: 1, S0260: 1, L0599: 1, |
| | | | | H0668: 1, L0698: 1 and S0460: 1. |
| | HRACJ35 | 730504 | 484 | |
| | HRACJ35 | 470546 | 485 | |
| 261 | HRDFD27 | 567004 | 271 | AR104: 15, AR039: 9, AR313: 8, AR096: 7, AR089: 7, AR235: 7, AR060: 7, AR185: 6, AR218: 6, AR055: 6, AR180: 6, AR161: 6, AR162: 6, AR163: 6, AR226: 6, |
| | | | | AR219: 6, AR033: 6, AR299: 6, AR173: 5, AR165: 5, AR164: 5, AR166: 5, AR196: 5, AR300: 5, AR316: 4, AR257: 4, AR309: 4, AR171: 4, AR240: 4, AR176: 4, |
| | | | | AR181: 4, AR179: 4, AR214: 4, AR212: 4, AR175: 4, AR183: 4, AR269: 4, AR178: 4, AR237: 4, AR191: 4, AR275: 4, AR282: 4, AR262: 4, AR239: 4, AR277: 4, |
| | | | | AR182: 4, AR264: 3, AR236: 3, AR247: 3, AR229: 3, AR174: 3, AR274: 3, AR268: 3, AR234: 3, AR233: 3, AR238: 3, AR258: 3, AR216: 3, AR225: 3, AR200: 3, |
| | | | | AR254: 3, AR231: 3, AR255: 3, AR228: 3, AR211: 3, AR267: 3, AR293: 3, AR203: 3, AR285: 3, AR177: 3, AR296: 3, AR283: 3, AR169: 3, AR294: 3, AR266: 3, |
| | | | | AR190: 3, AR290: 3, AR291: 3, AR189: 3, AR297: 2, AR286: 2, AR217: 2, AR288: 2, AR053: 2, AR289: 2, AR222: 2, AR188: 2, AR287: 2, AR205: 2, AR263: 2, |
| | | | | AR210: 2, AR227: 2, AR232: 2, AR312: 2, AR168: 2, AR204: 2, AR230: 2, AR261: 2, AR308: 2, AR199: 2, AR270: 2, AR272: 1, AR271: 1, AR295: 1, AR260: 1, |
| | | | | AR061: 1, AR195: 1, AR215: 1, AR256: 1, AR193: 1, H0305: 2, H0124: 2 and L0749: 1. |
| 262 | HRGBL78 | 910133 | 272 | AR052: 15, AR213: 14, AR053: 10, AR244: 8, AR096: 7, AR184: 6, AR215: 6, AR310: 5, AR251: 5, AR241: 5, AR221: 4, AR273: 4, AR170: 4, AR270: 3, |
| | | | | AR206: 3, AR249: 3, AR186: 3, AR284: 3, AR312: 3, AR290: 3, AR292: 3, AR168: 3, AR039: 3, AR266: 3, AR055: 3, AR298: 3, AR282: 3, AR172: 3, AR198: 3, |
| | | | | AR281: 3, AR202: 3, AR289: 2, AR205: 2, AR269: 2, AR313: 2, AR293: 2, AR295: 2, AR061: 2, AR253: 2, AR183: 2, AR316: 2, AR182: 2, AR265: 2, AR267: 2, |
| | | | | AR277: 2, AR285: 2, AR195: 2, AR268: 2, AR238: 2, AR299: 2, AR259: 2, AR296: 2, AR286: 2, AR300: 2, AR309: 2, AR291: 2, AR171: 2, AR212: 2, AR060: 2, |
| | | | | AR274: 2, AR169: 2, AR246: 2, AR033: 2, AR229: 2, AR175: 2, AR223: 2, AR181: 2, AR294: 2, AR226: 1, AR247: 1, AR232: 1, AR275: 1, AR217: 1, AR089: 1, |
| | | | | AR180: 1, AR240: 1, AR192: 1, AR210: 1, AR263: 1, AR185: 1, AR164: 1, AR166: 1, AR258: 1, AR201: 1, AR257: 1, AR104: 1, AR163: 1, AR177: 1, AR243: 1 |
| | | | | L0740: 25, L0766: 5, L0655: 4, H0650: 2, H0657: 2, H0656: 2, H0402: 2, H0581: 2, L0761: 2, L0794: 2, H0306: 1, S0408: 1, H0318: 1, H0046: 1, H0266: 1, |
| | | | | S0038: 1, H0429: 1, H0560: 1, S0344: 1, L0789: 1, S0053: 1, H0689: 1, H0134: 1, L0779: 1, L0777: 1 and H0445: 1. |
| | HRGBL78 | 904040 | 486 | |
| | HRGBL78 | 904621 | 487 | |
| | HRGBL78 | 863802 | 488 | |
| 263 | HROAJ03 | 567005 | 273 | AR264: 13, AR309: 13, AR308: 10, AR312: 10, AR272: 10, AR269: 10, AR180: 9, AR183: 9, AR291: 8, AR263: 8, AR270: 8, AR261: 8, AR165: 8, AR173: 8, |
| | | | | AR268: 8, AR290: 8, AR164: 8, AR176: 7, AR210: 7, AR166: 7, AR311: 7, AR181: 7, AR179: 7, AR313: 7, AR177: 7, AR295: 7, AR199: 7, AR182: 7, AR216: 6, |
| | | | | AR188: 6, AR178: 6, AR175: 6, AR161: 6, AR162: 6, AR285: 6, AR267: 6, AR163: 6, AR236: 6, AR196: 6, AR297: 6, AR235: 6, AR190: 6, AR266: 6, AR217: 6, |
| | | | | AR228: 6, AR247: 6, AR255: 6, AR231: 5, AR174: 5, AR096: 5, AR189: 5, AR293: 5, AR229: 5, AR296: 5, AR225: 5, AR221: 5, AR211: 5, AR240: 5, AR218: 5, |
| | | | | AR288: 5, AR219: 5, AR257: 5, AR053: 5, AR238: 5, AR224: 5, AR239: 5, AR170: 4, AR262: 4, AR233: 4, AR287: 4, AR215: 4, AR282: 4, AR289: 4, AR237: 4, |
| | | | | AR300: 4, AR168: 4, AR171: 4, AR200: 4, AR222: 4, AR316: 4, AR214: 4, AR256: 4, AR294: 4, AR191: 4, AR185: 4, AR172: 4, AR169: 4, AR286: 4, AR252: 4, |
| | | | | AR212: 3, AR234: 3, AR213: 3, AR061: 3, AR299: 3, AR230: 3, AR203: 3, AR226: 3, AR223: 3, AR060: 3, AR274: 3, AR275: 3, AR232: 3, AR055: 3, AR258: 3, |
| | | | | AR193: 3, AR089: 3, AR260: 3, AR277: 3, AR227: 2, AR033: 2, AR207: 2, AR243: 2, AR253: 2, AR271: 2, AR039: 2, AR246: 2, AR192: 2, AR205: 2, AR250: 2, |
| | | | | AR245: 2, AR283: 1, AR197: 1, AR104: 1, AR195: 1, AR201: 1, H0646: 2, L0783: 2, L0751: 2, H0222: 1, L3645: 1, H0409: 1, H0559: 1, H0590: 1, H0581: 1, |
| | | | | L0471: 1, H0622: 1, H0316: 1, H0623: 1, L0788: 1, H0689: 1, S0328: 1, S0390: 1, L0777: 1, L0731: 1 and L0462: 1. |
| 264 | HROAJ39 | 1181699 | 274 | AR055: 8, AR060: 6, AR218: 6, AR300: 5, AR316: 4, AR089: 4, AR240: 4, AR282: 3, AR185: 3, AR104: 3, AR299: 3, AR313: 3, AR096: 3, AR283: 3, AR039: 2, |
| | | | | AR219: 2, AR277: 2, H0316: 1, L3905: 1, L0565: 1, L0438: 1, H0521: 1, L0439: 1 and L0594: 1. |
| | HROAJ39 | 1114849 | 489 | |
| | HROAJ39 | 1027712 | 490 | |
| 265 | HROBD68 | 827306 | 275 | AR196: 23, AR161: 12, AR162: 12, AR163: 11, AR313: 11, AR242: 9, AR165: 8, AR164: 8, AR166: 8, AR191: 8, AR089: 8, AR275: 8, AR096: 7, AR181: 7, |
| | | | | AR175: 7, AR053: 7, AR299: 6, AR173: 6, AR264: 6, AR060: 6, AR258: 5, AR236: 5, AR257: 5, AR198: 5, AR312: 5, AR177: 5, AR263: 5, AR185: 5, AR180: 5, |
| | | | | AR274: 5, AR293: 5, AR174: 5, AR179: 5, AR200: 5, AR270: 5, AR225: 5, AR250: 5, AR269: 5, AR178: 5, AR300: 5, AR282: 5, AR195: 5, AR199: 5, AR247: 5, |
| | | | | AR309: 5, AR188: 4, AR316: 4, AR203: 4, AR183: 4, AR189: 4, AR238: 4, AR287: 4, AR285: 4, AR294: 4, AR308: 4, AR104: 4, AR240: 4, AR226: 4, AR261: 4, |
| | | | | AR182: 4, AR311: 4, AR229: 4, AR277: 4, AR271: 4, AR295: 4, AR207: 4, AR255: 4, AR262: 4, AR176: 4, AR235: 4, AR268: 4, AR291: 4, AR297: 4, AR213: 3, |
| | | | | AR233: 3, AR231: 3, AR296: 3, AR286: 3, AR288: 3, AR212: 3, AR290: 3, AR234: 3, AR237: 3, AR169: 3, AR266: 3, AR219: 3, AR272: 3, AR190: 3, AR254: 3, |
| | | | | AR260: 3, AR267: 3, AR193: 3, AR230: 3, AR239: 3, AR216: 3, AR228: 2, AR211: 2, AR218: 2, AR201: 2, AR171: 2, AR246: 2, AR227: 2, AR205: 2, AR232: 2, |
| | | | | AR033: 2, AR055: 2, AR289: 2, AR283: 2, AR172: 1, AR204: 1, AR214: 1, AR215: 1, AR256: 1, AR061: 1, AR168: 1, AR197: 1, AR170: 1, AR192: 1, L0509: 9, |
| | | | | L0766: 4, L0515: 2, L0783: 2, S0342: 1, S0114: 1, S0218: 1, H0589: 1, H0645: 1, H0592: 1, H0250: 1, H0581: 1, H0057: 1, H0252: 1, H0328: 1, H0674: 1, |
| | | | | H0598: 1, H0090: 1, H0634: 1, H0488: 1, H0625: 1, S0426: 1, L0506: 1, L0667: 1, L0499: 1, L0803: 1, L0493: 1, L0514: 1, L0511: 1, L0809: 1, S0052: 1, S0428: 1, |
| | | | | H0683: 1, S0152: 1, S0136: 1, L0748: 1, L0751: 1, L0759: 1, L0599: 1 and H0543: 1. |
| 266 | HSATR82 | 531973 | 276 | AR282: 4, AR161: 3, AR165: 3, AR264: 3, AR162: 3, AR164: 3, AR163: 3, AR166: 3, AR313: 3, AR199: 3, AR266: 3, AR182: 3, AR269: 3, AR096: 3, AR270: 2, |
| | | | | AR173: 2, AR175: 2, AR255: 2, AR196: 2, AR089: 2, AR178: 2, AR277: 2, AR274: 2, AR293: 2, AR213: 2, AR262: 2, AR225: 2, AR216: 2, AR060: 2, AR195: 2, |
| | | | | AR201: 2, AR177: 2, AR300: 2, AR309: 2, AR207: 2, AR179: 2, AR257: 2, AR247: 2, AR229: 2, AR240: 2, AR212: 2, AR104: 2, AR233: 2, AR193: 2, AR296: 2, |
| | | | | AR217: 2, AR283: 2, AR191: 1, AR039: 1, AR237: 1, AR316: 1, AR275: 1, AR172: 1, AR258: 1, AR288: 1, AR285: 1, AR185: 1, AR239: 1, AR297: 1, AR291: 1, |
| | | | | AR170: 1, AR224: 1, AR176: 1, AR235: 1, AR294: 1, AR287: 1, AR308: 1, AR214: 1, AR180: 1, AR267: 1, AR236: 1, AR299: 1, AR203: 1, AR033: 1, AR252: 1, |
| | | | | S0114: 2 and L0600: 1. |
| 267 | HSAVH65 | 545459 | 277 | AR089: 10, AR240: 9, AR060: 9, AR055: 9, AR313: 9, AR277: 8, AR185: 7, AR300: 6, AR282: 6, AR299: 6, AR104: 6, AR316: 5, AR218: 5, AR219: 5, AR283: 4, |
| | | | | AR096: 4, AR039: 4, S0114: 2, H0686: 1, L2255: 1, L0769: 1, L0644: 1, L0662: 1, L0774: 1, L0666: 1, H0659: 1, L0750: 1 and S0436: 1. |
| 268 | HSAWD74 | 460527 | 278 | AR039: 35, AR313: 32, AR096: 24, AR089: 22, AR299: 17, AR300: 16, AR104: 13, AR185: 13, AR277: 13, AR316: 13, AR060: 13, AR173: 12, AR165: 12, |
| | | | | AR166: 12, AR240: 11, AR164: 11, AR218: 11, AR162: 11, AR161: 11, AR163: 10, AR229: 10, AR178: 9, AR242: 9, AR175: 9, AR262: 9, AR247: 9, AR183: 9, |
| | | | | AR258: 8, AR275: 8, AR055: 8, AR257: 8, AR180: 7, AR293: 7, AR282: 7, AR181: 7, AR196: 7, AR204: 7, AR312: 7, AR219: 7, AR193: 7, AR191: 6, AR238: 6, |
| | | | | AR176: 6, AR198: 6, AR269: 6, AR235: 6, AR199: 6, AR179: 6, AR270: 6, AR233: 6, AR182: 6, AR297: 6, AR234: 6, AR254: 6, AR177: 6, AR296: 6, AR174: 6, |
| | | | | AR236: 5, AR203: 5, AR226: 5, AR283: 5, AR266: 5, AR285: 5, AR268: 5, AR245: 5, AR255: 5, AR188: 5, AR309: 5, AR267: 5, AR053: 5, AR287: 5, AR294: 5, |
| | | | | AR213: 5, AR274: 5, AR286: 5, AR200: 5, AR231: 4, AR308: 4, AR033: 4, AR288: 4, AR189: 4, AR237: 4, AR260: 4, AR261: 4, AR291: 4, AR201: 4, AR172: 4, |
| | | | | AR243: 4, AR295: 4, AR228: 4, AR222: 4, AR290: 4, AR271: 4, AR212: 4, AR264: 4, AR272: 3, AR252: 3, AR169: 3, AR230: 3, AR239: 3, AR205: 3, AR253: 3, |
| | | | | AR227: 3, AR197: 3, AR289: 3, AR225: 3, AR207: 3, AR190: 3, AR217: 2, AR214: 2, AR061: 2, AR216: 2, AR256: 2, AR232: 2, AR263: 2, AR195: 2, AR223: 2, |
| | | | | AR221: 2, AR246: 2, AR311: 1, AR192: 1, AR168: 1, AR210: 1, AR211: 1, H0068: 3, S0114: 2, L0534: 2, L0740: 2, H0717: 1, S0134: 1, S0442: 1, S0354: 1, |
| | | | | S0476: 1, H0333: 1, H0009: 1, H0560: 1, L5565: 1 and H0576: 1. |
| | HSAWD74 | 371416 | 491 | |
| 269 | HSAWZ41 | 580872 | 279 | AR313: 82, AR039: 58, AR173: 49, AR096: 43, AR196: 40, AR247: 40, AR162: 40, AR299: 40, AR165: 39, AR258: 38, AR161: 37, AR242: 37, AR300: 37, |
| | | | | AR236: 37, AR089: 37, AR164: 37, AR163: 36, AR166: 35, AR240: 35, AR180: 33, AR199: 32, AR229: 32, AR264: 31, AR175: 31, AR185: 31, AR257: 29, |
| | | | | AR179: 29, AR178: 29, AR312: 28, AR262: 28, AR183: 27, AR293: 27, AR234: 26, AR174: 26, AR193: 26, AR177: 26, AR316: 24, AR182: 24, AR218: 24, |
| | | | | AR285: 24, AR191: 23, AR270: 23, AR181: 23, AR277: 23, AR269: 23, AR219: 23, AR296: 23, AR226: 23, AR192: 22, AR275: 22, AR033: 22, AR233: 22, |
| | | | | AR200: 21, AR189: 21, AR204: 21, AR176: 21, AR238: 20, AR104: 20, AR297: 19, AR203: 19, AR261: 19, AR287: 19, AR294: 19, AR268: 18, AR060: 18, |
| | | | | AR053: 18, AR286: 18, AR255: 17, AR212: 17, AR260: 17, AR288: 16, AR290: 16, AR188: 16, AR309: 16, AR231: 15, AR197: 15, AR237: 15, AR230: 15, |
| | | | | AR245: 15, AR295: 15, AR308: 15, AR267: 14, AR195: 14, AR266: 14, AR282: 14, AR201: 14, AR213: 14, AR235: 14, AR254: 14, AR243: 14, AR228: 13, |
| | | | | AR263: 13, AR271: 13, AR256: 13, AR239: 13, AR198: 12, AR227: 12, AR291: 12, AR205: 11, AR272: 10, AR190: 10, AR055: 9, AR250: 9, AR252: 9, |
| | | | | AR207: 9, AR289: 8, AR211: 8, AR283: 7, AR232: 7, AR246: 7, AR311: 6, AR253: 5, AR061: 5, AR210: 5, AR171: 4, AR221: 3, AR274: 2, AR168: 2, AR169: 1, |
| | | | | H0305: 4, H0589: 2 and S0114: 1. |
| 270 | HSAXA83 | 545051 | 280 | AR215: 9, AR253: 8, AR252: 7, AR168: 6, AR163: 6, AR162: 6, AR250: 6, AR216: 6, AR172: 6, AR161: 6, AR264: 6, AR242: 6, AR221: 6, AR269: 5, AR183: 5, |
| | | | | AR291: 5, AR055: 5, AR270: 5, AR224: 5, AR060: 5, AR268: 5, AR170: 5, AR266: 5, AR217: 5, AR231: 5, AR222: 5, AR182: 4, AR240: 4, AR204: 4, AR176: 4, |
| | | | | AR214: 4, AR290: 4, AR225: 4, AR223: 4, AR309: 4, AR201: 4, AR235: 4, AR181: 4, AR271: 4, AR213: 4, AR205: 4, AR165: 4, AR283: 4, AR282: 4, AR243: 4, |
| | | | | AR219: 4, AR164: 4, AR236: 4, AR089: 4, AR166: 4, AR263: 4, AR212: 4, AR104: 4, AR288: 4, AR294: 4, AR257: 3, AR316: 3, AR096: 3, AR179: 3, AR296: 3, |
| | | | | AR267: 3, AR193: 3, AR261: 3, AR254: 3, AR196: 3, AR245: 3, AR171: 3, AR255: 3, AR275: 3, AR207: 3, AR185: 3, AR229: 3, AR173: 3, AR238: 3, AR191: 3, |
| | | | | AR237: 3, AR289: 3, AR175: 3, AR218: 3, AR180: 3, AR277: 3, AR200: 3, AR299: 3, AR228: 3, AR295: 3, AR233: 3, AR239: 3, AR287: 3, AR272: 3, AR178: 3, |
| | | | | AR039: 3, AR293: 3, AR188: 3, AR286: 3, AR177: 3, AR247: 3, AR190: 3, AR174: 3, AR285: 2, AR312: 2, AR230: 2, AR234: 2, AR313: 2, AR053: 2, AR274: 2, |
| | | | | AR300: 2, AR260: 2, AR246: 2, AR189: 2, AR311: 2, AR061: 2, AR033: 2, AR232: 2, AR308: 2, AR199: 2, AR210: 2, AR227: 2, AR226: 1, AR258: 1, AR256: 1, |
| | | | | AR297: 1, AR262: 1, AR192: 1, H0013: 2, H0375: 2, H0521: 2, S0114: 1, S0134: 1, H0341: 1, S0444: 1, H0728: 1, H0735: 1, T0110: 1, H0046: 1, H0457: 1, |
| | | | | H0050: 1, H0553: 1, H0202: 1, H0396: 1, L0794: 1, L0803: 1, L0776: 1, L5623: 1, L0789: 1, L0709: 1, H0520: 1, S0044: 1, S0436: 1, L0588: 1 and H0653: 1. |
| 271 | HSAYB43 | 604143 | 281 | AR161: 11, AR162: 11, AR163: 11, AR313: 9, AR173: 9, AR165: 8, AR164: 8, AR166: 8, AR196: 7, AR096: 6, AR258: 6, AR240: 6, AR262: 6, AR175: 6, |
| | | | | AR229: 6, AR247: 6, AR264: 6, AR257: 6, AR089: 5, AR275: 5, AR183: 5, AR180: 5, AR274: 5, AR181: 5, AR218: 5, AR178: 5, AR293: 5, AR174: 5, AR191: 5, |
| | | | | AR270: 5, AR185: 5, AR261: 5, AR263: 4, AR299: 4, AR300: 4, AR235: 4, AR182: 4, AR179: 4, AR176: 4, AR294: 4, AR269: 4, AR238: 4, AR203: 4, AR234: 4, |
| | | | | AR233: 4, AR199: 4, AR060: 4, AR177: 4, AR316: 4, AR200: 4, AR219: 4, AR282: 3, AR309: 3, AR231: 3, AR236: 3, AR255: 3, AR242: 3, AR033: 3, AR268: 3, |
| | | | | AR228: 3, AR188: 3, AR312: 3, AR260: 3, AR297: 3, AR104: 3, AR291: 3, AR287: 3, AR189: 3, AR272: 3, AR311: 3, AR283: 3, AR230: 3, AR197: 3, AR286: 3, |
| | | | | AR295: 3, AR226: 3, AR277: 3, AR285: 3, AR267: 3, AR239: 3, AR296: 3, AR290: 2, AR288: 2, AR266: 2, AR237: 2, AR168: 2, AR201: 2, AR039: 2, AR224: 2, |
| | | | | AR225: 2, AR172: 2, AR213: 2, AR190: 2, AR193: 2, AR232: 2, AR211: 2, AR227: 2, AR195: 2, AR214: 2, AR216: 2, AR210: 2, AR221: 1, AR256: 1, AR223: 1, |
| | | | | AR289: 1, AR171: 1, AR308: 1, AR204: 1, AR205: 1, AR055: 1, AR061: 1, AR254: 1, S0053: 2, S0114: 1, S0052: 1 and S0216: 1. |
| 272 | HSDEK49 | 1352253 | 282 | AR290: 45, AR268: 37, AR240: 23, AR267: 22, AR269: 16, AR270: 14, AR234: 10, AR055: 10, AR238: 10, AR184: 9, AR292: 8, AR291: 8, AR179: 8, AR183: 8, |
| | | | | AR284: 7, AR177: 7, AR182: 6, AR060: 6, AR299: 5, AR295: 5, AR285: 5, AR244: 5, AR293: 5, AR175: 5, AR096: 4, AR185: 3, AR229: 3, AR249: 3, AR296: 3, |
| | | | | AR316: 3, AR231: 3, AR298: 3, AR289: 3, AR104: 3, AR237: 3, AR286: 2, AR089: 2, AR226: 2, AR204: 2, AR266: 2, AR282: 2, AR294: 2, AR227: 2, AR313: 2, |
| | | | | AR247: 2, AR300: 2, AR233: 2, AR248: 2, AR259: 2, AR275: 2, AR256: 2, AR039: 1, AR033: 1, AR277: 1, AR263: 1, AR061: 1, AR258: 1, AR232: 1, AR271: 1, |
| | | | | AR283: 1, AR310: 1, H0031: 7, L0439: 7, L0754: 7, L3388: 6, L0731: 6, S0002: 5, H0580: 4, H0575: 3, H0309: 3, L0438: 3, H0555: 3, L0758: 3, S0360: 2, |
| | | | | L3649: 2, H0553: 2, S0344: 2, S0426: 2, L0775: 2, S0330: 2, L0747: 2, L0779: 2, S0260: 2, L0599: 2, L0603: 2, H0739: 1, H0170: 1, S0116: 1, S0354: 1, S0444: 1, |
| | | | | L3645: 1, H0270: 1, S0280: 1, H0590: 1, H0581: 1, H0251: 1, H0014: 1, H0355: 1, H0030: 1, H0644: 1, H0674: 1, H0090: 1, H0063: 1, S0142: 1, L0770: 1, |
| | | | | L0769: 1, L0651: 1, L0776: 1, L0659: 1, L0519: 1, L0664: 1, H0682: 1, L0749: 1, L0752: 1, S0031: 1 and H0506: 1. |
| | HSDEK49 | 625998 | 492 | |
| 273 | HSDFJ26 | 834619 | 283 | AR263: 62, AR264: 49, AR269: 11, AR161: 9, AR162: 9, AR163: 9, AR176: 8, AR181: 6, AR309: 6, AR182: 6, AR191: 6, AR235: 6, AR266: 6, AR223: 5, |
| | | | | AR215: 5, AR267: 5, AR180: 5, AR268: 5, AR178: 5, AR311: 5, AR228: 5, AR282: 5, AR183: 5, AR165: 4, AR174: 4, AR096: 4, AR177: 4, AR164: 4, AR236: 4, |
| | | | | AR270: 4, AR214: 4, AR233: 4, AR179: 4, AR190: 4, AR166: 4, AR237: 4, AR308: 4, AR255: 3, AR055: 3, AR189: 3, AR168: 3, AR216: 3, AR175: 3, AR294: 3, |
| | | | | AR217: 3, AR239: 3, AR231: 3, AR172: 3, AR207: 3, AR275: 3, AR238: 3, AR240: 3, AR229: 3, AR316: 3, AR222: 3, AR170: 3, AR272: 3, AR225: 3, AR247: 3, |
| | | | | AR061: 3, AR226: 3, AR060: 3, AR274: 3, AR232: 3, AR199: 3, AR291: 3, AR260: 3, AR234: 2, AR230: 2, AR288: 2, AR312: 2, AR262: 2, AR290: 2, AR203: 2, |
| | | | | AR053: 2, AR227: 2, AR287: 2, AR104: 2, AR289: 2, AR285: 2, AR185: 2, AR313: 2, AR295: 2, AR257: 2, AR200: 2, AR188: 2, AR293: 2, AR252: 2, AR193: 2, |
| | | | | AR256: 2, AR261: 2, AR196: 2, AR089: 2, AR300: 2, AR283: 1, AR219: 1, AR201: 1, AR271: 1, AR171: 1, AR224: 1, AR286: 1, AR033: 1, AR211: 1, AR297: 1, |
| | | | | AR258: 1, AR277: 1, S0026: 6, S0360: 4, L0662: 4, L0747: 4, L0759: 4, L0755: 3, S0408: 2, H0575: 2, S0474: 2, H0251: 2, H0673: 2, L0766: 2, L0804: 2, L0665: 2, |
| | | | | L0608: 2, H0543: 2, H0171: 1, H0686: 1, H0613: 1, H0427: 1, L0021: 1, T0082: 1, H0309: 1, H0150: 1, H0024: 1, L0163: 1, H0266: 1, H0271: 1, S0338: 1, |
| | | | | H0252: 1, H0615: 1, H0428: 1, H0030: 1, H0040: 1, H0647: 1, L0369: 1, L0500: 1, L0769: 1, L0638: 1, L0637: 1, L0764: 1, L0767: 1, L0768: 1, L0364: 1, L0794: 1, |
| | | | | L0649: 1, L0775: 1, L0805: 1, L0659: 1, L0382: 1, L0666: 1, S0052: 1, H0697: 1, S0328: 1, S0330: 1, S0380: 1, H0521: 1, S0406: 1, H0478: 1, L0754: 1, L0745: 1, |
| | | | | L0749: 1, L0779: 1, L0780: 1, L0752: 1, S0031: 1, L0601: 1, S0242: 1 and H0542: 1. |
| | HSDFJ26 | 836071 | 493 | |
| 274 | HSDJJ82 | 460602 | 284 | AR264: 10, AR250: 7, AR253: 7, AR263: 7, AR254: 7, AR309: 6, AR197: 6, AR053: 5, AR198: 5, AR308: 4, AR312: 4, AR212: 4, AR313: 4, AR213: 4, AR311: 4, |
| | | | | AR161: 4, AR252: 4, AR162: 4, AR163: 4, AR271: 4, AR096: 4, AR246: 3, AR195: 3, AR168: 3, AR266: 3, AR224: 3, AR291: 3, AR089: 3, AR183: 3, AR165: 3, |
| | | | | AR164: 3, AR216: 3, AR166: 3, AR178: 3, AR175: 3, AR268: 3, AR215: 3, AR269: 3, AR225: 3, AR201: 3, AR270: 3, AR176: 3, AR282: 2, AR182: 2, AR235: 2, |
| | | | | AR228: 2, AR242: 2, AR221: 2, AR272: 2, AR316: 2, AR191: 2, AR240: 2, AR199: 2, AR257: 2, AR181: 2, AR297: 2, AR190: 2, AR193: 2, AR299: 2, AR174: 2, |
| | | | | AR060: 2, AR229: 2, AR189: 2, AR275: 2, AR200: 2, AR290: 2, AR295: 2, AR236: 2, AR177: 2, AR196: 2, AR261: 2, AR277: 2, AR243: 2, AR104: 2, AR293: 2, |
| | | | | AR171: 2, AR300: 2, AR185: 2, AR239: 2, AR227: 2, AR237: 2, AR033: 2, AR289: 2, AR226: 2, AR233: 2, AR296: 1, AR287: 1, AR179: 1, AR188: 1, AR205: 1, |
| | | | | AR231: 1, AR217: 1, AR173: 1, AR219: 1, AR247: 1, AR232: 1, AR230: 1, AR267: 1, AR262: 1, AR288: 1, AR283: 1, AR218: 1, AR061: 1, AR203: 1, AR258: 1, |
| | | | | S0260: 1 |
| 275 | HSDSB09 | 1301498 | 285 | AR060: 10, AR089: 9, AR055: 7, AR104: 7, AR313: 5, AR039: 4, AR218: 4, AR299: 4, AR184: 4, AR316: 4, AR096: 4, AR182: 4, AR219: 3, AR294: 3, AR185: 3, |
| | | | | AR214: 3, AR197: 3, AR291: 3, AR212: 3, AR251: 3, AR284: 3, AR283: 3, AR282: 3, AR222: 3, AR269: 3, AR286: 3, AR298: 2, AR266: 2, AR052: 2, AR262: 2, |
| | | | | AR249: 2, AR311: 2, AR292: 2, AR309: 2, AR295: 2, AR233: 2, AR236: 2, AR296: 2, AR268: 2, AR267: 2, AR253: 2, AR270: 2, AR255: 2, AR183: 2, AR285: 2, |
| | | | | AR165: 2, AR177: 2, AR228: 2, AR289: 2, AR061: 2, AR186: 2, AR300: 2, AR168: 2, AR033: 2, AR239: 2, AR235: 1, AR231: 1, AR215: 1, AR277: 1, AR225: 1, |
| | | | | AR290: 1, AR274: 1, AR293: 1, AR163: 1, AR247: 1, AR310: 1, AR217: 1, AR226: 1, AR238: 1, AR240: 1, AR265: 1, AR237: 1, AR264: 1, AR224: 1, AR229: 1, |
| | | | | AR053: 1, AR172: 1, AR271: 1, L0803: 14, L0774: 4, L0770: 2, H0409: 1, H0331: 1 and H0555: 1. |
| | HSDSB09 | 463645 | 494 | |
| 276 | HSDSE75 | 545057 | 286 | AR096: 3, AR225: 3, AR266: 3, AR055: 3, AR060: 3, AR309: 2, AR170: 2, AR222: 2, AR104: 2, AR214: 2, AR254: 2, AR163: 2, AR161: 2, AR195: 2, AR282: 2, |
| | | | | AR089: 1, AR224: 1, AR283: 1, AR275: 1, AR228: 1, AR162: 1, AR300: 1, AR272: 1, AR216: 1, AR240: 1, AR290: 1, AR175: 1, AR185: 1, AR201: 1, AR193: 1, |
| | | | | AR200: 1, AR164: 1, AR166: 1, AR316: 1, AR168: 1, AR230: 1, AR165: 1, AR218: 1, H0646: 2, L0783: 2, L0751: 2, H0222: 1, L3645: 1, H0409: 1, H0559: 1, |
| | | | | H0590: 1, H0581: 1, L0471: 1, H0622: 1, H0316: 1, H0623: 1, L0788: 1, H0689: 1, S0328: 1, S0390: 1, L0777: 1, L0731: 1 and L0462: 1. |
| 277 | HSDZR57 | 651375 | 287 | AR172: 3, AR264: 3, AR235: 3, AR207: 2, AR215: 2, AR225: 2, AR271: 2, AR192: 2, AR180: 2, AR309: 2, AR216: 2, AR270: 2, AR165: 2, AR274: 1, AR164: 1, |
| | | | | AR166: 1, AR222: 1, AR257: 1, AR277: 1, AR286: 1, L0769: 4, L0803: 3, H0547: 3, H0484: 2, S0410: 2, H0644: 2, H0617: 2, H0413: 2, L0751: 2, H0556: 1, |
| | | | | H0650: 1, S0420: 1, S0354: 1, S0360: 1, S0222: 1, H0455: 1, H0559: 1, H0575: 1, H0052: 1, H0545: 1, L0763: 1, L0800: 1, L0648: 1, L0662: 1, L0768: 1, L0794: 1, |
| | | | | L0804: 1, L0809: 1, L0789: 1, H0699: 1, H0690: 1, H0660: 1, S0328: 1, L0740: 1, L0750: 1 and H0422: 1. |
| 278 | HSIDJ81 | 589447 | 288 | AR313: 41, AR039: 35, AR096: 26, AR173: 25, AR299: 21, AR258: 20, AR180: 20, AR185: 19, AR089: 18, AR262: 18, AR161: 18, AR162: 18, AR179: 18, |
| | | | | AR269: 17, AR240: 17, AR300: 17, AR175: 17, AR163: 17, AR257: 17, AR165: 17, AR191: 17, AR229: 17, AR196: 16, AR164: 16, AR247: 16, AR316: 16, |
| | | | | AR166: 15, AR218: 15, AR183: 15, AR277: 15, AR178: 14, AR181: 14, AR199: 14, AR182: 13, AR234: 13, AR270: 13, AR293: 13, AR236: 13, AR174: 13, |
| | | | | AR233: 12, AR200: 12, AR238: 12, AR268: 11, AR189: 11, AR260: 11, AR285: 11, AR060: 11, AR219: 11, AR297: 11, AR294: 10, AR104: 10, AR203: 10, |
| | | | | AR226: 10, AR188: 10, AR287: 10, AR255: 10, AR296: 10, AR176: 10, AR177: 10, AR267: 10, AR282: 9, AR230: 9, AR275: 9, AR290: 8, AR264: 8, AR231: 8, |
| | | | | AR261: 8, AR237: 8, AR242: 8, AR190: 8, AR192: 8, AR288: 7, AR274: 7, AR286: 7, AR055: 7, AR291: 7, AR228: 7, AR239: 7, AR235: 7, AR033: 7, AR295: 6, |
| | | | | AR227: 6, AR263: 6, AR266: 6, AR197: 5, AR211: 5, AR308: 5, AR053: 5, AR256: 5, AR250: 5, AR232: 4, AR210: 4, AR272: 4, AR213: 4, AR283: 4, AR271: 4, |
| | | | | AR289: 4, AR312: 4, AR252: 4, AR193: 4, AR212: 3, AR223: 3, AR246: 3, AR311: 3, AR225: 3, AR061: 3, AR169: 3, AR205: 3, AR198: 3, AR170: 2, AR215: 2, |
| | | | | AR201: 2, AR207: 2, AR243: 2, AR309: 2, AR224: 2, AR171: 2, AR168: 2, AR217: 2, AR216: 2, AR172: 2, AR195: 1, H0036: 1 and L0744: 1. |
| 279 | HSKDA27 | 1352409 | 289 | AR039: 106, AR104: 103, AR055: 103, AR240: 102, AR060: 87, AR096: 84, AR282: 77, AR283: 67, AR300: 66, AR316: 57, AR185: 48, AR219: 45, AR218: 44, |
| | | | | AR089: 40, AR299: 36, AR277: 34, AR313: 31, S0212: 13, S0126: 12, L0777: 11, S0027: 10, S0028: 10, S0250: 7, H0717: 6, L0662: 6, L0747: 6, S0360: 5, |
| | | | | S0022: 5, S0206: 5, L0779: 5, S0194: 5, L0659: 4, L0751: 4, L0731: 4, L0758: 4, H0713: 3, H0716: 3, S0444: 3, H0599: 3, L0163: 3, S0210: 3, L0807: 3, S0390: 3, |
| | | | | S0037: 3, S3014: 3, L0740: 3, S0192: 3, H0295: 2, H0486: 2, H0706: 2, H0309: 2, H0023: 2, H0373: 2, H0266: 2, H0039: 2, H0038: 2, L0598: 2, L3872: 2, |
| | | | | H0689: 2, L0757: 2, L0759: 2, L0599: 2, S0011: 2, S0040: 1, L2906: 1, S0298: 1, H0661: 1, H0663: 1, H0662: 1, S0420: 1, S0356: 1, S0442: 1, S0408: 1, L2338: 1, |
| | | | | S0046: 1, H0411: 1, H0550: 1, H0586: 1, H0587: 1, H0333: 1, T0040: 1, T0060: 1, H0427: 1, H0251: 1, H0150: 1, H0050: 1, H0014: 1, H0188: 1, S0214: 1, |
| | | | | H0428: 1, H0622: 1, T0006: 1, H0553: 1, H0628: 1, H0124: 1, H0087: 1, H0551: 1, T0067: 1, H0413: 1, T0069: 1, S0440: 1, L0762: 1, L0763: 1, L0770: 1, L0769: 1, |
| | | | | L0637: 1, L0773: 1, L0768: 1, L0794: 1, L0386: 1, L0774: 1, L0775: 1, L0375: 1, L0805: 1, L0776: 1, L0655: 1, L0783: 1, L0519: 1, L0367: 1, L0790: 1, L0666: 1, |
| | | | | L0663: 1, L2263: 1, L0565: 1, S0148: 1, H0726: 1, H0724: 1, L0438: 1, H0519: 1, S0152: 1, S0454: 1, H0521: 1, H0696: 1, S3012: 1, S0124: 1, L0439: 1, L0750: 1, |
| | | | | H0595: 1, S0436: 1, H0668: 1, H0667: 1, S0242: 1, S0276: 1 and L3603: 1. |
| | HSKDA27 | 1074734 | 495 | |
| | HSKDA27 | 872570 | 496 | |
| 280 | HSKGN81 | 676075 | 290 | AR252: 303, AR263: 240, AR211: 227, AR272: 220, AR210: 215, AR216: 184, AR253: 180, AR250: 170, AR264: 169, AR242: 163, AR172: 160, AR245: 160, |
| | | | | AR274: 155, AR254: 148, AR247: 147, AR313: 142, AR165: 141, AR053: 139, AR225: 136, AR195: 131, AR215: 129, AR221: 129, AR308: 124, AR197: 123, |
| | | | | AR214: 123, AR212: 122, AR170: 119, AR166: 118, AR224: 118, AR213: 117, AR171: 115, AR205: 113, AR312: 113, AR162: 109, AR217: 108, AR309: 106, |
| | | | | AR199: 106, AR271: 105, AR164: 100, AR198: 93, AR168: 92, AR169: 92, AR188: 92, AR207: 91, AR275: 91, AR173: 91, AR256: 90, AR291: 89, AR240: 89, |
| | | | | AR163: 86, AR296: 82, AR246: 82, AR222: 81, AR311: 78, AR290: 78, AR223: 77, AR282: 76, AR161: 75, AR297: 75, AR289: 75, AR196: 74, AR261: 73, |
| | | | | AR243: 71, AR178: 70, AR295: 70, AR260: 69, AR175: 67, AR183: 66, AR200: 65, AR174: 63, AR285: 63, AR201: 62, AR096: 61, AR299: 60, AR179: 59, |
| | | | | AR189: 59, AR288: 56, AR180: 56, AR033: 55, AR258: 55, AR266: 55, AR300: 55, AR267: 54, AR181: 51, AR192: 51, AR262: 51, AR293: 50, AR268: 50, |
| | | | | AR255: 49, AR204: 48, AR270: 47, AR316: 47, AR039: 46, AR190: 43, AR238: 43, AR235: 43, AR182: 42, AR089: 41, AR229: 40, AR236: 39, AR269: 39, |
| | | | | AR277: 38, AR232: 38, AR061: 38, AR219: 37, AR218: 37, AR257: 37, AR286: 37, AR185: 37, AR203: 36, AR287: 35, AR283: 35, AR191: 35, AR193: 34, |
| | | | | AR230: 34, AR231: 33, AR177: 32, AR239: 30, AR176: 30, AR237: 29, AR234: 27, AR104: 27, AR226: 26, AR294: 25, AR060: 24, AR055: 18, AR233: 17, |
| | | | | AR227: 14, AR228: 10, H0556: 14, L0666: 5, L0438: 5, L0439: 5, L0751: 5, H0266: 4, L0665: 4, L0777: 4, H0161: 3, H0645: 3, H0599: 3, H0594: 3, L0763: 3, |
| | | | | H0436: 3, L0747: 3, L0758: 3, L0759: 3, H0423: 3, H0265: 2, H0141: 2, S0045: 2, S0476: 2, H0575: 2, H0421: 2, T0041: 2, H0529: 2, L0770: 2, L0771: 2, L0657: 2, |
| | | | | L5623: 2, L0664: 2, H0670: 2, H0518: 2, S0044: 2, L0749: 2, L0757: 2, L0588: 2, L0599: 2, H0585: 1, L3643: 1, H0717: 1, H0716: 1, H0740: 1, H0583: 1, S0116: 1, |
| | | | | H0341: 1, H0254: 1, H0255: 1, H0306: 1, H0402: 1, S0360: 1, S0408: 1, S0046: 1, S0132: 1, H0619: 1, H0549: 1, H0550: 1, S0222: 1, H0614: 1, H0392: 1, |
| | | | | H0455: 1, H0613: 1, H0592: 1, H0586: 1, H0587: 1, S0005: 1, H0497: 1, H0492: 1, H0486: 1, H0250: 1, T0071: 1, H0581: 1, H0052: 1, H0309: 1, H0545: 1, |
| | | | | H0050: 1, L0471: 1, H0024: 1, L0183: 1, H0267: 1, H0687: 1, H0286: 1, H0328: 1, L0483: 1, L0053: 1, H0628: 1, H0169: 1, H0674: 1, S0366: 1, H0038: 1, |
| | | | | H0634: 1, H0264: 1, H0488: 1, H0268: 1, H0100: 1, T0042: 1, H0494: 1, S0014: 1, H0625: 1, H0509: 1, H0641: 1, S0002: 1, L0637: 1, L3905: 1, L0646: 1, L0773: 1, |
| | | | | L0662: 1, L0768: 1, L0652: 1, L0776: 1, L0659: 1, L0783: 1, S0374: 1, H0783: 1, H0593: 1, S0126: 1, H0659: 1, H0658: 1, H0648: 1, H0672: 1, S3012: 1, S0028: 1, |
| | | | | L0754: 1, L0750: 1, L0731: 1, S0260: 1, S0436: 1, L0596: 1, L0581: 1, S0242: 1, S0194: 1, H0543: 1, S0446: 1, H0506: 1 and H0008: 1. |
| | HSKGN81 | 409905 | 497 | |
| 281 | HSLCQ82 | 1352226 | 291 | AR055: 7, AR060: 6, AR104: 6, AR089: 6, AR283: 6, AR096: 6, AR161: 5, AR162: 5, AR282: 5, AR163: 5, AR039: 5, AR218: 5, AR316: 5, AR219: 5, AR269: 4, |
| | | | | AR277: 4, AR176: 4, AR309: 4, AR300: 4, AR164: 4, AR165: 4, AR275: 4, AR240: 4, AR266: 4, AR299: 4, AR274: 4, AR235: 4, AR272: 4, AR166: 4, AR183: 4, |
| | | | | AR173: 3, AR177: 3, AR250: 3, AR185: 3, AR225: 3, AR214: 3, AR178: 3, AR257: 3, AR267: 3, AR236: 3, AR182: 3, AR270: 3, AR313: 3, AR181: 3, AR221: 3, |
| | | | | AR175: 3, AR191: 3, AR239: 3, AR291: 3, AR190: 3, AR228: 3, AR229: 3, AR189: 3, AR180: 3, AR296: 3, AR255: 3, AR171: 3, AR172: 3, AR287: 3, AR243: 3, |
| | | | | AR233: 3, AR268: 2, AR261: 2, AR262: 2, AR238: 2, AR196: 2, AR237: 2, AR231: 2, AR264: 2, AR210: 2, AR293: 2, AR224: 2, AR288: 2, AR289: 2, AR290: 2, |
| | | | | AR295: 2, AR174: 2, AR230: 2, AR179: 2, AR188: 2, AR200: 2, AR285: 2, AR246: 2, AR294: 2, AR061: 2, AR286: 2, AR263: 2, AR247: 2, AR053: 2, AR232: 2, |
| | | | | AR223: 2, AR203: 2, AR271: 2, AR227: 2, AR226: 2, AR311: 2, AR168: 2, AR033: 2, AR216: 2, AR234: 2, AR211: 1, AR312: 1, AR260: 1, AR297: 1, AR222: 1, |
| | | | | AR205: 1, AR258: 1, AR217: 1, L0744: 2, L0751: 2, L0777: 2, H0580: 1, H0013: 1, S0036: 1, L0659: 1, S0028: 1, L0779: 1, L0780: 1 and L0596: 1. |
| | HSLCQ82 | 589526 | 498 | |
| 282 | HSNAD72 | 467397 | 292 | AR170: 5, AR169: 4, AR180: 4, AR313: 4, AR221: 3, AR178: 3, AR223: 3, AR245: 3, AR192: 3, AR235: 2, AR204: 2, AR182: 2, AR299: 2, AR216: 2, AR291: 2, |
| | | | | AR274: 2, AR171: 2, AR214: 2, AR217: 2, AR193: 2, AR266: 1, AR308: 1, AR293: 1, AR257: 1, AR247: 1, AR232: 1, AR225: 1, AR283: 1, AR210: 1, AR282: 1, |
| | | | | H0163: 2 |
| 283 | HSNMC45 | 1352201 | 293 | AR242: 8, AR205: 6, AR238: 6, AR170: 6, AR207: 5, AR201: 4, AR215: 3, AR204: 3, AR096: 3, AR296: 3, AR172: 2, AR233: 2, AR089: 2, AR182: 2, AR055: 2, |
| | | | | AR257: 2, AR299: 1, AR104: 1, AR272: 1, AR210: 1, AR185: 1, AR297: 1, H0163: 1 |
| | HSNMC45 | 545060 | 499 | |
| 284 | HSQFP66 | 460537 | 294 | AR197: 9, AR271: 8, AR176: 7, AR162: 7, AR161: 7, AR201: 7, AR163: 7, AR192: 6, AR204: 6, AR207: 6, AR266: 6, AR267: 6, AR228: 6, AR229: 6, AR169: 6, |
| | | | | AR177: 6, AR237: 6, AR198: 6, AR233: 5, AR245: 5, AR181: 5, AR193: 5, AR250: 5, AR243: 5, AR053: 5, AR269: 5, AR239: 5, AR309: 5, AR089: 5, AR180: 5, |
| | | | | AR264: 5, AR165: 5, AR214: 5, AR182: 4, AR060: 4, AR224: 4, AR061: 4, AR268: 4, AR261: 4, AR178: 4, AR166: 4, AR230: 4, AR257: 4, AR226: 4, AR183: 4, |
| | | | | AR164: 4, AR270: 4, AR275: 4, AR231: 4, AR236: 4, AR096: 4, AR179: 4, AR246: 4, AR289: 4, AR039: 4, AR055: 4, AR293: 4, AR196: 4, AR175: 4, AR316: 4, |
| | | | | AR272: 4, AR234: 4, AR168: 4, AR225: 4, AR286: 4, AR247: 4, AR312: 4, AR212: 4, AR255: 4, AR296: 4, AR242: 4, AR294: 3, AR300: 3, AR290: 3, AR185: 3, |
| | | | | AR205: 3, AR291: 3, AR238: 3, AR262: 3, AR227: 3, AR295: 3, AR287: 3, AR288: 3, AR174: 3, AR297: 3, AR216: 3, AR311: 3, AR277: 3, AR170: 3, AR191: 3, |
| | | | | AR285: 3, AR188: 3, AR213: 3, AR215: 3, AR313: 3, AR217: 3, AR308: 3, AR232: 3, AR203: 3, AR195: 3, AR282: 3, AR173: 2, AR033: 2, AR172: 2, AR189: 2, |
| | | | | AR171: 2, AR274: 2, AR223: 2, AR190: 2, AR299: 2, AR104: 2, AR211: 2, AR258: 2, AR200: 2, AR283: 2, AR263: 2, AR256: 2, AR221: 2, AR199: 2, AR240: 2, |
| | | | | AR222: 2, AR210: 2, AR253: 1, AR254: 1, AR260: 1, AR219: 1, AR218: 1, S0007: 1, H0555: 1 and S0026: 1. |
| 285 | HSRFZ57 | 892171 | 295 | AR225: 4, AR309: 4, AR060: 4, AR192: 3, AR235: 3, AR162: 3, AR055: 3, AR161: 3, AR163: 3, AR215: 3, AR275: 3, AR169: 3, AR254: 3, AR217: 3, AR233: 2, |
| | | | | AR170: 2, AR177: 2, AR181: 2, AR236: 2, AR255: 2, AR228: 2, AR180: 2, AR289: 2, AR237: 2, AR243: 2, AR239: 2, AR166: 2, AR285: 2, AR266: 2, AR272: 2, |
| | | | | AR287: 2, AR222: 2, AR274: 2, AR176: 2, AR061: 2, AR271: 2, AR223: 2, AR247: 2, AR214: 1, AR224: 1, AR240: 1, AR172: 1, AR213: 1, AR283: 1, AR262: 1, |
| | | | | AR295: 1, AR033: 1, AR089: 1, AR174: 1, AR229: 1, AR216: 1, AR234: 1, AR238: 1, AR231: 1, AR316: 1, AR218: 1, AR300: 1, AR293: 1, S0022: 4 |
| 286 | HSSFT08 | 589978 | 296 | AR196: 17, AR176: 9, AR313: 9, AR162: 7, AR161: 7, AR199: 7, AR163: 6, AR228: 6, AR267: 6, AR266: 6, AR055: 6, AR165: 6, AR180: 6, AR053: 6, AR164: 6, |
| | | | | AR225: 5, AR166: 5, AR264: 5, AR269: 5, AR268: 5, AR238: 5, AR300: 5, AR181: 5, AR270: 5, AR242: 5, AR183: 5, AR060: 5, AR236: 5, AR233: 5, AR193: 5, |
| | | | | AR263: 4, AR182: 4, AR178: 4, AR290: 4, AR089: 4, AR229: 4, AR312: 4, AR257: 4, AR239: 4, AR240: 4, AR299: 4, AR221: 4, AR235: 4, AR231: 4, AR096: 4, |
| | | | | AR189: 4, AR177: 4, AR039: 4, AR215: 4, AR309: 4, AR261: 4, AR237: 4, AR191: 4, AR226: 4, AR247: 4, AR289: 4, AR175: 4, AR190: 3, AR188: 3, AR316: 3, |
| | | | | AR271: 3, AR293: 3, AR104: 3, AR282: 3, AR291: 3, AR061: 3, AR272: 3, AR169: 3, AR179: 3, AR274: 3, AR185: 3, AR227: 3, AR234: 3, AR230: 3, AR174: 3, |
| | | | | AR296: 3, AR294: 3, AR198: 3, AR262: 3, AR168: 3, AR255: 3, AR287: 3, AR171: 3, AR200: 3, AR214: 2, AR283: 2, AR288: 2, AR207: 2, AR203: 2, AR216: 2, |
| | | | | AR285: 2, AR286: 2, AR232: 2, AR204: 2, AR295: 2, AR250: 2, AR275: 2, AR297: 2, AR308: 2, AR201: 2, AR224: 2, AR277: 2, AR033: 2, AR212: 2, AR246: 1, |
| | | | | AR173: 1, AR205: 1, AR218: 1, AR222: 1, AR223: 1, AR195: 1, AR256: 1, AR258: 1, AR311: 1, AR260: 1, H0135: 2, L0518: 1 and L0758: 1. |
| 287 | HSSGD52 | 1352343 | 297 | AR225: 17, AR223: 16, AR215: 16, AR214: 14, AR224: 13, AR170: 13, AR217: 12, AR168: 12, AR172: 12, AR221: 12, AR246: 11, AR222: 11, AR216: 11, |
| | | | | AR269: 11, AR169: 11, AR171: 10, AR183: 9, AR268: 9, AR165: 8, AR290: 8, AR161: 8, AR164: 8, AR162: 8, AR270: 8, AR163: 8, AR166: 8, AR291: 7, |
| | | | | AR244: 7, AR298: 7, AR267: 7, AR182: 7, AR180: 7, AR266: 7, AR176: 7, AR186: 7, AR173: 7, AR052: 6, AR231: 6, AR271: 6, AR207: 6, AR292: 6, AR250: 6, |
| | | | | AR228: 6, AR282: 6, AR238: 6, AR206: 6, AR061: 6, AR273: 6, AR296: 6, AR275: 6, AR243: 6, AR181: 6, AR247: 5, AR289: 5, AR285: 5, AR200: 5, AR240: 5, |
| | | | | AR210: 5, AR053: 5, AR249: 5, AR314: 5, AR241: 5, AR202: 5, AR218: 5, AR219: 5, AR235: 5, AR194: 5, AR178: 5, AR197: 5, AR089: 5, AR189: 5, AR177: 5, |
| | | | | AR211: 5, AR239: 5, AR175: 5, AR237: 5, AR198: 5, AR293: 5, AR201: 5, AR190: 5, AR188: 5, AR295: 5, AR251: 5, AR255: 5, AR245: 4, AR280: 4, AR254: 4, |
| | | | | AR185: 4, AR196: 4, AR060: 4, AR272: 4, AR315: 4, AR213: 4, AR312: 4, AR300: 4, AR193: 4, AR309: 4, AR316: 4, AR257: 4, AR179: 4, AR232: 4, AR311: 4, |
| | | | | AR234: 4, AR233: 4, AR236: 4, AR264: 4, AR286: 4, AR299: 4, AR294: 4, AR204: 4, AR033: 4, AR229: 4, AR039: 4, AR226: 4, AR191: 4, AR205: 4, AR184: 3, |
| | | | | AR288: 3, AR274: 3, AR096: 3, AR261: 3, AR287: 3, AR203: 3, AR297: 3, AR284: 3, AR174: 3, AR212: 3, AR277: 3, AR055: 3, AR313: 3, AR192: 3, AR104: 3, |
| | | | | AR195: 3, AR265: 3, AR281: 3, AR230: 3, AR263: 3, AR262: 3, AR283: 3, AR256: 2, AR199: 2, AR227: 2, AR308: 2, AR310: 2, AR259: 2, AR253: 2, AR258: 2, |
| | | | | AR260: 2, AR242: 2, L0771: 6, L0743: 6, S0002: 5, L0770: 5, L0803: 5, L0805: 5, L0659: 5, L0666: 5, L0751: 5, H0585: 4, L0809: 4, L0439: 4, L0754: 4, L0758: 4, |
| | | | | H0586: 3, H0013: 3, H0551: 3, S0426: 3, L0769: 3, L0664: 3, L0665: 3, L0779: 3, L0780: 3, L0752: 3, L0757: 3, H0265: 2, S0376: 2, L2799: 2, S0278: 2, H0392: 2, |
| | | | | H0409: 2, L3816: 2, H0644: 2, H0135: 2, H0494: 2, S0142: 2, L0773: 2, L0789: 2, L0790: 2, L0663: 2, H0519: 2, H0658: 2, H0670: 2, H0521: 2, L0744: 2, L0740: 2, |
| | | | | L0749: 2, L0731: 2, S0276: 2, L3618: 2, H0624: 1, H0556: 1, H0141: 1, H0222: 1, S0342: 1, H0295: 1, T0049: 1, L2910: 1, S0212: 1, H0484: 1, S0418: 1, S0442: 1, |
| | | | | S0358: 1, S0444: 1, H0580: 1, S0007: 1, S0045: 1, S0476: 1, H0771: 1, L3104: 1, L0717: 1, H0549: 1, H0370: 1, H0486: 1, L2504: 1, L2570: 1, H0250: 1, S0010: 1, |
| | | | | S0346: 1, H0581: 1, S0049: 1, H0263: 1, H0046: 1, H0009: 1, H0123: 1, H0266: 1, H0687: 1, T0023: 1, L0483: 1, H0030: 1, S0366: 1, H0038: 1, H0634: 1, |
| | | | | T0067: 1, H0413: 1, H0334: 1, L0065: 1, S0440: 1, S0144: 1, H0773: 1, L0763: 1, L3905: 1, L0761: 1, L0372: 1, L0646: 1, L0800: 1, L0643: 1, L0764: 1, L0648: 1, |
| | | | | L0662: 1, L0794: 1, L0804: 1, L0774: 1, L0775: 1, L0806: 1, L0776: 1, L0655: 1, L0527: 1, L0782: 1, L0791: 1, L0793: 1, S0052: 1, L2257: 1, L2259: 1, L2654: 1, |
| | | | | L0565: 1, S0148: 1, H0593: 1, S0126: 1, H0682: 1, H0684: 1, H0435: 1, S0328: 1, S0380: 1, H0710: 1, L3834: 1, H0696: 1, S0044: 1, S0146: 1, S0392: 1, H0627: 1, |
| | | | | L0747: 1, L0750: 1, L0777: 1, L0759: 1, S0434: 1, S0026: 1, H0665: 1, H0136: 1 and H0542: 1. |
| | HSSGD52 | 845666 | 500 | |
| 288 | HSSGG82 | 618535 | 298 | AR285: 24, AR295: 17, AR291: 17, AR297: 17, AR287: 16, AR296: 16, AR261: 14, AR236: 13, AR262: 13, AR263: 12, AR235: 12, AR260: 11, AR294: 10, |
| | | | | AR253: 10, AR288: 10, AR293: 9, AR264: 9, AR311: 9, AR257: 8, AR309: 8, AR191: 8, AR189: 8, AR308: 8, AR254: 7, AR258: 7, AR161: 7, AR162: 7, |
| | | | | AR312: 7, AR213: 7, AR163: 7, AR255: 7, AR218: 7, AR246: 6, AR250: 6, AR175: 6, AR286: 6, AR174: 6, AR212: 6, AR190: 6, AR245: 6, AR060: 6, AR096: 6, |
| | | | | AR188: 5, AR197: 5, AR252: 5, AR313: 5, AR269: 5, AR196: 5, AR165: 5, AR274: 5, AR256: 5, AR282: 5, AR219: 5, AR316: 5, AR272: 5, AR089: 5, AR164: 5, |
| | | | | AR177: 5, AR270: 5, AR166: 5, AR199: 5, AR178: 5, AR173: 5, AR289: 5, AR182: 4, AR195: 4, AR271: 4, AR243: 4, AR171: 4, AR266: 4, AR183: 4, AR231: 4, |
| | | | | AR181: 4, AR176: 4, AR185: 4, AR275: 4, AR240: 4, AR180: 4, AR179: 4, AR238: 3, AR192: 3, AR225: 3, AR268: 3, AR104: 3, AR205: 3, AR201: 3, AR193: 3, |
| | | | | AR169: 3, AR237: 3, AR290: 3, AR033: 3, AR226: 3, AR229: 3, AR200: 3, AR239: 3, AR247: 3, AR198: 3, AR277: 2, AR233: 2, AR267: 2, AR232: 2, AR204: 2, |
| | | | | AR211: 2, AR234: 2, AR299: 2, AR283: 2, AR300: 2, AR210: 2, AR207: 2, AR203: 2, AR053: 2, AR055: 2, AR228: 2, AR214: 2, AR168: 2, AR222: 2, AR221: 2, |
| | | | | AR224: 2, AR227: 2, AR061: 2, AR216: 1, AR230: 1, AR215: 1 |
| 289 | HSUBW09 | 413246 | 299 | AR186: 66, AR202: 60, AR259: 59, AR206: 59, AR292: 58, AR061: 56, AR052: 56, AR283: 51, AR227: 49, AR251: 49, AR244: 48, AR249: 47, AR281: 45, |
| | | | | AR310: 44, AR280: 44, AR033: 43, AR055: 42, AR194: 42, AR192: 41, AR241: 41, AR273: 40, AR300: 40, AR314: 38, AR185: 38, AR248: 38, AR315: 37, |
| | | | | AR104: 36, AR232: 36, AR299: 35, AR233: 34, AR229: 34, AR237: 34, AR275: 34, AR184: 33, AR060: 32, AR265: 31, AR039: 31, AR177: 29, AR198: 28, |
| | | | | AR053: 28, AR294: 28, AR282: 27, AR243: 26, AR256: 26, AR309: 25, AR313: 25, AR231: 25, AR246: 25, AR295: 25, AR298: 24, AR089: 24, AR219: 24, |
| | | | | AR096: 24, AR274: 24, AR312: 23, AR204: 23, AR293: 22, AR284: 22, AR267: 21, AR205: 21, AR316: 21, AR271: 21, AR247: 20, AR226: 20, AR238: 19, |
| | | | | AR213: 19, AR175: 19, AR234: 18, AR218: 17, AR253: 16, AR289: 16, AR277: 14, AR258: 14, AR179: 13, AR266: 12, AR286: 12, AR263: 12, AR285: 12, |
| | | | | AR296: 12, AR183: 11, AR291: 11, AR270: 10, AR240: 9, AR182: 9, AR268: 8, AR269: 8, AR290: 8, AR163: 5, AR287: 4, AR176: 3, AR250: 3, AR215: 3, |
| | | | | AR225: 2, AR201: 2, AR172: 2, AR224: 2, AR221: 2, AR272: 2, AR264: 2, AR214: 1, AR165: 1, AR195: 1, AR193: 1, AR257: 1, AR216: 1, L0766: 5, L0749: 3, |
| | | | | S0134: 2, L0770: 2, L0794: 2, L0809: 2, L0790: 2, H0556: 1, H0735: 1, L0622: 1, H0457: 1, H0561: 1, L0662: 1, L0804: 1, L5622: 1, H0436: 1, L0779: 1, L0731: 1, |
| | | | | L0758: 1, H0136: 1 and H0506: 1. |
| 290 | HSVBU91 | 596868 | 300 | AR215: 6, AR207: 5, AR162: 4, AR161: 4, AR163: 4, AR309: 4, AR271: 4, AR266: 4, AR165: 4, AR176: 4, AR164: 4, AR272: 3, AR039: 3, AR192: 3, AR213: 3, |
| | | | | AR253: 3, AR166: 3, AR264: 3, AR089: 3, AR282: 3, AR204: 3, AR235: 3, AR205: 3, AR313: 3, AR053: 3, AR201: 2, AR224: 2, AR178: 2, AR275: 2, AR181: 2, |
| | | | | AR267: 2, AR182: 2, AR269: 2, AR277: 2, AR104: 2, AR286: 2, AR246: 2, AR287: 2, AR289: 2, AR033: 2, AR243: 2, AR237: 2, AR230: 2, AR223: 2, AR268: 2, |
| | | | | AR293: 2, AR180: 2, AR060: 2, AR175: 2, AR198: 2, AR229: 2, AR177: 2, AR270: 2, AR233: 2, AR183: 2, AR228: 2, AR261: 2, AR239: 2, AR316: 2, AR285: 2, |
| | | | | AR179: 2, AR232: 1, AR231: 1, AR312: 1, AR061: 1, AR288: 1, AR257: 1, AR096: 1, AR291: 1, AR225: 1, AR226: 1, AR294: 1, AR295: 1, AR185: 1, AR311: 1, |
| | | | | AR227: 1, AR234: 1, AR174: 1, AR203: 1, AR297: 1, AR173: 1, AR191: 1, AR247: 1, AR308: 1, AR238: 1, AR216: 1, AR255: 1, AR170: 1, H0309: 1 |
| 291 | HSYAV50 | 847358 | 301 | AR268: 5, AR182: 5, AR270: 4, AR183: 4, AR267: 4, AR290: 4, AR269: 4, AR247: 3, AR291: 3, AR289: 3, AR284: 3, AR184: 3, AR175: 3, AR282: 3, AR234: 3, |
| | | | | AR296: 3, AR312: 2, AR232: 2, AR177: 2, AR292: 2, AR238: 2, AR294: 2, AR266: 2, AR298: 2, AR053: 2, AR229: 2, AR227: 2, AR286: 2, AR313: 2, AR285: 2, |
| | | | | AR231: 2, AR061: 2, AR202: 2, AR179: 1, AR240: 1, AR033: 1, AR310: 1, AR277: 1, AR186: 1, AR213: 1, AR293: 1, AR274: 1, AR226: 1, AR315: 1, AR052: 1, |
| | | | | AR309: 1, AR233: 1, AR295: 1, AR299: 1, AR089: 1, L0659: 9, L0803: 6, L0794: 5, L0750: 4, S0212: 3, L0809: 3, L0665: 3, L0751: 3, L0759: 3, H0717: 2, |
| | | | | S0298: 2, H0402: 2, H0392: 2, H0545: 2, S0250: 2, H0551: 2, L0768: 2, L0666: 2, L2654: 2, L0757: 2, H0667: 2, H0170: 1, H0713: 1, S0420: 1, S0444: 1, H0637: 1, |
| | | | | H0592: 1, L0021: 1, H0575: 1, H0251: 1, H0544: 1, H0041: 1, H0014: 1, H0292: 1, H0553: 1, L0143: 1, H0628: 1, H0124: 1, H0616: 1, T0067: 1, H0509: 1, |
| | | | | L0637: 1, L0800: 1, L0662: 1, L0774: 1, L0653: 1, L0654: 1, L0807: 1, L0657: 1, L0647: 1, L2261: 1, H0682: 1, H0658: 1, H0648: 1, H0555: 1, S0028: 1, L0747: 1 |
| | | | | and L0749: 1. |
| 292 | HTAEE28 | 1018291 | 302 | AR170: 5, AR169: 4, AR221: 3, AR250: 3, AR217: 3, AR242: 2, AR263: 2, AR171: 2, AR193: 2, AR245: 2, AR201: 2, AR172: 2, AR183: 2, AR300: 2, AR216: 1, |
| | | | | AR267: 1, AR309: 1, AR257: 1, AR269: 1, AR224: 1, AR168: 1, AR161: 1, AR215: 1, AR311: 1, H0250: 3, H0069: 2, L0771: 2, S0404: 2, H0650: 1, H0656: 1, |
| | | | | H0486: 1, H0013: 1, H0318: 1, S0422: 1, L0644: 1, L0768: 1, L0794: 1, L0804: 1, L0655: 1, L0789: 1, L0664: 1, H0436: 1 and L0758: 1. |
| | HTAEE28 | 882919 | 501 | |
| | HTAEE28 | 864120 | 502 | |
| 293 | HTECC05 | 1352365 | 303 | AR176: 5, AR169: 3, AR224: 3, AR180: 3, AR291: 3, AR225: 3, AR238: 3, AR267: 3, AR261: 2, AR245: 2, AR289: 2, AR270: 2, AR257: 2, AR175: 2, AR269: 2, |
| | | | | AR168: 2, AR181: 2, AR228: 2, AR243: 2, AR309: 2, AR285: 2, AR295: 2, AR217: 2, AR230: 2, AR293: 2, AR239: 2, AR171: 2, AR177: 2, AR294: 2, AR236: 2, |
| | | | | AR313: 1, AR296: 1, AR231: 1, AR290: 1, AR190: 1, AR227: 1, AR179: 1, AR246: 1, AR312: 1, AR287: 1, AR247: 1, AR271: 1, AR266: 1, AR178: 1, AR250: 1, |
| | | | | AR061: 1, AR182: 1, AR268: 1, AR233: 1, AR196: 1, AR262: 1, AR234: 1, AR272: 1, AR162: 1, AR277: 1, AR096: 1, H0617: 10, S0410: 8, L0758: 8, L0769: 7, |
| | | | | H0038: 6, L0439: 6, L0750: 6, L0752: 6, S0360: 5, L0775: 5, S0406: 5, H0150: 4, L0157: 4, H0620: 4, H0087: 4, S0440: 4, S0344: 4, L0763: 4, S0328: 4, L0747: 4, |
| | | | | H0224: 3, H0484: 3, H0402: 3, S0049: 3, H0708: 3, L0773: 3, L0805: 3, L0809: 3, L0519: 3, H0670: 3, L0748: 3, L0731: 3, L0757: 3, L0581: 3, H0295: 2, H0341: 2, |
| | | | | S0444: 2, S0222: 2, L0622: 2, H0253: 2, H0309: 2, T0115: 2, H0544: 2, H0545: 2, H0081: 2, H0012: 2, H0673: 2, S0036: 2, H0616: 2, L0770: 2, L0774: 2, L0518: 2, |
| | | | | H0725: 2, S0374: 2, H0696: 2, L0588: 2, H0543: 2, L0615: 1, H0160: 1, H0225: 1, H0713: 1, S6024: 1, S0430: 1, H0656: 1, S0116: 1, S0212: 1, H0483: 1, H0306: 1, |
| | | | | H0638: 1, H0125: 1, S0420: 1, S0358: 1, S0408: 1, H0637: 1, S0476: 1, H0640: 1, H0411: 1, S0278: 1, H0441: 1, H0461: 1, H0298: 1, H0333: 1, L0623: 1, H0486: 1, |
| | | | | H0427: 1, H0156: 1, H0599: 1, T0082: 1, T0048: 1, H0318: 1, H0581: 1, H0196: 1, H0597: 1, L0738: 1, H0530: 1, H0242: 1, H0024: 1, H0373: 1, L0163: 1, |
| | | | | H0275: 1, H0188: 1, H0284: 1, S0003: 1, H0428: 1, H0213: 1, H0405: 1, H0181: 1, H0182: 1, H0606: 1, L0055: 1, H0163: 1, H0063: 1, T0067: 1, H0100: 1, |
| | | | | H0560: 1, H0561: 1, H0647: 1, S0142: 1, L0598: 1, L3904: 1, L0761: 1, L0772: 1, L0764: 1, L0767: 1, L0768: 1, L0766: 1, L0649: 1, L0803: 1, L0375: 1, L0806: 1, |
| | | | | L0776: 1, L0517: 1, L0526: 1, L0783: 1, L0789: 1, H0144: 1, L0438: 1, H0689: 1, H0690: 1, H0682: 1, H0683: 1, H0435: 1, H0659: 1, H0648: 1, H0521: 1, |
| | | | | H0522: 1, S3014: 1, S0027: 1, L0755: 1, L0759: 1, H0445: 1, H0343: 1, H0595: 1, L0608: 1, H0136: 1, S0276: 1, H0542: 1, L0600: 1 and H0352: 1. |
| | HTECC05 | 877448 | 503 | |
| | HTECC05 | 666743 | 504 | |
| 294 | HTEEB42 | 206980 | 304 | AR174: 12, AR191: 12, AR190: 11, AR244: 11, AR181: 11, AR291: 10, AR186: 10, AR180: 10, AR175: 10, AR192: 10, AR189: 9, AR176: 9, AR240: 9, |
| | | | | AR269: 9, AR241: 9, AR178: 9, AR270: 9, AR177: 8, AR266: 8, AR268: 8, AR183: 8, AR273: 8, AR274: 8, AR165: 8, AR247: 7, AR164: 7, AR198: 7, AR184: 7, |
| | | | | AR166: 7, AR162: 7, AR202: 7, AR161: 7, AR163: 7, AR246: 7, AR245: 6, AR197: 6, AR289: 6, AR173: 6, AR201: 6, AR267: 6, AR182: 6, AR271: 6, AR052: 6, |
| | | | | AR206: 6, AR309: 6, AR155: 6, AR188: 6, AR275: 6, AR263: 6, AR251: 5, AR236: 5, AR284: 5, AR194: 5, AR295: 5, AR255: 5, AR235: 5, AR277: 5, AR299: 5, |
| | | | | AR179: 5, AR055: 5, AR290: 5, AR104: 5, AR033: 5, AR193: 5, AR228: 4, AR230: 4, AR204: 4, AR196: 4, AR170: 4, AR285: 4, AR256: 4, AR172: 4, AR272: 4, |
| | | | | AR257: 4, AR262: 4, AR205: 4, AR233: 4, AR308: 4, AR261: 4, AR195: 4, AR252: 4, AR300: 4, AR223: 4, AR089: 4, AR287: 4, AR238: 4, AR243: 4, AR214: 4, |
| | | | | AR296: 4, AR237: 4, AR265: 4, AR250: 4, AR239: 4, AR288: 4, AR298: 4, AR224: 3, AR294: 3, AR229: 3, AR248: 3, AR316: 3, AR207: 3, AR286: 3, AR312: 3, |
| | | | | AR297: 3, AR264: 3, AR199: 3, AR061: 3, AR293: 3, AR053: 3, AR227: 3, AR060: 3, AR311: 3, AR211: 3, AR249: 3, AR225: 3, AR292: 3, AR219: 3, AR258: 3, |
| | | | | AR039: 3, AR215: 3, AR313: 3, AR282: 3, AR226: 3, AR260: 3, AR231: 2, AR242: 2, AR203: 2, AR171: 2, AR168: 2, AR210: 2, AR200: 2, AR259: 2, AR234: 2, |
| | | | | AR096: 2, AR232: 2, AR169: 2, AR222: 2, AR254: 2, AR218: 2, AR221: 2, AR253: 2, AR283: 2, AR213: 1, AR216: 1, AR217: 1, AR310: 1, L0794: 4, H0624: 2, |
| | | | | H0038: 2, L0375: 2, S0330: 2, L0750: 2, L0779: 2, H0031: 1, H0644: 1, H0124: 1, H0591: 1, H0616: 1, H0264: 1, H0623: 1, L0770: 1, L0637: 1, L0805: 1, L0663: 1, |
| | | | | L0749: 1, L0777: 1, L0780: 1 and L0599: 1. |
| 295 | HTEFU65 | 543396 | 305 | AR240: 15, AR055: 12, AR060: 7, AR039: 6, AR299: 6, AR219: 6, AR277: 5, AR089: 5, AR218: 5, AR300: 5, AR185: 5, AR104: 5, AR283: 4, AR282: 4, |
| | | | | AR316: 4, AR096: 3, AR313: 3, H0486: 3, H0253: 1, H0544: 1, H0012: 1, S0388: 1, H0553: 1, H0090: 1, H0038: 1, H0652: 1, L0769: 1, L0641: 1, L0806: 1, |
| | | | | H0696: 1, L0748: 1, L0749: 1, S0031: 1 and S0196: 1. |
| 296 | HTEGA76 | 381995 | 306 | AR192: 3, AR253: 3, AR235: 3, AR282: 3, AR258: 3, AR168: 3, AR252: 3, AR263: 2, AR243: 2, AR170: 2, AR207: 2, AR172: 2, AR221: 2, AR217: 2, AR215: 2, |
| | | | | AR257: 2, AR176: 2, AR183: 2, AR178: 2, AR214: 1, AR222: 1, AR165: 1, AR164: 1, AR294: 1, AR166: 1, AR089: 1, AR204: 1, AR277: 1, AR181: 1, H0038: 1 |
| | | | | and L0758: 1. |
| 297 | HTELM16 | 834058 | 307 | AR263: 52, AR207: 41, AR169: 38, AR309: 37, AR214: 36, AR235: 36, AR264: 35, AR224: 34, AR223: 32, AR172: 31, AR222: 31, AR283: 31, AR277: 30, |
| | | | | AR311: 30, AR213: 29, AR168: 29, AR195: 27, AR170: 26, AR171: 26, AR212: 26, AR216: 26, AR282: 25, AR308: 25, AR197: 25, AR089: 24, AR165: 24, |
| | | | | AR316: 23, AR252: 23, AR215: 23, AR217: 23, AR192: 23, AR225: 23, AR164: 23, AR166: 22, AR198: 22, AR271: 21, AR055: 21, AR162: 21, AR053: 20, |
| | | | | AR104: 20, AR240: 20, AR177: 20, AR312: 20, AR201: 19, AR299: 19, AR161: 19, AR221: 19, AR096: 19, AR236: 19, AR272: 19, AR245: 19, AR163: 19, |
| | | | | AR261: 18, AR242: 18, AR313: 17, AR205: 17, AR193: 17, AR196: 17, AR060: 16, AR219: 16, AR246: 16, AR033: 16, AR218: 16, AR181: 16, AR039: 16, |
| | | | | AR229: 16, AR300: 15, AR176: 15, AR174: 15, AR275: 15, AR185: 14, AR288: 14, AR274: 14, AR250: 13, AR238: 13, AR295: 13, AR253: 12, AR237: 12, |
| | | | | AR243: 12, AR232: 11, AR239: 11, AR247: 11, AR289: 11, AR183: 11, AR291: 10, AR234: 10, AR188: 10, AR226: 10, AR175: 10, AR231: 10, AR285: 10, |
| | | | | AR204: 10, AR293: 10, AR227: 10, AR173: 10, AR200: 10, AR199: 10, AR296: 10, AR211: 10, AR061: 10, AR178: 10, AR268: 10, AR266: 10, AR180: 10, |
| | | | | AR255: 10, AR258: 9, AR233: 9, AR262: 9, AR286: 9, AR191: 9, AR230: 9, AR257: 9, AR267: 9, AR297: 9, AR254: 9, AR189: 9, AR210: 9, AR269: 9, AR270: 8, |
| | | | | AR260: 8, AR228: 8, AR287: 8, AR256: 8, AR190: 8, AR182: 7, AR294: 7, AR179: 7, AR203: 7, AR290: 6, L0794: 7, L0779: 3, L0758: 3, H0559: 1, H0616: 1 and |
| | | | | L0767: 1. |
| 298 | HTELP17 | 836072 | 308 | AR263: 33, AR223: 32, AR214: 31, AR309: 30, AR224: 29, AR264: 29, AR283: 27, AR308: 27, AR222: 27, AR169: 25, AR235: 25, AR172: 25, AR277: 24, |
| | | | | AR212: 23, AR053: 23, AR168: 23, AR213: 22, AR171: 22, AR316: 21, AR221: 21, AR311: 21, AR261: 21, AR217: 20, AR089: 20, AR170: 20, AR055: 19, |
| | | | | AR219: 19, AR282: 19, AR165: 19, AR312: 19, AR162: 19, AR225: 19, AR216: 19, AR161: 18, AR164: 18, AR176: 18, AR218: 18, AR033: 18, AR295: 18, |
| | | | | AR163: 18, AR207: 18, AR104: 18, AR096: 17, AR236: 17, AR166: 17, AR215: 16, AR299: 16, AR177: 16, AR240: 16, AR060: 16, AR196: 15, AR288: 15, |
| | | | | AR266: 15, AR300: 15, AR269: 15, AR039: 15, AR200: 15, AR181: 15, AR313: 15, AR291: 14, AR178: 14, AR293: 14, AR185: 14, AR272: 14, AR286: 14, |
| | | | | AR253: 13, AR210: 13, AR294: 13, AR270: 13, AR296: 13, AR285: 13, AR227: 13, AR239: 13, AR297: 13, AR233: 12, AR174: 12, AR245: 12, AR183: 12, |
| | | | | AR252: 12, AR192: 12, AR230: 12, AR226: 12, AR287: 12, AR175: 12, AR257: 12, AR195: 12, AR258: 12, AR274: 12, AR229: 11, AR289: 11, AR237: 11, |
| | | | | AR179: 11, AR267: 11, AR255: 11, AR247: 11, AR061: 11, AR262: 11, AR290: 11, AR231: 11, AR191: 11, AR275: 11, AR268: 11, AR180: 10, AR182: 10, |
| | | | | AR199: 10, AR234: 10, AR204: 10, AR205: 10, AR173: 10, AR188: 10, AR228: 10, AR232: 10, AR238: 9, AR198: 9, AR190: 9, AR197: 9, AR203: 9, AR256: 9, |
| | | | | AR189: 8, AR254: 8, AR250: 8, AR246: 7, AR211: 7, AR193: 7, AR260: 7, AR243: 7, AR201: 7, AR271: 6, AR242: 5, L0758: 3, S0408: 2, H0031: 2, H0038: 2, |
| | | | | L0766: 2, H0521: 2, L0748: 2, H0341: 1, L3659: 1, S0476: 1, H0581: 1, S0051: 1, H0266: 1, H0111: 1, H0616: 1, L0794: 1, L0805: 1, L0787: 1, L0779: 1, L0759: 1, |
| | | | | L0593: 1, H0542: 1 and H0543: 1. |
| 299 | HTELS08 | 847090 | 309 | AR235: 6, AR215: 6, AR242: 5, AR162: 4, AR161: 4, AR192: 4, AR165: 4, AR053: 4, AR163: 4, AR269: 4, AR164: 4, AR291: 4, AR288: 4, AR166: 4, AR176: 4, |
| | | | | AR221: 4, AR257: 4, AR282: 3, AR236: 3, AR217: 3, AR264: 3, AR261: 3, AR196: 3, AR178: 3, AR270: 3, AR177: 3, AR272: 3, AR181: 3, AR255: 3, AR297: 3, |
| | | | | AR294: 3, AR172: 3, AR182: 3, AR295: 3, AR296: 3, AR055: 3, AR060: 3, AR285: 3, AR179: 3, AR240: 3, AR191: 3, AR287: 3, AR216: 3, AR293: 3, AR175: 3, |
| | | | | AR183: 3, AR225: 3, AR313: 3, AR199: 3, AR180: 3, AR238: 3, AR233: 3, AR195: 3, AR223: 2, AR239: 2, AR228: 2, AR173: 2, AR168: 2, AR311: 2, AR262: 2, |
| | | | | AR290: 2, AR263: 2, AR237: 2, AR268: 2, AR188: 2, AR266: 2, AR033: 2, AR229: 2, AR247: 2, AR207: 2, AR277: 2, AR286: 2, AR174: 2, AR300: 2, AR267: 2, |
| | | | | AR193: 2, AR250: 2, AR230: 2, AR258: 2, AR189: 2, AR246: 2, AR289: 2, AR096: 2, AR231: 2, AR283: 2, AR185: 2, AR089: 2, AR222: 2, AR275: 2, AR308: 2, |
| | | | | AR201: 2, AR260: 2, AR190: 2, AR316: 2, AR312: 2, AR061: 2, AR226: 2, AR243: 2, AR299: 2, AR104: 2, AR171: 1, AR200: 1, AR219: 1, AR309: 1, AR227: 1, |
| | | | | AR203: 1, AR256: 1, AR039: 1, AR234: 1, AR169: 1, AR232: 1, H0616: 2, L0758: 2 and H0038: 1. |
| 300 | HTEPG70 | 834931 | 310 | AR176: 9, AR282: 7, AR162: 7, AR161: 7, AR163: 7, AR055: 7, AR182: 7, AR060: 6, AR266: 6, AR253: 6, AR201: 6, AR228: 5, AR242: 5, AR269: 5, AR204: 5, |
| | | | | AR198: 5, AR268: 5, AR261: 5, AR233: 5, AR229: 5, AR267: 5, AR270: 5, AR263: 5, AR165: 5, AR166: 5, AR181: 5, AR214: 5, AR223: 4, AR246: 4, AR183: 4, |
| | | | | AR164: 4, AR236: 4, AR239: 4, AR309: 4, AR257: 4, AR283: 4, AR178: 4, AR275: 4, AR053: 4, AR289: 4, AR238: 4, AR177: 4, AR193: 4, AR185: 4, AR230: 4, |
| | | | | AR089: 4, AR218: 4, AR277: 4, AR179: 4, AR192: 4, AR264: 4, AR039: 4, AR237: 4, AR104: 4, AR316: 4, AR061: 4, AR243: 4, AR175: 4, AR300: 4, AR222: 4, |
| | | | | AR240: 4, AR299: 4, AR231: 4, AR224: 3, AR096: 3, AR312: 3, AR308: 3, AR173: 3, AR245: 3, AR212: 3, AR226: 3, AR196: 3, AR271: 3, AR286: 3, AR247: 3, |
| | | | | AR274: 3, AR215: 3, AR255: 3, AR293: 3, AR288: 3, AR174: 3, AR197: 3, AR191: 3, AR296: 3, AR207: 3, AR221: 3, AR262: 3, AR227: 3, AR287: 3, AR199: 3, |
| | | | | AR190: 3, AR290: 3, AR180: 3, AR234: 3, AR311: 2, AR313: 2, AR203: 2, AR291: 2, AR200: 2, AR272: 2, AR294: 2, AR232: 2, AR216: 2, AR188: 2, AR295: 2, |
| | | | | AR258: 2, AR033: 2, AR260: 2, AR285: 2, AR189: 2, AR297: 2, AR171: 2, AR205: 2, AR195: 2, AR219: 2, AR168: 2, AR210: 2, AR213: 1, AR256: 1, AR172: 1, |
| | | | | AR211: 1, AR254: 1, AR235: 1, AR169: 1, H0616: 3, L0758: 3, L0717: 1, H0038: 1 and L0779: 1. |
| 301 | HTGEP89 | 410582 | 311 | AR204: 2819, AR055: 1652, AR243: 1634, AR193: 1321, AR242: 1210, AR198: 1095, AR197: 1075, AR283: 1053, AR039: 973, AR195: 937, AR201: 917, |
| | | | | AR207: 849, AR192: 820, AR205: 809, AR300: 762, AR271: 680, AR053: 647, AR246: 622, AR173: 609, AR245: 560, AR254: 559, AR275: 550, AR233: 536, |
| | | | | AR212: 528, AR308: 522, AR229: 477, AR282: 470, AR250: 462, AR089: 461, AR227: 459, AR272: 439, AR176: 429, AR274: 408, AR213: 408, AR253: 398, |
| | | | | AR234: 385, AR312: 385, AR270: 369, AR239: 367, AR226: 364, AR252: 361, AR257: 351, AR228: 347, AR247: 346, AR316: 343, AR060: 337, AR174: 332, |
| | | | | AR185: 332, AR163: 332, AR165: 325, AR177: 322, AR260: 320, AR240: 319, AR164: 315, AR166: 312, AR231: 304, AR161: 301, AR061: 296, AR309: 280, |
| | | | | AR162: 271, AR258: 267, AR033: 256, AR293: 245, AR255: 227, AR294: 227, AR261: 220, AR179: 217, AR238: 217, AR297: 217, AR264: 213, AR262: 209, |
| | | | | AR286: 205, AR175: 201, AR236: 200, AR311: 199, AR288: 197, AR287: 196, AR299: 195, AR232: 190, AR263: 184, AR104: 174, AR230: 173, AR096: 172, |
| | | | | AR182: 168, AR200: 159, AR277: 158, AR237: 155, AR199: 146, AR268: 144, AR203: 142, AR313: 140, AR285: 140, AR269: 140, AR267: 139, AR235: 138, |
| | | | | AR295: 132, AR190: 122, AR178: 115, AR181: 110, AR189: 103, AR180: 103, AR256: 101, AR289: 95, AR266: 94, AR296: 84, AR183: 82, AR290: 81, |
| | | | | AR196: 78, AR219: 77, AR218: 73, AR188: 70, AR291: 64, AR191: 63, AR171: 52, AR222: 47, AR168: 47, AR224: 43, AR169: 43, AR170: 41, AR214: 37, |
| | | | | AR221: 36, AR223: 35, AR217: 34, AR216: 32, AR172: 32, AR225: 23, AR215: 18, AR211: 16, AR210: 9, L0775: 3, L0779: 2, L0758: 2, S0218: 1, S0001: 1, |
| | | | | H0305: 1, L3435: 1, L3815: 1, L0766: 1 and H0422: 1. |
| 302 | HTHBG43 | 919911 | 312 | AR215: 6, AR225: 5, AR171: 3, AR170: 3, AR193: 3, AR180: 3, AR254: 3, AR169: 3, AR221: 2, AR243: 2, AR309: 2, AR164: 2, AR283: 2, AR222: 2, AR172: 2, |
| | | | | AR176: 1, AR224: 1, AR299: 1, AR290: 1, AR311: 1, AR242: 1, AR270: 1, AR216: 1, AR168: 1, AR296: 1, AR277: 1, L0485: 2, H0306: 1, H0063: 1, L0646: 1, |
| | | | | L0794: 1, L0766: 1 and H0134: 1. |
| | HTHBG43 | 906282 | 505 | |
| 303 | HTHDS25 | 772559 | 313 | AR313: 26, AR096: 17, AR163: 16, AR161: 16, AR165: 16, AR166: 16, AR162: 16, AR164: 15, AR173: 15, AR089: 15, AR183: 14, AR178: 14, AR175: 14, |
| | | | | AR247: 14, AR293: 13, AR192: 13, AR308: 13, AR181: 13, AR299: 12, AR176: 12, AR229: 12, AR242: 12, AR180: 11, AR269: 11, AR182: 10, AR300: 10, |
| | | | | AR179: 10, AR264: 10, AR258: 10, AR226: 10, AR233: 10, AR240: 10, AR268: 10, AR104: 9, AR312: 9, AR275: 9, AR238: 9, AR212: 9, AR053: 9, AR174: 9, |
| | | | | AR218: 9, AR196: 9, AR296: 9, AR177: 9, AR262: 9, AR282: 9, AR245: 8, AR257: 8, AR198: 8, AR197: 8, AR316: 8, AR270: 8, AR228: 8, AR185: 8, AR204: 8, |
| | | | | AR060: 8, AR200: 8, AR234: 8, AR309: 8, AR297: 8, AR286: 8, AR266: 8, AR039: 7, AR236: 7, AR285: 7, AR239: 7, AR267: 7, AR274: 7, AR231: 7, AR237: 7, |
| | | | | AR193: 7, AR294: 7, AR203: 7, AR195: 6, AR213: 6, AR261: 6, AR263: 6, AR287: 6, AR290: 6, AR191: 6, AR277: 6, AR199: 6, AR033: 6, AR295: 6, AR243: 6, |
| | | | | AR201: 6, AR289: 6, AR230: 6, AR235: 6, AR255: 6, AR291: 6, AR260: 5, AR227: 5, AR205: 5, AR256: 5, AR219: 5, AR271: 5, AR207: 5, AR189: 5, AR288: 5, |
| | | | | AR061: 5, AR272: 5, AR250: 5, AR223: 4, AR246: 4, AR214: 4, AR055: 4, AR188: 4, AR232: 4, AR283: 4, AR170: 4, AR254: 3, AR169: 3, AR171: 3, AR221: 3, |
| | | | | AR253: 3, AR311: 3, AR190: 3, AR224: 3, AR215: 3, AR210: 2, AR168: 2, AR222: 2, AR225: 2, AR172: 2, AR211: 1, AR216: 1, AR217: 1, H0063: 1, T0067: 1 |
| | | | | and L0662: 1. |
| 304 | HTLEP53 | 634852 | 314 | AR173: 20, AR262: 20, AR313: 19, AR196: 16, AR161: 16, AR162: 15, AR175: 15, AR163: 15, AR258: 15, AR165: 15, AR164: 14, AR166: 14, AR178: 13, |
| | | | | AR257: 13, AR300: 13, AR179: 13, AR181: 12, AR233: 12, AR229: 12, AR174: 12, AR183: 12, AR247: 12, AR240: 11, AR234: 11, AR177: 11, AR191: 11, |
| | | | | AR200: 10, AR236: 10, AR293: 10, AR242: 10, AR199: 10, AR269: 10, AR182: 10, AR180: 10, AR260: 9, AR255: 9, AR275: 8, AR238: 8, AR264: 8, AR228: 8, |
| | | | | AR270: 8, AR261: 8, AR188: 8, AR297: 8, AR231: 8, AR185: 8, AR226: 8, AR294: 8, AR296: 8, AR176: 8, AR312: 8, AR287: 8, AR203: 7, AR219: 7, AR268: 7, |
| | | | | AR290: 7, AR230: 7, AR033: 7, AR267: 7, AR274: 7, AR096: 7, AR237: 7, AR213: 7, AR189: 7, AR285: 6, AR286: 6, AR288: 6, AR197: 6, AR295: 6, AR053: 6, |
| | | | | AR212: 6, AR308: 6, AR291: 6, AR204: 6, AR218: 6, AR266: 6, AR309: 6, AR198: 6, AR089: 5, AR235: 5, AR282: 5, AR193: 5, AR170: 5, AR299: 5, AR263: 5, |
| | | | | AR239: 5, AR256: 5, AR210: 5, AR190: 5, AR277: 5, AR289: 5, AR316: 5, AR169: 4, AR217: 4, AR192: 4, AR060: 4, AR201: 4, AR223: 4, AR227: 4, AR245: 4, |
| | | | | AR171: 4, AR252: 4, AR243: 4, AR221: 4, AR232: 4, AR211: 4, AR061: 4, AR272: 4, AR271: 3, AR311: 3, AR195: 3, AR205: 3, AR039: 3, AR172: 3, AR250: 3, |
| | | | | AR214: 2, AR207: 2, AR055: 2, AR168: 2, AR222: 2, AR283: 2, AR224: 2, AR104: 2, AR215: 2, AR216: 1, AR225: 1, H0253: 1 |
| 305 | HTLGE31 | 1035130 | 315 | AR248: 803, AR258: 750, AR259: 694, AR309: 673, AR256: 663, AR312: 560, AR253: 551, AR053: 520, AR266: 496, AR286: 488, AR289: 486, AR213: 478, |
| | | | | AR265: 434, AR310: 428, AR263: 421, AR294: 413, AR052: 367, AR249: 341, AR315: 332, AR241: 320, AR219: 316, AR292: 296, AR247: 289, AR218: 287, |
| | | | | AR280: 285, AR275: 279, AR281: 278, AR271: 268, AR202: 264, AR177: 263, AR198: 263, AR246: 249, AR293: 234, AR268: 231, AR205: 223, AR243: 222, |
| | | | | AR183: 221, AR204: 219, AR194: 216, AR206: 196, AR179: 195, AR244: 193, AR283: 192, AR192: 191, AR269: 190, AR314: 190, AR291: 180, AR274: 177, |
| | | | | AR284: 175, AR298: 174, AR240: 173, AR273: 171, AR096: 168, AR175: 147, AR313: 146, AR231: 145, AR270: 144, AR290: 139, AR316: 135, AR033: 134, |
| | | | | AR300: 124, AR039: 121, AR267: 120, AR184: 118, AR234: 118, AR285: 112, AR186: 99, AR229: 93, AR299: 89, AR104: 87, AR237: 85, AR182: 84, |
| | | | | AR296: 74, AR251: 72, AR055: 66, AR232: 66, AR295: 65, AR185: 59, AR089: 56, AR282: 51, AR226: 48, AR238: 44, AR061: 37, AR227: 31, AR233: 29, |
| | | | | AR277: 21, AR060: 15, H0618: 1, L0368: 1 and S0053: 1. |
| 306 | HTLHY14 | 838460 | 316 | AR215: 8, AR169: 7, AR176: 6, AR060: 6, AR055: 6, AR223: 6, AR269: 6, AR162: 6, AR182: 6, AR277: 5, AR161: 5, AR163: 5, AR183: 5, AR225: 5, AR104: 5, |
| | | | | AR181: 5, AR171: 4, AR266: 4, AR228: 4, AR257: 4, AR221: 4, AR053: 4, AR267: 4, AR291: 4, AR274: 4, AR229: 4, AR233: 4, AR236: 4, AR177: 4, AR168: 4, |
| | | | | AR235: 4, AR253: 4, AR179: 4, AR191: 4, AR240: 4, AR255: 4, AR089: 4, AR261: 4, AR239: 3, AR268: 3, AR178: 3, AR237: 3, AR238: 3, AR309: 3, AR216: 3, |
| | | | | AR275: 3, AR283: 3, AR252: 3, AR224: 3, AR294: 3, AR262: 3, AR300: 3, AR217: 3, AR290: 3, AR287: 3, AR293: 3, AR270: 3, AR185: 3, AR172: 3, AR296: 3, |
| | | | | AR288: 3, AR316: 3, AR299: 3, AR311: 3, AR180: 3, AR289: 3, AR231: 3, AR214: 3, AR196: 3, AR175: 3, AR061: 3, AR230: 3, AR170: 3, AR313: 3, AR039: 3, |
| | | | | AR188: 3, AR285: 3, AR282: 3, AR199: 3, AR174: 3, AR234: 3, AR297: 2, AR190: 2, AR207: 2, AR218: 2, AR286: 2, AR189: 2, AR200: 2, AR226: 2, AR096: 2, |
| | | | | AR272: 2, AR295: 2, AR173: 2, AR247: 2, AR227: 2, AR264: 2, AR232: 2, AR164: 2, AR263: 2, AR312: 2, AR033: 2, AR243: 2, AR213: 2, AR165: 2, AR193: 2, |
| | | | | AR203: 2, AR205: 2, AR219: 2, AR258: 2, AR166: 2, AR201: 2, AR250: 1, AR271: 1, AR260: 1, AR222: 1, H0618: 12, H0253: 7, L0758: 5, L0766: 3, L0779: 3, |
| | | | | S0222: 1, H0150: 1, H0063: 1, L0648: 1, H0522: 1 and L0698: 1. |
| 307 | HTLIV19 | 1046341 | 317 | AR313: 57, AR039: 49, AR089: 39, AR299: 34, AR277: 31, AR185: 28, AR096: 28, AR300: 28, AR240: 27, AR316: 25, AR218: 23, AR104: 23, AR060: 21, |
| | | | | AR219: 20, AR055: 17, AR282: 17, AR283: 12, H0618: 1 |
| 308 | HTOAK16 | 560744 | 318 | AR219: 41, AR218: 38, AR096: 21, AR316: 19, AR089: 18, AR313: 16, AR060: 12, AR104: 11, AR039: 11, AR282: 10, AR299: 9, AR240: 9, AR264: 9, |
| | | | | AR055: 8, AR252: 7, AR185: 7, AR263: 7, AR300: 7, AR225: 7, AR309: 6, AR162: 6, AR254: 6, AR193: 6, AR161: 6, AR217: 5, AR283: 5, AR163: 5, AR277: 5, |
| | | | | AR308: 5, AR176: 5, AR270: 4, AR269: 4, AR229: 4, AR182: 4, AR228: 4, AR224: 4, AR183: 4, AR275: 4, AR223: 4, AR267: 4, AR237: 4, AR266: 4, AR177: 4, |
| | | | | AR171: 4, AR291: 4, AR165: 4, AR181: 4, AR238: 4, AR178: 4, AR312: 4, AR261: 4, AR247: 4, AR164: 3, AR268: 3, AR173: 3, AR272: 3, AR233: 3, AR216: 3, |
| | | | | AR166: 3, AR231: 3, AR297: 3, AR200: 3, AR293: 3, AR175: 3, AR196: 3, AR226: 3, AR236: 3, AR295: 3, AR246: 3, AR221: 3, AR230: 3, AR296: 3, AR199: 3, |
| | | | | AR290: 3, AR274: 3, AR289: 3, AR214: 3, AR255: 3, AR239: 3, AR311: 3, AR189: 3, AR234: 3, AR285: 3, AR257: 3, AR286: 3, AR288: 3, AR174: 3, AR195: 3, |
| | | | | AR262: 2, AR190: 2, AR179: 2, AR287: 2, AR168: 2, AR191: 2, AR294: 2, AR188: 2, AR172: 2, AR201: 2, AR227: 2, AR170: 2, AR203: 2, AR211: 2, AR061: 2, |
| | | | | AR198: 2, AR258: 2, AR232: 2, AR180: 2, AR256: 1, AR222: 1, AR271: 1, AR260: 1, AR033: 1, H0587: 1, L3816: 1, H0599: 1, H0052: 1, H0264: 1 and L0748: 1. |
| 309 | HTOGR42 | 838160 | 319 | AR282: 8, AR176: 4, AR253: 3, AR222: 3, AR217: 3, AR235: 3, AR291: 2, AR207: 2, AR163: 2, AR192: 2, AR221: 2, AR224: 2, AR168: 2, AR161: 2, AR171: 2, |
| | | | | AR223: 2, AR205: 2, AR181: 2, AR089: 2, AR309: 2, AR165: 2, AR033: 2, AR164: 1, AR178: 1, AR166: 1, AR264: 1, AR172: 1, AR240: 1, AR195: 1, AR272: 1, |
| | | | | AR225: 1, AR252: 1, AR257: 1, AR210: 1, AR201: 1, H0264: 1 |
| | HTOGR42 | 570751 | 506 | |
| 310 | HTOHT18 | 628300 | 320 | AR252: 6, AR245: 5, AR294: 5, AR207: 4, AR269: 4, AR204: 4, AR171: 4, AR234: 4, AR289: 3, AR231: 3, AR296: 3, AR221: 3, AR243: 3, AR214: 3, AR238: 3, |
| | | | | AR182: 3, AR165: 3, AR223: 2, AR201: 2, AR164: 2, AR166: 2, AR217: 2, AR242: 2, AR267: 2, AR181: 2, AR168: 2, AR177: 2, AR240: 2, AR293: 2, AR216: 2, |
| | | | | AR313: 2, AR271: 2, AR264: 2, AR212: 2, AR200: 2, AR060: 2, AR282: 2, AR262: 2, AR233: 2, AR225: 2, AR190: 2, AR260: 2, AR239: 2, AR199: 2, AR300: 2, |
| | | | | AR061: 2, AR309: 2, AR039: 2, AR247: 2, AR203: 2, AR089: 2, AR224: 1, AR222: 1, AR290: 1, AR277: 1, AR257: 1, AR258: 1, AR232: 1, AR316: 1, AR185: 1, |
| | | | | AR308: 1, AR193: 1, AR173: 1, AR196: 1, AR268: 1, AR183: 1, AR311: 1, AR172: 1, AR205: 1, AR219: 1, AR211: 1, L0766: 7, H0616: 4, L0601: 4, L0779: 3, |
| | | | | L0758: 3, L0794: 2, L0747: 2, L0777: 2, H0657: 1, S0358: 1, S0045: 1, S0140: 1, H0370: 1, H0574: 1, H0318: 1, H0597: 1, H0545: 1, H0081: 1, S0050: 1, H0014: 1, |
| | | | | H0290: 1, H0328: 1, H0264: 1, H0494: 1, L0645: 1, L0805: 1, L0652: 1, L0789: 1, L0749: 1 and L0750: 1. |
| 311 | HTOIZ02 | 826312 | 321 | AR192: 8, AR161: 7, AR162: 7, AR163: 7, AR089: 7, AR165: 6, AR166: 6, AR164: 6, AR313: 6, AR180: 6, AR243: 5, AR242: 5, AR207: 5, AR096: 5, AR246: 5, |
| | | | | AR053: 5, AR178: 4, AR275: 4, AR274: 4, AR173: 4, AR264: 4, AR266: 4, AR060: 4, AR039: 4, AR309: 4, AR282: 3, AR213: 3, AR271: 3, AR272: 3, AR193: 3, |
| | | | | AR229: 3, AR212: 3, AR175: 3, AR312: 3, AR104: 3, AR176: 3, AR217: 3, AR228: 3, AR269: 3, AR239: 3, AR270: 3, AR201: 3, AR238: 3, AR182: 3, AR316: 3, |
| | | | | AR277: 3, AR237: 3, AR183: 3, AR230: 3, AR291: 3, AR296: 3, AR231: 3, AR033: 3, AR293: 3, AR240: 3, AR285: 3, AR295: 3, AR185: 2, AR204: 2, AR225: 2, |
| | | | | AR311: 2, AR286: 2, AR297: 2, AR181: 2, AR226: 2, AR227: 2, AR267: 2, AR289: 2, AR300: 2, AR299: 2, AR232: 2, AR268: 2, AR287: 2, AR205: 2, AR218: 2, |
| | | | | AR174: 2, AR234: 2, AR294: 2, AR223: 2, AR179: 2, AR247: 2, AR233: 2, AR290: 2, AR308: 2, AR211: 2, AR283: 2, AR258: 1, AR172: 1, AR260: 1, AR288: 1, |
| | | | | AR197: 1, AR219: 1, AR254: 1, AR257: 1, AR210: 1, AR255: 1, H0264: 3, S0134: 2, H0318: 2, H0271: 2, L0748: 2, L0749: 2, H0556: 1, H0663: 1, H0402: 1, |
| | | | | H0587: 1, H0013: 1, H0234: 1, H0252: 1, H0616: 1, H0561: 1, L0518: 1, L0544: 1, S0126: 1, S3012: 1, H0444: 1, H0445: 1 and L0596: 1. |
| | HTOIZ02 | 847904 | 507 | |
| 312 | HTOJK60 | 545067 | 322 | AR313: 29, AR173: 22, AR165: 22, AR164: 21, AR166: 21, AR161: 20, AR163: 19, AR262: 19, AR264: 19, AR089: 18, AR162: 18, AR218: 18, AR258: 17, |
| | | | | AR240: 16, AR300: 16, AR247: 15, AR175: 15, AR096: 15, AR183: 14, AR299: 14, AR180: 14, AR178: 14, AR229: 14, AR196: 14, AR257: 14, AR174: 13, |
| | | | | AR191: 13, AR236: 12, AR192: 12, AR181: 12, AR242: 12, AR296: 12, AR293: 12, AR207: 12, AR219: 11, AR179: 11, AR260: 11, AR213: 11, AR185: 11, |
| | | | | AR182: 11, AR177: 11, AR234: 11, AR212: 11, AR312: 10, AR316: 10, AR261: 10, AR199: 10, AR297: 10, AR270: 10, AR053: 10, AR233: 10, AR269: 10, |
| | | | | AR200: 10, AR226: 10, AR193: 10, AR238: 10, AR060: 9, AR285: 9, AR230: 9, AR203: 9, AR033: 9, AR263: 9, AR308: 9, AR235: 9, AR255: 9, AR286: 9, |
| | | | | AR294: 9, AR237: 9, AR277: 9, AR287: 8, AR176: 8, AR039: 8, AR274: 8, AR282: 8, AR275: 8, AR204: 8, AR104: 8, AR198: 8, AR195: 8, AR295: 8, AR188: 8, |
| | | | | AR189: 8, AR231: 8, AR228: 8, AR288: 8, AR223: 7, AR171: 7, AR253: 7, AR245: 7, AR168: 7, AR250: 7, AR291: 7, AR309: 7, AR268: 7, AR311: 6, AR210: 6, |
| | | | | AR266: 6, AR239: 6, AR211: 6, AR289: 6, AR224: 6, AR197: 6, AR227: 6, AR256: 5, AR222: 5, AR243: 5, AR214: 5, AR267: 5, AR221: 5, AR055: 5, AR290: 5, |
| | | | | AR217: 5, AR216: 5, AR201: 5, AR271: 5, AR172: 5, AR232: 5, AR254: 5, AR272: 4, AR205: 4, AR190: 4, AR169: 4, AR246: 4, AR215: 4, AR061: 4, AR170: 3, |
| | | | | AR283: 3, AR225: 3, AR252: 2, L0438: 6, H0519: 5, H0156: 4, L0747: 4, L0758: 4, L0763: 3, L0783: 3, L0777: 3, T0002: 2, H0341: 2, H0663: 2, H0402: 2, |
| | | | | S0036: 2, H0551: 2, L0520: 2, L0646: 2, L0775: 2, L0776: 2, L0517: 2, H0547: 2, S0126: 2, L0756: 2, L0779: 2, L0755: 2, L0591: 2, H0713: 1, S0114: 1, S0116: 1, |
| | | | | H0125: 1, S0358: 1, S0360: 1, S0476: 1, S6026: 1, H0549: 1, S0222: 1, H0599: 1, S0346: 1, H0421: 1, H0544: 1, H0050: 1, H0510: 1, S6028: 1, S0022: 1, H0328: 1, |
| | | | | H0039: 1, L0055: 1, L0455: 1, H0124: 1, H0040: 1, H0634: 1, H0264: 1, T0042: 1, H0494: 1, H0560: 1, L0768: 1, L0364: 1, L0794: 1, L0766: 1, L0774: 1, L0657: 1, |
| | | | | L0659: 1, L0666: 1, L0665: 1, S0052: 1, H0144: 1, H0709: 1, H0521: 1, S0013: 1, H0436: 1, L0740: 1, L0754: 1, L0749: 1, L0750: 1, L0752: 1, H0707: 1, S0434: 1, |
| | | | | H0667: 1, H0423: 1, S0412: 1 and S0456: 1. |
| 313 | HTPCS72 | 854941 | 323 | AR219: 14, AR218: 13, AR104: 11, AR240: 9, AR060: 8, AR055: 7, AR299: 7, AR096: 7, AR316: 7, AR185: 6, AR313: 6, AR089: 6, AR300: 6, AR039: 5, |
| | | | | AR283: 4, AR282: 4, AR277: 2, L0438: 6, L0439: 5, H0661: 3, L0776: 3, H0556: 2, H0100: 2, L0598: 2, L0764: 2, L0766: 2, H0672: 2, L0777: 2, L0731: 2, |
| | | | | H0170: 1, H0171: 1, H0265: 1, H0140: 1, S0114: 1, H0657: 1, H0656: 1, H0638: 1, S0418: 1, S0408: 1, H0730: 1, H0741: 1, S0046: 1, H0411: 1, S0278: 1, |
| | | | | H0550: 1, S0222: 1, T0104: 1, H0600: 1, S0280: 1, S0474: 1, H0007: 1, T0110: 1, H0046: 1, H0457: 1, H0150: 1, H0566: 1, H0620: 1, H0057: 1, H0039: 1, |
| | | | | H0030: 1, L0055: 1, H0090: 1, H0413: 1, H0623: 1, H0059: 1, H0647: 1, H0529: 1, L0770: 1, L0646: 1, L0645: 1, L0521: 1, L0794: 1, L0650: 1, L0659: 1, L5623: 1, |
| | | | | L0789: 1, L0666: 1, L0663: 1, L0664: 1, H0144: 1, H0547: 1, S0152: 1, L0740: 1, L0747: 1, L0750: 1, L0756: 1, L0779: 1, L0757: 1, L0758: 1, L0595: 1 and |
| | | | | H0422: 1. |
| | HTPCS72 | 566683 | 508 | |
| 314 | HTPIH83 | 919916 | 324 | AR176: 5, AR180: 5, AR266: 5, AR182: 5, AR223: 4, AR267: 4, AR183: 4, AR233: 4, AR269: 4, AR181: 4, AR228: 4, AR236: 4, AR245: 4, AR224: 4, AR169: 3, |
| | | | | AR225: 3, AR238: 3, AR231: 3, AR168: 3, AR257: 3, AR229: 3, AR161: 3, AR162: 3, AR177: 3, AR293: 3, AR237: 3, AR221: 3, AR289: 3, AR163: 3, AR268: 3, |
| | | | | AR239: 3, AR215: 3, AR261: 3, AR288: 3, AR170: 3, AR175: 3, AR226: 3, AR174: 3, AR199: 3, AR290: 3, AR179: 2, AR191: 2, AR255: 2, AR264: 2, AR234: 2, |
| | | | | AR061: 2, AR217: 2, AR240: 2, AR282: 2, AR216: 2, AR294: 2, AR060: 2, AR196: 2, AR287: 2, AR172: 2, AR173: 2, AR178: 2, AR285: 2, AR295: 2, AR200: 2, |
| | | | | AR291: 2, AR222: 2, AR190: 2, AR247: 2, AR189: 2, AR309: 2, AR203: 2, AR188: 2, AR300: 2, AR230: 2, AR311: 2, AR296: 2, AR262: 2, AR171: 2, AR275: 2, |
| | | | | AR235: 1, AR232: 1, AR227: 1, AR258: 1, AR286: 1, AR033: 1, AR297: 1, AR039: 1, AR256: 1, AR316: 1, AR313: 1, AR089: 1, AR185: 1, AR277: 1, H0622: 7, |
| | | | | S0360: 3, L0809: 3, L0804: 2, L0774: 2, L0775: 2, L0748: 2, H0484: 1, H0014: 1, S0440: 1, L0646: 1, L0643: 1, L0374: 1, L0764: 1, L0771: 1, L0773: 1, L0662: 1, |
| | | | | L0803: 1 and L0788: 1. |
| | HTPIH83 | 895024 | 509 | |
| | HTPIH83 | 898088 | 510 | |
| 315 | HTSEW17 | 460579 | 325 | AR170: 7, AR161: 7, AR162: 7, AR163: 7, AR182: 7, AR225: 6, AR176: 6, AR282: 5, AR228: 5, AR223: 5, AR266: 5, AR180: 5, AR224: 5, AR178: 5, AR269: 5, |
| | | | | AR181: 5, AR261: 5, AR309: 5, AR233: 5, AR250: 5, AR191: 5, AR216: 4, AR257: 4, AR231: 4, AR267: 4, AR236: 4, AR268: 4, AR274: 4, AR229: 4, AR270: 4, |
| | | | | AR214: 4, AR179: 4, AR239: 4, AR165: 4, AR288: 4, AR247: 4, AR263: 4, AR089: 4, AR255: 4, AR237: 4, AR061: 4, AR164: 4, AR287: 3, AR275: 3, AR240: 3, |
| | | | | AR177: 3, AR096: 3, AR264: 3, AR174: 3, AR166: 3, AR183: 3, AR234: 3, AR293: 3, AR291: 3, AR295: 3, AR173: 3, AR300: 3, AR168: 3, AR200: 3, AR299: 3, |
| | | | | AR190: 3, AR221: 3, AR196: 3, AR296: 3, AR290: 3, AR316: 3, AR294: 3, AR262: 3, AR175: 3, AR297: 3, AR185: 3, AR238: 3, AR313: 3, AR060: 3, AR230: 3, |
| | | | | AR055: 3, AR039: 3, AR283: 3, AR286: 3, AR227: 3, AR260: 2, AR172: 2, AR285: 2, AR053: 2, AR308: 2, AR217: 2, AR311: 2, AR188: 2, AR277: 2, AR203: 2, |
| | | | | AR226: 2, AR272: 2, AR232: 2, AR192: 2, AR222: 2, AR189: 2, AR201: 2, AR213: 2, AR312: 2, AR258: 2, AR193: 2, AR289: 2, AR171: 2, AR199: 2, AR256: 1, |
| | | | | AR219: 1, AR212: 1, AR215: 1, AR211: 1, AR033: 1, AR218: 1, H0087: 1, S0002: 1, L0769: 1, L0789: 1, H0683: 1, H0670: 1, L0748: 1, L0749: 1, L0752: 1 and |
| | | | | L0758: 1. |
| 316 | HTTBI76 | 637725 | 326 | AR252: 4, AR214: 4, AR309: 3, AR169: 3, AR297: 3, AR193: 3, AR250: 3, AR271: 3, AR291: 3, AR161: 3, AR272: 2, AR033: 2, AR294: 2, AR217: 2, AR221: 2, |
| | | | | AR223: 2, AR312: 2, AR168: 2, AR163: 2, AR261: 2, AR181: 2, AR210: 1, AR197: 1, AR225: 1, AR205: 1, AR267: 1, AR270: 1, AR165: 1, AR222: 1, AR216: 1, |
| | | | | AR170: 1, AR295: 1, AR166: 1, AR213: 1, L0803: 4, L0731: 4, L0774: 3, S0380: 3, S0028: 3, L0758: 3, H0486: 2, S0003: 2, H0040: 2, S0344: 2, L0766: 2, |
| | | | | L0775: 2, H0547: 2, L0748: 2, L0756: 2, L0777: 2, L0780: 2, L0753: 2, S0011: 2, H0716: 1, H0638: 1, L0617: 1, S0358: 1, H0411: 1, S0280: 1, H0318: 1, H0355: 1, |
| | | | | H0674: 1, H0212: 1, H0135: 1, H0038: 1, H0132: 1, S0142: 1, S0002: 1, H0529: 1, L0804: 1, L0632: 1, L0666: 1, H0682: 1, H0684: 1, H0525: 1, S0044: 1, S0406: 1, |
| | | | | H0555: 1, L0747: 1, L0750: 1, L0752: 1, L0755: 1, L0604: 1 and S0026: 1. |
| 317 | HTTBS64 | 1008159 | 327 | AR282: 4, AR252: 4, AR269: 3, AR171: 3, AR170: 3, AR264: 2, AR176: 2, AR291: 2, AR311: 2, AR225: 2, AR277: 2, AR168: 2, AR270: 2, AR172: 2, AR262: 1, |
| | | | | AR271: 1, AR055: 1, AR272: 1, AR299: 1, AR257: 1, AR313: 1, H0040: 1 |
| | HTTBS64 | 863187 | 511 | |
| | HTTBS64 | 754125 | 512 | |
| 318 | HTWDF76 | 714344 | 328 | AR214: 37, AR169: 30, AR222: 28, AR207: 27, AR223: 27, AR224: 26, AR263: 25, AR235: 25, AR217: 24, AR171: 22, AR168: 22, AR172: 22, AR170: 21, |
| | | | | AR215: 21, AR225: 20, AR311: 19, AR309: 19, AR195: 19, AR216: 18, AR164: 18, AR162: 18, AR161: 17, AR192: 17, AR165: 17, AR213: 17, AR166: 17, |
| | | | | AR198: 17, AR295: 16, AR308: 16, AR163: 16, AR053: 16, AR245: 16, AR089: 15, AR221: 15, AR261: 15, AR264: 15, AR177: 14, AR196: 14, AR240: 14, |
| | | | | AR236: 14, AR210: 14, AR212: 14, AR288: 13, AR312: 13, AR271: 12, AR197: 12, AR282: 12, AR277: 12, AR316: 12, AR252: 12, AR211: 11, AR033: 11, |
| | | | | AR181: 11, AR246: 11, AR299: 11, AR285: 11, AR174: 10, AR242: 10, AR060: 10, AR286: 10, AR193: 10, AR275: 10, AR238: 10, AR229: 10, AR313: 10, |
| | | | | AR201: 10, AR055: 9, AR291: 9, AR188: 9, AR232: 9, AR218: 9, AR205: 9, AR185: 9, AR096: 9, AR289: 9, AR300: 9, AR104: 9, AR239: 9, AR274: 9, AR199: 8, |
| | | | | AR253: 8, AR297: 8, AR296: 8, AR287: 8, AR283: 8, AR258: 8, AR200: 8, AR039: 8, AR175: 8, AR293: 8, AR204: 8, AR219: 8, AR191: 7, AR247: 7, AR234: 7, |
| | | | | AR176: 7, AR254: 7, AR227: 7, AR173: 7, AR237: 7, AR262: 7, AR189: 7, AR230: 7, AR256: 7, AR231: 7, AR272: 7, AR226: 7, AR266: 7, AR250: 6, AR294: 6, |
| | | | | AR257: 6, AR183: 6, AR270: 6, AR255: 6, AR203: 6, AR268: 6, AR269: 6, AR290: 6, AR260: 6, AR180: 6, AR243: 5, AR178: 5, AR233: 5, AR190: 5, AR061: 5, |
| | | | | AR179: 5, AR182: 4, AR228: 4, AR267: 4, H0436: 1 |
| 319 | HTXCV12 | 1352213 | 329 | AR282: 6, AR162: 4, AR161: 4, AR163: 4, AR053: 4, AR176: 4, AR264: 3, AR217: 3, AR214: 3, AR250: 3, AR168: 3, AR182: 3, AR172: 3, AR266: 3, AR274: 3, |
| | | | | AR269: 3, AR270: 3, AR225: 3, AR165: 3, AR213: 3, AR235: 3, AR178: 3, AR164: 3, AR257: 3, AR309: 3, AR166: 3, AR228: 3, AR267: 3, AR216: 3, AR268: 3, |
| | | | | AR221: 2, AR175: 2, AR294: 2, AR210: 2, AR240: 2, AR179: 2, AR089: 2, AR177: 2, AR290: 2, AR171: 2, AR291: 2, AR262: 2, AR255: 2, AR247: 2, AR288: 2, |
| | | | | AR233: 2, AR237: 2, AR283: 2, AR263: 2, AR239: 2, AR238: 2, AR316: 2, AR191: 2, AR275: 2, AR236: 2, AR193: 2, AR229: 2, AR185: 2, AR060: 2, AR296: 2, |
| | | | | AR183: 2, AR261: 2, AR200: 2, AR277: 2, AR234: 2, AR055: 2, AR226: 2, AR188: 2, AR313: 2, AR174: 2, AR222: 2, AR170: 2, AR272: 2, AR196: 2, AR096: 2, |
| | | | | AR295: 2, AR289: 2, AR293: 2, AR231: 1, AR181: 1, AR311: 1, AR299: 1, AR227: 1, AR300: 1, AR312: 1, AR173: 1, AR061: 1, AR203: 1, AR195: 1, AR201: 1, |
| | | | | AR260: 1, AR286: 1, AR287: 1, AR224: 1, L0766: 16, L0743: 11, H0692: 8, L0769: 7, L0518: 6, L0748: 6, L0771: 4, L0745: 4, L0779: 4, H0265: 3, S0358: 3, |
| | | | | H0494: 3, L0755: 3, H0550: 2, H0486: 2, H0581: 2, H0135: 2, L0761: 2, L0804: 2, L0774: 2, L0438: 2, L0777: 2, H0685: 1, S0114: 1, H0583: 1, L3814: 1, S0116: 1, |
| | | | | S0212: 1, H0254: 1, S0408: 1, S0476: 1, T0104: 1, H0586: 1, H0587: 1, H0331: 1, T0109: 1, H0599: 1, L0738: 1, H0150: 1, H0012: 1, H0264: 1, S0438: 1, L0770: 1, |
| | | | | L0374: 1, L0764: 1, L0768: 1, L0803: 1, L0653: 1, L0776: 1, L0778: 1, L0792: 1, L0663: 1, S0428: 1, S0053: 1, S0216: 1, H0783: 1, L3811: 1, S0152: 1, H0522: 1, |
| | | | | H0555: 1, S0432: 1, L0744: 1, L0751: 1, L0749: 1, L0756: 1, L0758: 1, S0436: 1, L0601: 1, H0543: 1, H0423: 1, S0424: 1 and H0506: 1. |
| | HTXCV12 | 567006 | 513 | |
| 320 | HTXFL30 | 620001 | 330 | AR271: 4, AR171: 4, AR221: 3, AR181: 3, AR180: 3, AR269: 3, AR243: 3, AR253: 3, AR223: 3, AR224: 3, AR162: 2, AR163: 2, AR245: 2, AR161: 2, AR178: 2, |
| | | | | AR168: 2, AR215: 2, AR246: 2, AR291: 2, AR192: 2, AR193: 1, AR257: 1, AR295: 1, AR263: 1, AR216: 1, AR272: 1, AR293: 1, AR175: 1, AR290: 1, AR236: 1, |
| | | | | AR312: 1, AR225: 1, AR173: 1, AR172: 1, AR267: 1, AR300: 1, H0038: 2, H0265: 1, H0556: 1, S0134: 1, S0222: 1, L0455: 1, L0792: 1, S0152: 1, S0028: 1 and |
| | | | | L0591: 1. |
| 321 | HTXJM03 | 603918 | 331 | AR313: 13, AR252: 10, AR282: 8, AR312: 7, AR176: 7, AR096: 7, AR269: 6, AR254: 6, AR201: 6, AR196: 6, AR245: 6, AR250: 6, AR270: 6, AR197: 6, |
| | | | | AR053: 6, AR161: 6, AR162: 6, AR180: 6, AR089: 6, AR163: 6, AR169: 6, AR191: 5, AR170: 5, AR240: 5, AR165: 5, AR178: 5, AR183: 5, AR290: 5, AR164: 5, |
| | | | | AR166: 5, AR300: 5, AR257: 5, AR039: 5, AR264: 5, AR229: 5, AR203: 5, AR266: 5, AR268: 5, AR267: 5, AR255: 5, AR181: 5, AR236: 5, AR297: 5, AR233: 4, |
| | | | | AR296: 4, AR309: 4, AR182: 4, AR193: 4, AR228: 4, AR179: 4, AR175: 4, AR188: 4, AR247: 4, AR316: 4, AR173: 4, AR177: 4, AR293: 4, AR271: 4, AR231: 4, |
| | | | | AR213: 4, AR060: 4, AR225: 4, AR308: 4, AR212: 4, AR243: 4, AR285: 4, AR200: 4, AR199: 4, AR192: 4, AR287: 4, AR189: 4, AR294: 4, AR286: 4, AR238: 4, |
| | | | | AR299: 3, AR291: 3, AR295: 3, AR239: 3, AR261: 3, AR237: 3, AR263: 3, AR198: 3, AR283: 3, AR172: 3, AR185: 3, AR216: 3, AR204: 3, AR288: 3, AR311: 3, |
| | | | | AR234: 3, AR205: 3, AR262: 3, AR258: 3, AR289: 3, AR055: 3, AR277: 3, AR224: 3, AR207: 3, AR230: 3, AR168: 3, AR226: 3, AR223: 3, AR061: 3, AR190: 2, |
| | | | | AR174: 2, AR218: 2, AR227: 2, AR195: 2, AR256: 2, AR274: 2, AR260: 2, AR217: 2, AR235: 2, AR033: 2, AR246: 2, AR275: 2, AR171: 2, AR219: 2, AR104: 2, |
| | | | | AR232: 1, AR253: 1, AR211: 1, AR210: 1, AR242: 1, L0766: 5, H0313: 3, H0624: 1, H0265: 1, H0556: 1, S0116: 1, H0329: 1, H0486: 1, H0156: 1, H0590: 1, |
| | | | | H0009: 1, S0250: 1, H0169: 1, S0450: 1, S0002: 1, L0769: 1, L0793: 1, L0532: 1, L0750: 1, L0777: 1 and S0424: 1. |
| 322 | HTXON32 | 838288 | 332 | AR195: 107, AR197: 91, AR172: 81, AR246: 78, AR295: 74, AR272: 72, AR258: 71, AR196: 67, AR224: 67, AR235: 67, AR171: 66, AR193: 66, AR291: 63, |
| | | | | AR297: 59, AR223: 58, AR168: 57, AR200: 56, AR263: 55, AR222: 54, AR170: 53, AR261: 53, AR245: 52, AR236: 52, AR169: 52, AR311: 49, AR256: 49, |
| | | | | AR225: 49, AR188: 48, AR173: 48, AR285: 48, AR288: 47, AR221: 46, AR260: 46, AR198: 46, AR313: 46, AR174: 45, AR201: 45, AR271: 45, AR191: 44, |
| | | | | AR175: 44, AR217: 44, AR286: 44, AR287: 43, AR309: 43, AR270: 43, AR264: 42, AR211: 42, AR274: 42, AR308: 41, AR199: 41, AR181: 40, AR294: 40, |
| | | | | AR214: 39, AR262: 39, AR216: 39, AR243: 39, AR189: 39, AR275: 38, AR177: 38, AR215: 38, AR033: 38, AR255: 37, AR296: 37, AR210: 36, AR190: 36, |
| | | | | AR257: 36, AR289: 35, AR213: 35, AR282: 34, AR240: 34, AR218: 34, AR163: 32, AR247: 32, AR176: 31, AR180: 30, AR312: 30, AR254: 30, AR212: 30, |
| | | | | AR166: 29, AR300: 29, AR162: 29, AR293: 29, AR203: 29, AR183: 29, AR219: 28, AR161: 28, AR192: 28, AR242: 28, AR165: 27, AR250: 27, AR269: 27, |
| | | | | AR185: 27, AR164: 26, AR039: 25, AR104: 25, AR266: 24, AR290: 24, AR316: 24, AR179: 23, AR182: 23, AR178: 23, AR096: 22, AR238: 21, AR053: 21, |
| | | | | AR205: 20, AR268: 20, AR089: 20, AR207: 19, AR267: 19, AR299: 19, AR204: 19, AR229: 18, AR234: 18, AR226: 17, AR277: 17, AR231: 17, AR253: 16, |
| | | | | AR237: 15, AR232: 14, AR230: 14, AR233: 14, AR060: 13, AR283: 11, AR239: 10, AR055: 9, AR061: 9, AR228: 9, AR252: 8, AR227: 6, H0556: 1 |
| 323 | HUFBY15 | 1352349 | 333 | AR310: 36, AR309: 31, AR312: 30, AR052: 28, AR265: 24, AR213: 15, AR273: 14, AR249: 13, AR263: 12, AR313: 12, AR251: 12, AR248: 12, AR274: 10, |
| | | | | AR053: 10, AR315: 10, AR253: 9, AR280: 8, AR314: 8, AR219: 7, AR096: 6, AR218: 6, AR089: 6, AR299: 6, AR316: 5, AR192: 5, AR271: 5, AR186: 4, |
| | | | | AR039: 4, AR282: 4, AR206: 4, AR244: 3, AR300: 3, AR185: 3, AR247: 3, AR252: 3, AR198: 3, AR060: 3, AR205: 3, AR202: 3, AR281: 2, AR275: 2, AR246: 2, |
| | | | | AR055: 2, AR104: 2, AR183: 2, AR225: 2, AR180: 2, AR240: 2, AR215: 2, AR199: 2, AR264: 2, AR277: 2, AR243: 2, AR033: 2, AR176: 2, AR061: 1, AR161: 1, |
| | | | | AR272: 1, AR214: 1, AR193: 1, AR169: 1, AR175: 1, AR261: 1, AR283: 1, AR178: 1, AR297: 1, L0794: 5, H0036: 3, S0360: 2, S0442: 1, S0476: 1, H0014: 1, |
| | | | | S0314: 1, L0772: 1, L0646: 1, L0764: 1, L0803: 1 and H0689: 1. |
| | HUFBY15 | 846380 | 514 | |
| 324 | HUFCJ30 | 638402 | 334 | AR277: 9, AR207: 8, AR215: 7, AR192: 7, AR170: 6, AR223: 6, AR282: 6, AR235: 6, AR216: 6, AR225: 6, AR165: 6, AR169: 6, AR171: 6, AR164: 5, AR245: 5, |
| | | | | AR168: 5, AR166: 5, AR198: 5, AR222: 5, AR089: 5, AR242: 5, AR183: 5, AR195: 5, AR221: 5, AR193: 4, AR224: 4, AR214: 4, AR313: 4, AR252: 4, AR172: 4, |
| | | | | AR243: 4, AR236: 4, AR201: 4, AR299: 4, AR295: 4, AR246: 4, AR238: 4, AR264: 4, AR176: 4, AR161: 4, AR240: 4, AR162: 4, AR309: 4, AR204: 4, AR263: 4, |
| | | | | AR163: 4, AR261: 4, AR217: 4, AR297: 4, AR316: 3, AR285: 3, AR182: 3, AR269: 3, AR270: 3, AR205: 3, AR308: 3, AR197: 3, AR060: 3, AR311: 3, AR230: 3, |
| | | | | AR055: 3, AR173: 3, AR196: 3, AR250: 3, AR288: 3, AR272: 3, AR213: 3, AR234: 3, AR181: 3, AR312: 3, AR283: 3, AR199: 3, AR180: 3, AR033: 3, AR266: 3, |
| | | | | AR175: 3, AR254: 3, AR177: 3, AR262: 3, AR296: 3, AR300: 3, AR268: 3, AR290: 3, AR231: 3, AR287: 3, AR247: 3, AR294: 3, AR191: 3, AR275: 3, AR291: 2, |
| | | | | AR237: 2, AR228: 2, AR179: 2, AR174: 2, AR096: 2, AR289: 2, AR178: 2, AR233: 2, AR229: 2, AR286: 2, AR255: 2, AR226: 2, AR185: 2, AR293: 2, AR200: 2, |
| | | | | AR188: 2, AR189: 2, AR227: 2, AR257: 2, AR212: 2, AR203: 2, AR239: 2, AR104: 2, AR053: 2, AR061: 2, AR258: 2, AR039: 2, AR232: 2, AR271: 2, AR218: 2, |
| | | | | AR219: 2, AR260: 2, AR190: 2, AR267: 2, AR210: 1, L0777: 7, L0751: 3, L0766: 2, L0438: 2, L0779: 2, H0352: 2, H0351: 1, S0222: 1, H0333: 1, H0687: 1, |
| | | | | H0646: 1, L0770: 1, L0642: 1, L0662: 1, L0803: 1, L0375: 1, L0805: 1, L0653: 1, L0659: 1, L0790: 1, L0663: 1, L0664: 1, L0665: 1 and H0506: 1. |
| 325 | HUKAH51 | 1352424 | 335 | AR039: 323, AR104: 317, AR055: 287, AR060: 230, AR185: 220, AR089: 214, AR300: 199, AR282: 174, AR240: 174, AR316: 160, AR096: 135, AR277: 128, |
| | | | | AR299: 121, AR283: 108, AR219: 95, AR218: 82, AR313: 81, S0410: 26, L0777: 13, S0444: 6, L0439: 5, L0731: 5, S0358: 4, S0440: 4, L0766: 4, L0748: 4, |
| | | | | L0758: 4, H0661: 3, S0442: 3, S0408: 3, H0393: 3, H0574: 3, H0038: 3, H0616: 3, S0438: 3, H0509: 3, L0794: 3, L0438: 3, S0406: 3, L0779: 3, S0360: 2, H0050: 2, |
| | | | | H0510: 2, H0266: 2, S0003: 2, H0032: 2, H0040: 2, H0634: 2, L0764: 2, L0655: 2, S0374: 2, L0588: 2, H0624: 1, H0171: 1, S6024: 1, S0134: 1, S0001: 1, H0742: 1, |
| | | | | H0730: 1, H0722: 1, H0411: 1, H0331: 1, H0485: 1, H0486: 1, H0575: 1, H0202: 1, T0115: 1, H0150: 1, H0014: 1, H0083: 1, S0214: 1, H0615: 1, H0169: 1, |
| | | | | H0124: 1, H0598: 1, H0059: 1, H0646: 1, H0529: 1, L0772: 1, L0648: 1, L0649: 1, L0803: 1, L0774: 1, L0805: 1, L0809: 1, L0791: 1, S0052: 1, H0144: 1, H0659: 1, |
| | | | | S0328: 1, S0330: 1, S0146: 1, H0478: 1, S0026: 1 and H0423: 1. |
| | HUKAH51 | 1300737 | 515 | |
| | HUKAH51 | 603538 | 516 | |
| 326 | HUSXS50 | 1352367 | 336 | AR253: 15, AR270: 12, AR184: 11, AR268: 11, AR263: 11, AR226: 11, AR182: 10, AR096: 10, AR060: 10, AR248: 10, AR219: 9, AR269: 9, AR313: 8, |
| | | | | AR238: 8, AR290: 8, AR284: 8, AR218: 8, AR240: 8, AR232: 8, AR296: 7, AR104: 7, AR265: 7, AR285: 7, AR299: 7, AR251: 7, AR298: 7, AR249: 7, AR316: 7, |
| | | | | AR039: 7, AR231: 6, AR237: 6, AR267: 6, AR286: 6, AR234: 6, AR033: 6, AR179: 6, AR292: 6, AR247: 6, AR089: 6, AR233: 5, AR229: 5, AR294: 5, AR227: 5, |
| | | | | AR185: 5, AR183: 5, AR291: 5, AR300: 5, AR295: 5, AR280: 5, AR289: 4, AR266: 4, AR175: 4, AR282: 4, AR310: 4, AR177: 4, AR293: 4, AR055: 4, AR315: 4, |
| | | | | AR241: 3, AR309: 3, AR314: 3, AR312: 3, AR053: 3, AR061: 3, AR277: 3, AR186: 3, AR213: 2, AR052: 2, AR274: 2, AR258: 1, AR259: 1, AR283: 1, L0748: 36, |
| | | | | L0747: 14, L0731: 10, L0439: 8, S0116: 7, H0031: 7, L0766: 7, H0521: 7, H0305: 6, H0616: 6, L0659: 6, L0759: 6, L0591: 6, H0265: 5, H0556: 5, S0474: 5, |
| | | | | H0038: 5, L0740: 5, L0750: 5, H0657: 4, H0581: 4, H0050: 4, H0641: 4, L0770: 4, L0776: 4, L0665: 4, H0144: 4, H0547: 4, H0436: 4, L0754: 4, L0752: 4, |
| | | | | H0543: 4, H0013: 3, H0251: 3, H0199: 3, H0040: 3, H0634: 3, H0551: 3, H0623: 3, S0344: 3, S0210: 3, L0662: 3, L0774: 3, L0666: 3, L0663: 3, L0438: 3, S0031: 3, |
| | | | | H0542: 3, H0422: 3, S0040: 2, H0656: 2, H0580: 2, S0476: 2, H0550: 2, H0592: 2, H0618: 2, H0318: 2, H0421: 2, H0024: 2, H0510: 2, H0328: 2, H0622: 2, |
| | | | | H0644: 2, S0036: 2, H0163: 2, H0591: 2, H0059: 2, T0041: 2, H0560: 2, S0440: 2, S0002: 2, L0369: 2, L0638: 2, L0761: 2, L0764: 2, L0649: 2, L0803: 2, L0805: 2, |
| | | | | H0539: 2, L0745: 2, L0749: 2, L0756: 2, S0436: 2, L0588: 2, L0604: 2, L0362: 2, L0361: 2, H0136: 2, L0615: 1, H0686: 1, H0255: 1, H0664: 1, H0589: 1, H0638: 1, |
| | | | | S0420: 1, S0356: 1, S0376: 1, H0722: 1, S0468: 1, S0045: 1, H0393: 1, H0640: 1, S0300: 1, L3388: 1, H0351: 1, S0278: 1, H0549: 1, H0431: 1, H0392: 1, H0409: 1, |
| | | | | H0642: 1, H0574: 1, H0559: 1, T0039: 1, L3655: 1, T0109: 1, H0069: 1, H0635: 1, H0253: 1, S0010: 1, S0346: 1, L0040: 1, H0123: 1, L0471: 1, H0047: 1, H0197: 1, |
| | | | | T0003: 1, H0015: 1, S0051: 1, H0267: 1, H0179: 1, H0687: 1, H0290: 1, S0250: 1, H0039: 1, T0006: 1, H0674: 1, L0456: 1, H0068: 1, H0376: 1, H0063: 1, |
| | | | | T0067: 1, H0264: 1, H0413: 1, L0564: 1, S0438: 1, S0144: 1, H0529: 1, L0769: 1, L0646: 1, L0800: 1, L0767: 1, L0768: 1, L0794: 1, L0650: 1, L0806: 1, L0606: 1, |
| | | | | L0661: 1, L0540: 1, L0542: 1, L0382: 1, L0809: 1, L5622: 1, L0788: 1, L0664: 1, H0703: 1, S0374: 1, L3811: 1, S0126: 1, H0659: 1, H0658: 1, H0670: 1, H0660: 1, |
| | | | | H0672: 1, S0328: 1, H0522: 1, S3014: 1, S0206: 1, S0032: 1, L0741: 1, L0779: 1, L0777: 1, L0753: 1, L0757: 1, L0758: 1, H0445: 1, S0434: 1, L0599: 1, S0011: 1, |
| | | | | S0026: 1, H0665: 1, H0667: 1, H0423: 1 and H0721: 1. |
| | HUSXS50 | 883176 | 517 | |
| | HUSXS50 | 655372 | 518 | |
| 327 | HUVEB53 | 571200 | 337 | AR053: 3, AR171: 3, AR224: 3, AR180: 2, AR168: 2, AR207: 2, AR165: 2, AR282: 2, AR217: 2, AR299: 2, AR234: 1, AR277: 1, AR296: 1, AR295: 1, AR164: 1, |
| | | | | AR261: 1, AR166: 1, AR204: 1, AR225: 1, AR257: 1, AR283: 1, AR269: 1, AR183: 1, H0171: 3, L0754: 3, H0431: 2, H0196: 2, H0546: 2, H0623: 2, H0539: 2, |
| | | | | H0696: 2, L0744: 2, L0748: 2, L0749: 2, L0758: 2, L0759: 2, S0398: 2, H0624: 1, T0002: 1, S0040: 1, H0341: 1, S0360: 1, H0580: 1, H0587: 1, H0574: 1, H0486: 1, |
| | | | | H0036: 1, S0665: 1, H0123: 1, H0014: 1, S6028: 1, S0214: 1, H0553: 1, H0032: 1, L0455: 1, H0598: 1, H0038: 1, H0616: 1, H0056: 1, S0386: 1, S0112: 1, T0042: 1, |
| | | | | S0344: 1, S0422: 1, S0002: 1, L0775: 1, L0806: 1, L0805: 1, L0776: 1, S0152: 1, H0704: 1, H0555: 1, H0436: 1, L0439: 1, L0751: 1, L0752: 1, L0731: 1, L0588: 1, |
| | | | | L0592: 1, S0026: 1, H0543: 1 and H0423: 1. |
| 328 | HWAAD63 | 838626 | 338 | AR196: 17, AR173: 14, AR161: 14, AR162: 14, AR241: 14, AR163: 14, AR165: 13, AR313: 12, AR166: 12, AR164: 12, AR262: 12, AR264: 11, AR236: 11, |
| | | | | AR199: 10, AR191: 10, AR174: 9, AR178: 9, AR257: 9, AR235: 9, AR180: 9, AR263: 8, AR203: 8, AR181: 8, AR200: 8, AR229: 8, AR274: 7, AR189: 7, |
| | | | | AR275: 7, AR311: 7, AR240: 7, AR247: 7, AR297: 7, AR312: 7, AR175: 7, AR308: 7, AR212: 7, AR261: 7, AR169: 7, AR265: 7, AR188: 7, AR234: 6, AR177: 6, |
| | | | | AR221: 6, AR194: 6, AR287: 6, AR242: 6, AR258: 6, AR207: 6, AR230: 6, AR255: 6, AR176: 6, AR293: 6, AR168: 6, AR271: 6, AR224: 6, AR179: 6, AR270: 6, |
| | | | | AR185: 6, AR192: 6, AR233: 5, AR198: 5, AR300: 5, AR096: 5, AR214: 5, AR216: 5, AR183: 5, AR238: 5, AR272: 5, AR269: 5, AR039: 5, AR226: 5, AR223: 5, |
| | | | | AR299: 5, AR296: 5, AR215: 5, AR285: 5, AR260: 5, AR089: 5, AR288: 5, AR182: 4, AR204: 4, AR239: 4, AR228: 4, AR222: 4, AR213: 4, AR309: 4, AR231: 4, |
| | | | | AR060: 4, AR033: 4, AR210: 4, AR252: 4, AR273: 4, AR286: 4, AR053: 4, AR268: 4, AR294: 4, AR237: 4, AR193: 4, AR172: 4, AR243: 4, AR218: 4, AR267: 4, |
| | | | | AR277: 4, AR310: 4, AR104: 3, AR295: 3, AR291: 3, AR190: 3, AR225: 3, AR282: 3, AR316: 3, AR227: 3, AR290: 3, AR171: 3, AR217: 3, AR186: 3, AR211: 3, |
| | | | | AR266: 3, AR195: 3, AR219: 3, AR249: 3, AR292: 3, AR052: 3, AR201: 3, AR206: 2, AR245: 2, AR314: 2, AR232: 2, AR202: 2, AR298: 2, AR289: 2, AR315: 2, |
| | | | | AR256: 2, AR244: 2, AR259: 2, AR205: 2, AR246: 2, AR061: 1, AR184: 1, AR284: 1, AR280: 1, AR283: 1, AR055: 1, H0441: 1, H0581: 1 and H0604: 1. |
| | HWAAD63 | 833089 | 519 | |
| | HWAAD63 | 793875 | 520 | |
| 329 | HWABY10 | 768334 | 339 | AR218: 148, AR313: 134, AR219: 132, AR240: 123, AR316: 100, AR096: 88, AR089: 84, AR282: 67, AR277: 66, AR283: 61, AR300: 59, AR060: 58, |
| | | | | AR299: 57, AR039: 54, AR185: 47, AR104: 32, AR055: 30, H0521: 8, L0756: 6, L0455: 5, L0770: 5, L0752: 5, L0757: 5, H0581: 4, H0457: 4, L0769: 4, L0655: 4, |
| | | | | L0731: 4, H0686: 3, S0442: 3, L0659: 3, L0666: 3, H0658: 3, L0439: 3, L0747: 3, L0749: 3, H0445: 3, S0436: 3, L0588: 3, H0542: 3, H0584: 2, H0716: 2, H0580: 2, |
| | | | | H0251: 2, H0546: 2, H0413: 2, L3904: 2, L5565: 2, L0761: 2, L0772: 2, L0794: 2, L0652: 2, L0776: 2, L0657: 2, L5622: 2, L0663: 2, L0438: 2, H0689: 2, L0745: 2, |
| | | | | L0590: 2, L0581: 2, L0599: 2, H0265: 1, H0167: 1, S0114: 1, H0656: 1, S0212: 1, H0661: 1, H0306: 1, L0562: 1, S0356: 1, S0354: 1, S0360: 1, H0728: 1, S0045: 1, |
| | | | | S0046: 1, H0749: 1, S0476: 1, H0393: 1, H0462: 1, H0392: 1, H0592: 1, H0486: 1, H0013: 1, T0082: 1, H0618: 1, T0048: 1, H0318: 1, H0421: 1, H0052: 1, |
| | | | | H0544: 1, H0545: 1, H0150: 1, T0010: 1, S6028: 1, H0271: 1, H0416: 1, T0023: 1, H0617: 1, H0169: 1, H0068: 1, L0351: 1, H0494: 1, H0396: 1, S0344: 1, |
| | | | | S0210: 1, L0446: 1, L0763: 1, L3905: 1, L5566: 1, L0667: 1, L0372: 1, L0644: 1, L0771: 1, L0648: 1, L0662: 1, L0768: 1, L0766: 1, L0774: 1, L0805: 1, L0809: 1, |
| | | | | L5623: 1, L0665: 1, H0547: 1, H0519: 1, H0593: 1, H0435: 1, H0672: 1, L0602: 1, S0152: 1, H0522: 1, S0406: 1, L0786: 1, L0779: 1, L0780: 1, L0758: 1, L0759: 1, |
| | | | | H0668: 1 and H0667: 1. |
| 330 | HWADJ89 | 799506 | 340 | AR252: 29, AR250: 29, AR253: 21, AR254: 10, AR282: 6, AR215: 6, AR165: 5, AR164: 5, AR166: 5, AR089: 5, AR161: 5, AR246: 5, AR162: 5, AR271: 5, |
| | | | | AR240: 5, AR053: 5, AR163: 5, AR263: 4, AR243: 4, AR274: 4, AR195: 4, AR205: 4, AR313: 4, AR096: 4, AR299: 4, AR180: 4, AR213: 4, AR193: 4, AR214: 4, |
| | | | | AR169: 4, AR300: 4, AR311: 4, AR264: 4, AR192: 4, AR173: 4, AR207: 4, AR312: 3, AR285: 3, AR171: 3, AR309: 3, AR060: 3, AR275: 3, AR308: 3, AR196: 3, |
| | | | | AR272: 3, AR316: 3, AR269: 3, AR257: 3, AR261: 3, AR170: 3, AR270: 3, AR183: 3, AR242: 3, AR245: 3, AR296: 3, AR199: 3, AR287: 3, AR295: 3, AR175: 3, |
| | | | | AR033: 3, AR172: 3, AR222: 2, AR188: 2, AR039: 2, AR185: 2, AR290: 2, AR286: 2, AR247: 2, AR238: 2, AR191: 2, AR297: 2, AR178: 2, AR268: 2, AR291: 2, |
| | | | | AR262: 2, AR200: 2, AR235: 2, AR104: 2, AR283: 2, AR212: 2, AR210: 2, AR288: 2, AR203: 2, AR201: 2, AR174: 2, AR277: 2, AR182: 2, AR197: 2, AR189: 2, |
| | | | | AR255: 2, AR294: 2, AR229: 2, AR230: 2, AR293: 2, AR258: 2, AR216: 2, AR236: 2, AR224: 2, AR181: 2, AR190: 2, AR239: 2, AR228: 2, AR227: 2, AR233: 2, |
| | | | | AR234: 1, AR177: 1, AR231: 1, AR179: 1, AR061: 1, AR266: 1, AR055: 1, AR226: 1, AR221: 1, AR289: 1, AR232: 1, H0581: 1 |
| 331 | HWBCB89 | 1093347 | 341 | AR207: 18, AR222: 18, AR283: 17, AR223: 17, AR214: 17, AR263: 16, AR224: 16, AR169: 16, AR089: 15, AR316: 14, AR277: 13, AR172: 13, AR195: 13, |
| | | | | AR171: 12, AR219: 12, AR225: 12, AR096: 12, AR218: 12, AR168: 12, AR282: 11, AR235: 11, AR055: 11, AR245: 11, AR221: 11, AR217: 11, AR053: 11, |
| | | | | AR313: 11, AR104: 11, AR192: 11, AR311: 11, AR170: 11, AR264: 10, AR165: 10, AR213: 10, AR299: 10, AR215: 10, AR166: 10, AR164: 10, AR246: 10, |
| | | | | AR216: 9, AR271: 9, AR163: 9, AR308: 9, AR161: 9, AR162: 9, AR197: 9, AR212: 9, AR198: 9, AR252: 9, AR240: 8, AR039: 8, AR309: 8, AR060: 8, AR185: 8, |
| | | | | AR295: 8, AR210: 8, AR300: 8, AR275: 8, AR205: 8, AR261: 7, AR211: 7, AR312: 7, AR193: 7, AR242: 7, AR177: 7, AR201: 7, AR196: 7, AR033: 7, AR288: 6, |
| | | | | AR236: 6, AR272: 6, AR243: 6, AR268: 6, AR174: 6, AR181: 5, AR173: 5, AR176: 5, AR285: 5, AR274: 5, AR266: 5, AR291: 5, AR238: 5, AR297: 5, AR229: 5, |
| | | | | AR204: 5, AR286: 5, AR270: 5, AR296: 5, AR175: 5, AR189: 5, AR289: 5, AR191: 4, AR247: 4, AR188: 4, AR257: 4, AR199: 4, AR178: 4, AR226: 4, AR269: 4, |
| | | | | AR232: 4, AR267: 4, AR183: 4, AR290: 4, AR239: 4, AR190: 4, AR254: 4, AR293: 4, AR231: 4, AR262: 4, AR258: 4, AR294: 3, AR234: 3, AR200: 3, AR287: 3, |
| | | | | AR255: 3, AR237: 3, AR182: 3, AR250: 3, AR260: 3, AR230: 3, AR227: 3, AR061: 3, AR179: 3, AR180: 3, AR203: 3, AR233: 3, AR256: 2, AR228: 2, AR253: 1, |
| | | | | L0777: 6, L0766: 4, H0090: 3, L0759: 3, H0657: 2, S0360: 2, H0318: 2, L0471: 2, H0031: 2, L0659: 2, L0740: 2, L0747: 2, L0750: 2, L0758: 2, H0170: 1, H0556: 1, |
| | | | | H0656: 1, H0341: 1, S0418: 1, H0637: 1, H0580: 1, H0411: 1, H0549: 1, H0333: 1, H0013: 1, H0599: 1, H0581: 1, H0545: 1, H0012: 1, S0003: 1, H0135: 1, |
| | | | | H0551: 1, H0488: 1, H0059: 1, H0647: 1, L0520: 1, L0763: 1, L0769: 1, L4556: 1, L0806: 1, L0805: 1, L0647: 1, L0789: 1, L0663: 1, H0144: 1, S3012: 1, L0748: 1, |
| | | | | L0749: 1, L0731: 1, L0757: 1, H0653: 1, H0543: 1, H0423: 1 and H0352: 1. |
| | HWBCB89 | 886210 | 521 | |
| 332 | HWBFX31 | 799427 | 342 | AR171: 3, AR309: 2, AR271: 2, AR282: 2, AR225: 2, AR205: 2, AR267: 2, AR213: 2, AR257: 2, AR236: 2, AR053: 1, AR266: 1, AR179: 1, AR199: 1, AR270: 1, |
| | | | | AR214: 1, AR181: 1, AR240: 1, AR247: 1, AR277: 1, L0659: 5, L0794: 4, L0809: 4, L0777: 4, H0424: 3, L0766: 3, L0745: 3, H0265: 2, H0656: 2, H0254: 2, |
| | | | | H0662: 2, S0376: 2, H0457: 2, H0024: 2, L0768: 2, H0670: 2, H0555: 2, L0751: 2, L0780: 2, H0556: 1, H0218: 1, H0224: 1, H0638: 1, S0360: 1, H0675: 1, |
| | | | | S0408: 1, H0580: 1, H0586: 1, H0575: 1, H0545: 1, H0050: 1, H0188: 1, H0252: 1, H0039: 1, H0617: 1, H0316: 1, H0063: 1, H0087: 1, H0264: 1, H0272: 1, |
| | | | | H0652: 1, S0002: 1, S0426: 1, L0763: 1, L0770: 1, L0761: 1, L0800: 1, L0773: 1, L0648: 1, L0662: 1, L0774: 1, L0784: 1, L0776: 1, L0647: 1, L0790: 1, L0666: 1, |
| | | | | L0664: 1, L0665: 1, L0438: 1, H0521: 1, H0522: 1, L0749: 1, L0750: 1, L0752: 1, L0757: 1, L0759: 1, L0596: 1, H0422: 1, S0458: 1 and H0677: 1. |
| 333 | HWDAH38 | 1028519 | 343 | AR313: 6, AR198: 5, AR217: 5, AR039: 5, AR089: 5, AR224: 4, AR162: 4, AR299: 4, AR242: 4, AR274: 4, AR180: 4, AR215: 4, AR193: 3, AR195: 3, AR165: 3, |
| | | | | AR272: 3, AR166: 3, AR164: 3, AR163: 3, AR185: 3, AR245: 3, AR161: 3, AR264: 3, AR197: 3, AR196: 3, AR173: 3, AR225: 3, AR271: 3, AR226: 3, AR096: 3, |
| | | | | AR230: 3, AR293: 2, AR204: 2, AR207: 2, AR246: 2, AR300: 2, AR243: 2, AR175: 2, AR237: 2, AR308: 2, AR316: 2, AR269: 2, AR203: 2, AR205: 2, AR188: 2, |
| | | | | AR212: 2, AR291: 2, AR060: 2, AR178: 2, AR277: 2, AR033: 2, AR236: 2, AR179: 2, AR312: 2, AR288: 2, AR247: 2, AR229: 2, AR174: 2, AR270: 2, AR218: 2, |
| | | | | AR282: 2, AR199: 2, AR183: 2, AR213: 1, AR233: 1, AR214: 1, AR262: 1, AR240: 1, AR221: 1, AR201: 1, AR104: 1, AR219: 1, AR234: 1, AR285: 1, AR253: 1, |
| | | | | AR177: 1, AR258: 1, AR268: 1, H0600: 1 |
| | HWDAH38 | 889281 | 522 | |
| 334 | HWHGZ51 | 886212 | 344 | AR283: 18, AR089: 18, AR316: 16, AR282: 16, AR060: 15, AR277: 15, AR104: 13, AR202: 13, AR246: 12, AR241: 12, AR281: 11, AR194: 11, AR240: 11, |
| | | | | AR055: 11, AR096: 10, AR299: 10, AR039: 10, AR219: 9, AR206: 9, AR218: 9, AR205: 8, AR313: 8, AR315: 8, AR185: 8, AR243: 7, AR204: 7, AR300: 7, |
| | | | | AR265: 6, AR280: 6, AR192: 6, AR263: 6, AR244: 6, AR271: 5, AR198: 5, AR266: 5, AR247: 5, AR289: 5, AR284: 5, AR285: 5, AR314: 5, AR295: 5, AR273: 5, |
| | | | | AR296: 4, AR291: 4, AR310: 4, AR213: 4, AR182: 4, AR232: 4, AR269: 4, AR183: 4, AR275: 4, AR294: 4, AR267: 3, AR033: 3, AR177: 3, AR312: 3, AR268: 3, |
| | | | | AR298: 3, AR270: 3, AR229: 3, AR286: 3, AR184: 3, AR309: 3, AR238: 3, AR175: 3, AR053: 3, AR227: 3, AR234: 3, AR274: 3, AR052: 3, AR290: 3, AR231: 3, |
| | | | | AR186: 2, AR293: 2, AR237: 2, AR251: 2, AR226: 2, AR292: 2, AR248: 2, AR256: 2, AR233: 2, AR259: 2, AR258: 2, AR253: 2, AR061: 2, AR179: 1, S0132: 8, |
| | | | | L2522: 8, H0264: 8, H0586: 7, L0747: 6, S0476: 5, S0330: 5, L0755: 5, L0751: 4, L0581: 4, L5623: 3, H0188: 2, H0031: 2, H0494: 2, L0776: 2, L0809: 2, H0696: 2, |
| | | | | L0731: 2, H0556: 1, H0295: 1, H0177: 1, H0638: 1, H0370: 1, H0592: 1, H0587: 1, H0486: 1, L2539: 1, L0021: 1, H0081: 1, H0271: 1, H0181: 1, H0617: 1, |
| | | | | H0380: 1, L0653: 1, L0659: 1, L0783: 1, L5622: 1, L0789: 1, L0791: 1, S0328: 1, L0752: 1, L0601: 1 and L3603: 1. |
| 335 | HWLIH65 | 793713 | 345 | AR061: 97, AR231: 60, AR238: 60, AR237: 58, AR234: 57, AR202: 53, AR194: 53, AR281: 48, AR226: 44, AR315: 42, AR206: 39, AR280: 38, AR244: 37, |
| | | | | AR227: 35, AR241: 31, AR229: 31, AR314: 30, AR248: 26, AR232: 25, AR284: 23, AR283: 22, AR265: 22, AR266: 21, AR310: 20, AR263: 19, AR292: 19, |
| | | | | AR033: 18, AR298: 17, AR184: 17, AR192: 17, AR246: 17, AR243: 17, AR096: 17, AR233: 15, AR295: 15, AR177: 15, AR282: 15, AR198: 13, AR186: 13, |
| | | | | AR267: 13, AR299: 13, AR273: 12, AR316: 12, AR104: 12, AR296: 12, AR251: 12, AR291: 12, AR249: 12, AR247: 12, AR219: 12, AR300: 12, AR313: 12, |
| | | | | AR277: 12, AR285: 11, AR289: 11, AR205: 11, AR039: 11, AR213: 11, AR052: 11, AR240: 10, AR218: 10, AR259: 10, AR286: 10, AR268: 10, AR269: 10, |
| | | | | AR204: 10, AR055: 9, AR182: 9, AR270: 9, AR253: 9, AR175: 8, AR183: 8, AR309: 8, AR053: 8, AR312: 8, AR271: 8, AR089: 7, AR275: 7, AR294: 7, AR185: 7, |
| | | | | AR256: 7, AR290: 7, AR274: 7, AR293: 6, AR258: 6, AR060: 5, AR179: 4, AR165: 3, AR161: 3, AR162: 3, AR264: 3, AR163: 3, AR195: 3, AR164: 3, AR166: 3, |
| | | | | AR308: 3, AR215: 3, AR212: 3, AR221: 3, AR272: 3, AR214: 2, AR199: 2, AR223: 2, AR201: 2, AR176: 2, AR224: 2, AR217: 1, AR210: 1, AR172: 1, AR311: 1, |
| | | | | AR257: 1, AR171: 1, AR297: 1, AR196: 1, AR245: 1, AR189: 1, L0774: 3, H0521: 3, L0777: 3, S0356: 2, S0408: 2, H0124: 2, H0494: 2, L0766: 2, L0666: 2, |
| | | | | L0751: 2, L0596: 2, S0040: 1, H0294: 1, S0430: 1, H0656: 1, S0358: 1, S0360: 1, H0729: 1, H0645: 1, H0586: 1, H0587: 1, H0632: 1, H0590: 1, L0045: 1, S0003: 1, |
| | | | | H0316: 1, H0598: 1, S0036: 1, H0591: 1, L0564: 1, H0560: 1, H0509: 1, H0641: 1, S0002: 1, L0640: 1, L0662: 1, L0775: 1, L0655: 1, L0659: 1, L0783: 1, L5622: 1, |
| | | | | L0663: 1, L2653: 1, H0701: 1, H0689: 1, H0672: 1, H0539: 1, S0406: 1, L0439: 1, L0749: 1, L0786: 1, S0434: 1, S0436: 1, H0543: 1, S0424: 1 and S0446: 1. |
| 336 | HTEAM34 | 898364 | 346 | AR225: 7, AR161: 5, AR162: 5, AR269: 5, AR163: 5, AR055: 5, AR060: 5, AR264: 4, AR309: 4, AR181: 4, AR165: 4, AR214: 4, AR228: 4, AR263: 4, AR180: 4, |
| | | | | AR176: 4, AR164: 4, AR266: 4, AR233: 4, AR275: 4, AR268: 4, AR166: 4, AR270: 4, AR257: 4, AR172: 4, AR236: 4, AR267: 4, AR274: 4, AR229: 4, AR237: 4, |
| | | | | AR217: 4, AR182: 4, AR215: 4, AR261: 3, AR240: 3, AR179: 3, AR300: 3, AR216: 3, AR177: 3, AR272: 3, AR311: 3, AR195: 3, AR231: 3, AR239: 3, AR294: 3, |
| | | | | AR173: 3, AR293: 3, AR183: 3, AR287: 3, AR252: 3, AR277: 3, AR223: 3, AR196: 3, AR288: 3, AR175: 3, AR255: 3, AR296: 3, AR291: 3, AR285: 3, AR286: 3, |
| | | | | AR061: 3, AR289: 3, AR235: 3, AR178: 3, AR185: 3, AR308: 3, AR218: 3, AR262: 3, AR234: 3, AR191: 3, AR247: 3, AR224: 3, AR230: 3, AR290: 2, AR096: 2, |
| | | | | AR222: 2, AR207: 2, AR089: 2, AR313: 2, AR295: 2, AR170: 2, AR282: 2, AR193: 2, AR316: 2, AR226: 2, AR200: 2, AR174: 2, AR297: 2, AR190: 2, AR188: 2, |
| | | | | AR232: 2, AR238: 2, AR203: 2, AR171: 2, AR299: 2, AR283: 2, AR245: 2, AR189: 2, AR258: 2, AR260: 2, AR104: 2, AR227: 2, AR312: 2, AR168: 2, AR199: 1, |
| | | | | AR256: 1, AR039: 1, AR033: 1, AR211: 1, AR169: 1, AR210: 1, AR219: 1, L0758: 5, L0794: 4, H0618: 2, H0038: 2 and H0616: 1. |
| | HTEAM34 | 570049 | 523 | |

[0096] Table 1C summarizes additional polynucleotides encompassed by the invention (including cDNA clones related to the sequences (Clone ID:), contig sequences (contig identifier (Contig ID:) contig nucleotide sequence identifiers (SEQ ID NO:X)), and genomic sequences (SEQ ID NO:B). Table 1C is found in priority Application No. PCT/US02/09785, filed Mar. 19, 2002, which corresponds to Publication No. WO02/95010, published Nov. 28, 2002. Table 1C, found on pages 227 to 235 of Publication No. WO02/95010, is incorporated by reference herein in its entirety. The first column of Table IC provides a unique clone identifier, “Clone ID:”, for a cDNA clone related to each contig sequence. The second column provides the sequence identifier, “SEQ ID NO:X”, for each contig sequence. The third column provides a unique contig identifier, “Contig ID:” for each contig sequence. The fourth column, provides a BAC identifier “BAC ID NO:A” for the BAC clone referenced in the corresponding row of the table. The fifth column provides the nucleotide sequence identifier, “SEQ ID NO:B” for a fragment of the BAC clone identified in column four of the corresponding row of the table. The sixth column, “Exon From-To”, provides the location (i.e., nucleotide position numbers) within the polynucleotide sequence of SEQ ID NO:B which delineate certain polynucleotides of the invention that are also exemplary members of polynucleotide sequences that encode polypeptides of the invention (e.g., polypeptides containing amino acid sequences encoded by the polynucleotide sequences delineated in column six, and fragments and variants thereof).

[0097] Table 1D (Comprised of Tables 1D.1 and 1D.2): The polynucleotides or polypeptides, or agonists or antagonists of the present invention can be used in assays to test for one or more biological activities. If these polynucleotides and polypeptides do exhibit activity in a particular assay, it is likely that these molecules may be involved in the diseases associated with the biological activity. Thus, the polynucleotides or polypeptides, or agonists or antagonists could be used to treat the associated disease.

[0098] The present invention encompasses methods of detecting, preventing, diagnosing, prognosticating, treating, and/or ameliorating a disease or disorder. In preferred embodiments, the present invention encompasses a method of treating a cardiovascular disease or disorder comprising administering to a patient in which such detection, treatment, prevention, and/or amelioration is desired a protein, nucleic acid, or antibody of the invention (or fragment or variant thereof) in an amount effective to detect, prevent, diagnose, prognosticate, treat, and/or ameliorate the cardiovascular disease or disorder.

[0099] In another embodiment, the present invention also encompasses methods of detecting, preventing, diagnosing, prognosticating, treating, and/or ameliorating a cardiovascular disease or disorder; comprising administering to a patient combinations of the proteins, nucleic acids, or antibodies of the invention (or fragments or variants thereof), sharing similar indications as shown in the corresponding rows in Column 3 of Table 1E.

[0100] Tables 1D.1 and 1D.2 provide information related to biological activities for polynucleotides and polypeptides of the invention (including antibodies, agonists, and/or antagonists thereof). In Table 1D.1, the first and second columns show the “Gene No.” and “cDNA Clone ID No.”, respectively, indicating certain nucleic acids and proteins (or antibodies against the same) of the invention (including polynucleotide, polypeptide, and antibody fragments or variants thereof). The third column (“AA SEQ ID NO:Y”) indicates the Sequence Listing SEQ ID Number for polypeptide sequences encoded by the corresponding cDNA clones (also as indicated in Tables 1A, Table 1B, and Table 2), and the fourth column (“Biological Activity”) indicates a biological activity corresponding to the indicated polypeptides (or polynucleotides encoding said polypeptides).

[0101] In Table 1D.2, each of the biological activities of Table 1D.1 is listed followed by an “Exemplary Activity Assay” row and a ”Preferred Indication” row; however, for some biological activities no “Exemplary Activity Assay” or “Preferred Indication” is given. The “Exemplary Activity Assay” row describes the biological activity listed in the row that precedes it and also provides information pertaining to the various types of assays which may be performed to test, demonstrate, or quantify the corresponding biological activity. The “Preferred Indication” row also refers to the biological activity listed in the preceding row and describes disease(s) or disorder(s) that may be detected, diagnosed, prevented, treated, or ameliorated by the nucleic acids and proteins (or antibodies against the same) of the invention (including polynucleotide, polypeptide, and antibody fragments or variants thereof).

[0102] Table 1D.2 also describes the use of, inter alia, FMAT technology for testing or demonstrating various biological activities. Fluorometric microvolume assay technology (FMAT) is a fluorescence-based system which provides a means to perform nonradioactive cell- and bead-based assays to detect activation of cell signal transduction pathways. This technology was designed specifically for ligand binding and immunological assays. Using this technology, fluorescent cells or beads at the bottom of the well are detected as localized areas of concentrated fluorescence using a data processing system. Unbound flurophore comprising the background signal is ignored, allowing for a wide variety of homogeneous assays. FMAT technology may be used for peptide ligand binding assays, immunofluorescence, apoptosis, cytotoxicity, and bead-based immunocapture assays. See, Miraglia S et. al., “Homogeneous cell and bead based assays for highthroughput screening using flourometric microvolume assay technology,” Journal of Biomolecular Screening; 4:193-204 (1999). In particular, FMAT technology may be used to test, confirm, and/or identify the ability of polypeptides (including polypeptide fragments and variants) to activate signal transduction pathways. For example, FMAT technology may be used to test, confirm, and/or identify the ability of polypeptides to upregulate production of immunomodulatory proteins (such as, for example, interleukins, GM-CSF, Rantes, and Tumor Necrosis factors, as well as other cellular regulators (e.g. insulin)).

[0103] Table 1D.2 also describes the use of kinase assays for testing, demonstrating, or quantifying biological activity. In this regard, the phosphorylation and de-phosphorylation of specific amino acid residues (e.g. Tyrosine, Serine, Threonine) on cell-signal transduction proteins provides a fast, reversible means for activation and de-activation of cellular signal transduction pathways. Moreover, cell signal transduction via phosphorylation/de-phosphorylation is crucial to the regulation of a wide variety of cellular processes (e.g. proliferation, differentiation, migration, apoptosis, etc.). Accordingly, kinase assays provide a powerful tool useful for testing, confirming, and/or identifying polypeptides (including polypeptide fragments and variants) that mediate cell signal transduction events via protein phosphorylation. See e.g., Forrer, P., Tamaskovic R., and Jaussi, R. “Enzyme-Linked Immunosorbent Assay for Measurement of JNK, ERK, and p38 Kinase Activities” Biol. Chem. 379(8-9): 1101-1110 (1998). Table 1D from priority Application No. PCT/US02/09785 (filed Mar. 19, 2002; corresponding to Publication No. W002/95010, published Nov. 28, 2002) is incorporated by reference herein in its entirety.

TABLE 1D.1

| | | AA | |
|---|---|---|---|
| Gene | cDNA | SEQ ID | |
| No. | Clone ID | NO: Y | Biological Activity |
| 1 | H2CBU83 | 527 | #1: Stimulation of insulin secretion from pancreatic beta cells. |
| 2 | H2MAC30 | 528 | #2: Activation of transcription through serum response element in immune cells (such as T-cells). |
| 2 | H2MAC30 | 528 | #3: Activation of JNK Signaling Pathway in immune cells (such as eosinophils). |
| 3 | H6EDC19 | 529 | #4: Regulation of viability and proliferation of pancreatic beta cells. |
| 3 | H6EDC19 | 529 | #5: Proliferation of pre-adipose cells (such as 3T3-L1 cells) |
| 4 | HACBD91 | 530 | #6: Activation of transcription through cAMP response element (CRE) in pre-adipocytes. |
| 4 | HACBD91 | 530 | #7: Activation of transcription through cAMP response element in immune cells (such as T-cells). |
| 4 | HACBD91 | 530 | #8: Production of IL-6 |
| 4 | HACBD91 | 530 | #9: Regulation of transcription of Malic Enzyme in adipocytes |
| 4 | HACBD91 | 530 | #10: Activation of Endothelial Cell p38 or JNK Signaling Pathway. |
| 4 | HACBD91 | 530 | #11: Activation of transcription through CD28 response element in immune cells (such as T-cells). |
| 4 | HACBD91 | 530 | #11b: Activation of transcription through CD28 response element in immune cells (such as T-cells). |
| 4 | HACBD91 | 530 | #12b: Activation of transcription through NFAT response element in immune cells (such as natural killer cells). |
| 4 | HACBD91 | 530 | #13: Activation of transcription through serum response element in immune cells (such as natural killer cells). |
| 4 | HACBD91 | 530 | #14: Activation of transcription through AP1 response element in immune cells (such as T-cells). |
| 4 | HACBD91 | 530 | #15: Activation of transcription through NFAT response element in immune cells (such as T-cells). |
| 4 | HACBD91 | 530 | #16b: Activation of transcription through NFKB response element in immune cells (such as T-cells). |
| 4 | HACBD91 | 530 | #17: Activation of transcription through STAT6 response element in immune cells (such as T-cells). |
| 5 | HAGAQ26 | 531 | #1: Stimulation of insulin secretion from pancreatic beta cells. |
| 6 | HAGBZ81 | 532 | #2: Activation of transcription through serum response element in immune cells (such as T-cells). |
| 7 | HAGDG59 | 533 | #18: Inhibition of squalene synthetase gene transcription. |
| 8 | HAGDS35 | 534 | #19: Regulation of transcription via DMEF1 response element in adipocytes and pre-adipocytes |
| 9 | HAGFG51 | 535 | #2: Activation of transcription through serum response element in immune cells (such as T-cells). |
| 10 | HAIBO71 | 536 | #12b: Activation of transcription through NFAT response element in immune cells (such as natural killer cells). |
| 10 | HAIBO71 | 536 | #20: Endothelial Cell Apoptosis |
| 11 | HAIFL18 | 537 | #13: Activation of transcription through serum response element in immune cells (such as natural killer cells). |
| 11 | HAIFL18 | 537 | #21: Production of IFNgamma using a T cells |
| 11 | HAIFL18 | 537 | #22: Activation of Adipocyte ERK Signaling Pathway |
| 12 | HAJAF57 | 538 | #23: Activation of Endothelial Cell JNK Signaling Pathway. |
| 12 | HAJAF57 | 538 | #24: Regulation of apoptosis of immune cells (such as mast cells). |
| 13 | HAJAN23 | 539 | #25: Stimulation of Calcium Flux in pancreatic beta cells. |
| 14 | HAJBR69 | 540 | #26: Production of GM-CSF |
| 14 | HAJBR69 | 540 | #27: Regulation of transcription through the PEPCK promoter in hepatocytes |
| 15 | HAMFE15 | 541 | #19: Regulation of transcription via DMEF1 response element in adipocytes and pre-adipocytes |
| 16 | HAMGG68 | 542 | #10: Activation of Endothelial Cell p38 or JNK Signaling Pathway. |
| 16 | HAMGG68 | 542 | #28: Production of ICAM in endothelial cells (such as human umbilical vein endothelial cells (HUVEC)) |
| 17 | HAMGR28 | 543 | #25: Stimulation of Calcium Flux in pancreatic beta cells. |
| 18 | HAPOM49 | 544 | #4: Regulation of viability and proliferation of pancreatic beta cells. |
| 19 | HAPPW30 | 545 | #29: Activation of T-Cell p38 or JNK Signaling Pathway. |
| 20 | HATBR65 | 546 | #8: Production of IL-6 |
| 20 | HATBR65 | 546 | #9: Regulation of transcription of Malic Enzyme in adipocytes |
| 21 | HATCB92 | 547 | #2: Activation of transcription through serum response element in immune cells (such as T-cells). |
| 22 | HATEE46 | 548 | #10: Activation of Endothelial Cell p38 or JNK Signaling Pathway. |
| 22 | HATEE46 | 548 | #30: Production of ICAM-1 |
| 23 | HAUAI83 | 549 | #31: Insulin Secretion |
| 24 | HBAMB15 | 550 | #1: Stimulation of insulin secretion from pancreatic beta cells. |
| 25 | HBGBA69 | 551 | #4: Regulation of viability and proliferation of pancreatic beta cells. |
| 25 | HBGBA69 | 551 | #32: VEGF in SW480 |
| 26 | HBIAE26 | 552 | #31: Insulin Secretion |
| 28 | HBJNC59 | 554 | #29: Activation of T-Cell p38 or JNK Signaling Pathway. |
| 29 | HBNAW17 | 555 | #2: Activation of transcription through serum response element in immune cells (such as T-cells). |
| 29 | HBNAW17 | 555 | #31: Insulin Secretion |
| 30 | HBOEG69 | 556 | #13: Activation of transcription through serum response element in immune cells (such as natural killer cells). |
| 31 | HCACU58 | 557 | #2: Activation of transcription through serum response element in immune cells (such as T-cells). |
| 31 | HCACU58 | 557 | #28: Production of ICAM in endothelial cells (such as human umbilical vein endothelial cells (HUVEC)) |
| 31 | HCACU58 | 557 | #33: Production of IL-10 and activation of T-cells. |
| 31 | HCACU58 | 557 | #34: Activation of transcription through GATA-3 response element in immune cells (such as mast cells). |
| 32 | HCE2F54 | 558 | #5: Proliferation of pre-adipose cells (such as 3T3-L1 cells) |
| 32 | HCE2F54 | 558 | #18: Inhibition of squalene synthetase gene transcription. |
| 32 | HCE2F54 | 558 | #27: Regulation of transcription through the PEPCK promoter in hepatocytes |
| 32 | HCE2F54 | 558 | #35: Activation of transcription through NFKB response element in immune cells (such as the U937 human monocyte |
| | | | cell line). |
| 32 | HCE2F54 | 558 | #36: Activation of transcription through NFKB response element in epithelial cells (such as HELA cells). |
| 32 | HCE2F54 | 558 | #37: Activation or inhibition of transcription through NFKB response element in immune cells (such as basophils). |
| 33 | HCE3G69 | 559 | #1: Stimulation of insulin secretion from pancreatic beta cells. |
| 33 | HCE3G69 | 559 | #5: Proliferation of pre-adipose cells (such as 3T3-L1 cells) |
| 33 | HCE3G69 | 559 | #18: Inhibition of squalene synthetase gene transcription. |
| 33 | HCE3G69 | 559 | #33: Production of IL-10 and activation of T-cells. |
| 34 | HCE5F43 | 560 | #1: Stimulation of insulin secretion from pancreatic beta cells. |
| 35 | HCEFB80 | 561 | #31: Insulin Secretion |
| 35 | HCEFB80 | 561 | #38c: Activation of transcription through GAS response element in immune cells (such as T-cells). |
| 36 | HCENK38 | 562 | #38c: Activation of transcription through GAS response element in immune cells (such as T-cells). |
| 36 | HCENK38 | 562 | #39: Protection from Endothelial Cell Apoptosis. |
| 36 | HCENK38 | 562 | #40: Activation of Hepatocyte ERK Signaling Pathway |
| 37 | HCEWE20 | 563 | #9b: Regulation of transcription of Malic Enzyme in hepatocytes |
| 37 | HCEWE20 | 563 | #30b: Production of ICAM-1 |
| 38 | HCFNN01 | 564 | #2: Activation of transcription through serum response element in immune cells (such as T-cells). |
| 39 | HCGMD59 | 565 | #31: Insulin Secretion |
| 39 | HCGMD59 | 565 | #41: Inhibition of adipocyte ERK signaling pathway. |
| 40 | HCHNF25 | 566 | #42: Calcium flux in immune cells (such as monocytes) |
| 41 | HCNDR47 | 567 | #4: Regulation of viability and proliferation of pancreatic beta cells. |
| 41 | HCNDR47 | 567 | #43: Production of RANTES in endothelial cells (such as human umbilical vein endothelial cells (HUVEC)) |
| 42 | HCNSB61 | 568 | #20: Endothelial Cell Apoptosis |
| 42 | HCNSB61 | 568 | #22: Activation of Adipocyte ERK Signaling Pathway |
| 43 | HCNSM70 | 569 | #44: Myoblast cell proliferation |
| 44 | HCUCK44 | 570 | #39: Protection from Endothelial Cell Apoptosis. |
| 44 | HCUCK44 | 570 | #45: Production of MCP-1 |
| 45 | HCUEO60 | 571 | #13: Activation of transcription through serum response element in immune cells (such as natural killer cells). |
| 46 | HCUHK65 | 572 | #13: Activation of transcription through serum response element in immune cells (such as natural killer cells). |
| 47 | HCUIM65 | 573 | #6: Activation of transcription through cAMP response element (CRE) in pre-adipocytes. |
| 47 | HCUIM65 | 573 | #12: Activation of transcription through NFKB response element in immune cells (such as natural killer cells). |
| 47 | HCUIM65 | 573 | #12b: Activation of transcription through NFAT response element in immune cells (such as natural killer cells). |
| 47 | HCUIM65 | 573 | #13: Activation of transcription through serum response element in immune cells (such as natural killer cells). |
| 47 | HCUIM65 | 573 | #18: Inhibition of squalene synthetase gene transcription. |
| 47 | HCUIM65 | 573 | #19: Regulation of transcription via DMEF1 response element in adipocytes and pre-adipocytes |
| 47 | HCUIM65 | 573 | #25: Stimulation of Calcium Flux in pancreatic beta cells. |
| 47 | HCUIM65 | 573 | #34: Activation of transcription through GATA-3 response element in immune cells (such as mast cells). |
| 47 | HCUIM65 | 573 | #38: Activation of transcription through GAS response element in immune cells (such as T-cells). |
| 47 | HCUIM65 | 573 | #46: Activation of transcription through serum response element in pre-adipocytes. |
| 47 | HCUIM65 | 573 | #47: Activation of transcription through NFAT response element in immune cells (such as mast cells). |
| 47 | HCUIM65 | 573 | #48: Activation of transcription through NFKB response element in immune cells (such as mast cells). |
| 47 | HCUIM65 | 573 | #49: Production of VCAM in endothelial cells (such as human umbilical vein endothelial cells (HUVEC)) |
| 48 | HCWDS72 | 574 | #9: Regulation of transcription of Malic Enzyme in adipocytes |
| 49 | HCWGU37 | 575 | #50: Calcium flux in chondrocytes |
| 50 | HCWKC15 | 576 | #6: Activation of transcription through cAMP response element (CRE) in pre-adipocytes. |
| 50 | HCWKC15 | 576 | #11: Activation of transcription through CD28 response element in immune cells (such as T-cells). |
| 50 | HCWKC15 | 576 | #12: Activation of transcription through NFKB response element in immune cells (such as natural killer cells). |
| 50 | HCWKC15 | 576 | #12c: Activation of transcription through NFKB response element in immune cells (such as natural killer cells). |
| 50 | HCWKC15 | 576 | #12b: Activation of transcription through NFAT response element in immune cells (such as natural killer cells). |
| 50 | HCWKC15 | 576 | #13: Activation of transcription through serum response element in immune cells (such as natural killer cells). |
| 50 | HCWKC15 | 576 | #14: Activation of transcription through AP1 response element in immune cells (such as T-cells). |
| 50 | HCWKC15 | 576 | #15: Activation of transcription through NFAT response element in immune cells (such as T-cells). |
| 50 | HCWKC15 | 576 | #16b: Activation of transcription through NFKB response element in immune cells (such as T-cells). |
| 50 | HCWKC15 | 576 | #19: Regulation of transcription via DMEF1 response element in adipocytes and pre-adipocytes |
| 50 | HCWKC15 | 576 | #34: Activation of transcription through GATA-3 response element in immune cells (such as mast cells). |
| 50 | HCWKC15 | 576 | #38: Activation of transcription through GAS response element in immune cells (such as T-cells). |
| 50 | HCWKC15 | 576 | #46: Activation of transcription through serum response element in pre-adipocytes. |
| 50 | HCWKC15 | 576 | #47: Activation of transcription through NFAT response element in immune cells (such as mast cells). |
| 50 | HCWKC15 | 576 | #48: Activation of transcription through NFKB response element in immune cells (such as mast cells). |
| 50 | HCWKC15 | 576 | #51: Activation of transcription through NFKB response element in immune cells (such as basophils). |
| 50 | HCWKC15 | 576 | #52: Activation of transcription through GAS response element in immune cells (such as eosinophils). |
| 50 | HCWKC15 | 576 | #53: Activation of transcription through NFKB response element in immune cells (such as EOL1 cells). |
| 50 | HCWKC15 | 576 | #54: Activation of transcription through STAT6 response element in immune cells (such as mast cells). |
| 51 | HCWLD74 | 577 | #6: Activation of transcription through cAMP response element (CRE) in pre-adipocytes. |
| 51 | HCWLD74 | 577 | #7c: Activation of transcription through cAMP response element in immune cells (such as T-cells). |
| 51 | HCWLD74 | 577 | #12b: Activation of transcription through NFAT response element in immune cells (such as natural killer cells). |
| 51 | HCWLD74 | 577 | #13: Activation of transcription through serum response element in immune cells (such as natural killer cells). |
| 51 | HCWLD74 | 577 | #34: Activation of transcription through GATA-3 response element in immune cells (such as mast cells). |
| 51 | HCWLD74 | 577 | #38: Activation of transcription through GAS response element in immune cells (such as T-cells). |
| 51 | HCWLD74 | 577 | #47: Activation of transcription through NFAT response element in immune cells (such as mast cells). |
| 52 | HDHEB60 | 578 | #6: Activation of transcription through cAMP response element (CRE) in pre-adipocytes. |
| 52 | HDHEB60 | 578 | #11: Activation of transcription through CD28 response element in immune cells (such as T-cells). |
| 52 | HDHEB60 | 578 | #12b: Activation of transcription through NFKB response element in immune cells (such as natural killer cells). |
| 52 | HDHEB60 | 578 | #12b: Activation of transcription through NFAT response element in immune cells (such as natural killer cells). |
| 52 | HDHEB60 | 578 | #14: Activation of transcription through AP1 response element in immune cells (such as T-cells). |
| 52 | HDHEB60 | 578 | #15: Activation of transcription through NFAT response element in immune cells (such as T-cells). |
| 52 | HDHEB60 | 578 | #16b: Activation of transcription through NFKB response element in immune cells (such as T-cells). |
| 52 | HDHEB60 | 578 | #17: Activation of transcription through STAT6 response element in immune cells (such as T-cells). |
| 52 | HDHEB60 | 578 | #38: Activation of transcription through GAS response element in immune cells (such as T-cells). |
| 52 | HDHEB60 | 578 | #44: Myoblast cell proliferation |
| 52 | HDHEB60 | 578 | #49: Production of VCAM in endothelial cells (such as human umbilical vein endothelial cells (HUVEC)) |
| 53 | HDLAC10 | 579 | #2: Activation of transcription through serum response element in immune cells (such as T-cells). |
| 53 | HDLAC10 | 579 | #49: Production of VCAM in endothelial cells (such as human umbilical vein endothelial cells (HUVEC)) |
| 54 | HDPBA28 | 580 | #1: Stimulation of insulin secretion from pancreatic beta cells. |
| 54 | HDPBA28 | 580 | #55: Production of IL-10 and activation of T-cells. |
| 55 | HDPBQ71 | 581 | #21: Production of IFNgamma using a T cells |
| 55 | HDPBQ71 | 581 | #56: Regulation of viability or proliferation of immune cells (such as human eosinophil EOL-1 cells). |
| 56 | HDPCL63 | 582 | #57: Regulation of transcription through the FAS promoter element in hepatocytes |
| 57 | HDPCO25 | 583 | #4b: Regulation of viability and proliferation of pancreatic beta cells. |
| 57 | HDPCO25 | 583 | #16b: Activation of transcription through NFKB response element in immune cells (such as T-cells). |
| 58 | HDPFF39 | 584 | #18: Inhibition of squalene synthetase gene transcription. |
| 58 | HDPFF39 | 584 | #29: Activation of T-Cell p38 or JNK Signaling Pathway. |
| 59 | HDPFP29 | 585 | #44: Myoblast cell proliferation |
| 60 | HDPGI49 | 586 | #10: Activation of Endothelial Cell p38 or JNK Signaling Pathway. |
| 61 | HDPGT01 | 587 | #57: Regulation of transcription through the FAS promoter element in hepatocytes |
| 62 | HDPHI51 | 588 | #17: Activation of transcription through STAT6 response element in immune cells (such as T-cells). |
| 62 | HDPHI51 | 588 | #57: Regulation of transcription through the FAS promoter element in hepatocytes |
| 63 | HDPJM30 | 589 | #37: Activation or inhibition of transcription through NFKB response element in immune cells (such as basophils). |
| 63 | HDPJM30 | 589 | #45: Production of MCP-1 |
| 63 | HDPJM30 | 589 | #57: Regulation of transcription through the FAS promoter element in hepatocytes |
| 64 | HDPMM88 | 590 | #37: Activation or inhibition of transcription through NFKB response element in immune cells (such as basophils). |
| 64 | HDPMM88 | 590 | #44: Myoblast cell proliferation |
| 64 | HDPMM88 | 590 | #58: SEAP in HIB/CRE |
| 65 | HDPNC61 | 591 | #6: Activation of transcription through cAMP response element (CRE) in pre-adipocytes. |
| 65 | HDPNC61 | 591 | #38b: Activation of transcription through GAS response element in immune cells (such as T-cells). |
| 65 | HDPNC61 | 591 | #52: Activation of transcription through GAS response element in immune cells (such as eosinophils). |
| 65 | HDPNC61 | 591 | #59: Production of RANTES in bronchial epithelium cells |
| 65 | HDPNC61 | 591 | #60: Activation of Endothelial Cell ERK Signaling Pathway. |
| 66 | HDPOJ08 | 592 | #18: Inhibition of squalene synthetase gene transcription. |
| 66 | HDPOJ08 | 592 | #61: Regulation of apoptosis in pancreatic beta cells. |
| 67 | HDPOZ56 | 593 | #10: Activation of Endothelial Cell p38 or JNK Signaling Pathway. |
| 67 | HDPOZ56 | 593 | #62: Activation of transcription through GAS response element in epithelial cells (such as HELA cells). |
| 68 | HDPPN86 | 594 | #1: Stimulation of insulin secretion from pancreatic beta cells. |
| 69 | HDPSB18 | 595 | #1: Stimulation of insulin secretion from pancreatic beta cells. |
| 70 | HDPSH53 | 596 | #25: Stimulation of Calcium Flux in pancreatic beta cells. |
| 70 | HDPSH53 | 596 | #43: Production of RANTES in endothelial cells (such as human umbilical vein endothelial cells (HUVEC)) |
| 71 | HDPSP01 | 597 | #31: Insulin Secretion |
| 71 | HDPSP01 | 597 | #45: Production of MCP-1 |
| 72 | HDPSP54 | 598 | #23: Activation of Endothelial Cell JNK Signaling Pathway. |
| 72 | HDPSP54 | 598 | #55: Production of IL-10 and activation of T-cells. |
| 72 | HDPSP54 | 598 | #63: Regulation of apoptosis in pancreatic beta cells. |
| 74 | HDPUW68 | 600 | #2: Activation of transcription through serum response element in immune cells (such as T-cells). |
| 74 | HDPUW68 | 600 | #22: Activation of Adipocyte ERK Signaling Pathway |
| 74 | HDPUW68 | 600 | #25: Stimulation of Calcium Flux in pancreatic beta cells. |
| 74 | HDPUW68 | 600 | #64: Activation of Skeletal Mucle Cell PI3 Kinase Signalling Pathway |
| 75 | HDPWN93 | 601 | #3: Activation of JNK Signaling Pathway in immune cells (such as eosinophils). |
| 75 | HDPWN93 | 601 | #10: Activation of Endothelial Cell p38 or JNK Signaling Pathway. |
| 76 | HDPXY01 | 602 | #31: Insulin Secretion |
| 77 | HDTBD53 | 603 | #44: Myoblast cell proliferation |
| 78 | HDTBV77 | 604 | #19: Regulation of transcription via DMEF1 response element in adipocytes and pre-adipocytes |
| 79 | HDTDQ23 | 605 | #20: Endothelial Cell Apoptosis |
| 79 | HDTDQ23 | 605 | #25: Stimulation of Calcium Flux in pancreatic beta cells. |
| 80 | HE2DE47 | 606 | #65: Regulation of apoptosis in pancreatic beta cells. |
| 81 | HE2EB74 | 607 | #10: Activation of Endothelial Cell p38 or JNK Signaling Pathway. |
| 82 | HE2NV57 | 608 | #29: Activation of T-Cell p38 or JNK Signaling Pathway. |
| 82 | HE2NV57 | 608 | #31: Insulin Secretion |
| 83 | HE2PH36 | 609 | #4: Regulation of viability and proliferation of pancreatic beta cells. |
| 84 | HE8DS15 | 610 | #9: Regulation of transcription of Malic Enzyme in adipocytes |
| 84 | HE8DS15 | 610 | #18: Inhibition of squalene synthetase gene transcription. |
| 84 | HE8DS15 | 610 | #22: Activation of Adipocyte ERK Signaling Pathway |
| 85 | HE9CP41 | 611 | #2: Activation of transcription through serum response element in immune cells (such as T-cells). |
| 86 | HE9DG49 | 612 | #38c: Activation of transcription through GAS response element in immune cells (such as T-cells). |
| 87 | HE9HY07 | 613 | #22: Activation of Adipocyte ERK Signaling Pathway |
| 87 | HE9HY07 | 613 | #57: Regulation of transcription through the FAS promoter element in hepatocytes |
| 88 | HEBEJ18 | 614 | #29: Activation of T-Cell p38 or JNK Signaling Pathway. |
| 89 | HEEAQ11 | 615 | #29: Activation of T-Cell p38 or JNK Signaling Pathway. |
| 89 | HEEAQ11 | 615 | #56: Regulation of viability or proliferation of immune cells (such as human eosinophil EOL-1 cells). |
| 90 | HEGAH43 | 616 | #20: Endothelial Cell Apoptosis |
| 91 | HELHD85 | 617 | #2: Activation of transcription through serum response element in immune cells (such as T-cells). |
| 92 | HEOMQ63 | 618 | #1: Stimulation of insulin secretion from pancreatic beta cells. |
| 93 | HEPAA46 | 619 | #2: Activation of transcription through serum response element in immune cells (such as T-cells). |
| 94 | HEPAB80 | 620 | #4b: Regulation of viability and proliferation of pancreatic beta cells. |
| 94 | HEPAB80 | 620 | #22: Activation of Adipocyte ERK Signaling Pathway |
| 95 | HFABG18 | 621 | #21: Production of IFNgamma using a T cells |
| 95 | HFABG18 | 621 | #22: Activation of Adipocyte ERK Signaling Pathway |
| 95 | HFABG18 | 621 | #39: Protection from Endothelial Cell Apoptosis. |
| 96 | HFABH95 | 622 | #1: Stimulation of insulin secretion from pancreatic beta cells. |
| 97 | HFAEF57 | 623 | #57: Regulation of transcription through the FAS promoter element in hepatocytes |
| 98 | HFAMH77 | 624 | #2: Activation of transcription through serum response element in immune cells (such as T-cells). |
| 98 | HFAMH77 | 624 | #21: Production of IFNgamma using a T cells |
| 98 | HFAMH77 | 624 | #43: Production of RANTES in endothelial cells (such as human umbilical vein endothelial cells (HUVEC)) |
| 99 | HFCCQ50 | 625 | #66: Production of IL-4 |
| 99 | HFCCQ50 | 625 | #67: Production of TNF alpha by dendritic cells |
| 99 | HFCCQ50 | 625 | #68: Activation of transcription through GAS response element in immune cells (such as monocytes). |
| 99 | HFCCQ50 | 625 | #69: Activation of transcription through NFKB response element in immune cells (such as the Jurkat human T cell line). |
| 100 | HFCEB37 | 626 | #9: Regulation of transcription of Malic Enzyme in adipocytes |
| 101 | HFFAD59 | 627 | #2: Activation of transcription through serum response element in immune cells (such as T-cells). |
| 101 | HFFAD59 | 627 | #14b: Activation of transcription through AP1 response element in immune cells (such as T-cells). |
| 101 | HFFAD59 | 627 | #19: Regulation of transcription via DMEF1 response element in adipocytes and pre-adipocytes |
| 102 | HFFAL36 | 628 | #2: Activation of transcription through serum response element in immune cells (such as T-cells). |
| 102 | HFFAL36 | 628 | #14b: Activation of transcription through AP1 response element in immune cells (such as T-cells). |
| 103 | HFGAD82 | 629 | #1: Stimulation of insulin secretion from pancreatic beta cells. |
| 103 | HFGAD82 | 629 | #14b: Activation of transcription through AP1 response element in immune cells (such as T-cells). |
| 104 | HFIUR10 | 630 | #4b: Regulation of viability and proliferation of pancreatic beta cells. |
| 105 | HFTBM50 | 631 | #31: Insulin Secretion |
| 105 | HFTBM50 | 631 | #55: Production of IL-10 and activation of T-cells. |
| 106 | HFTDZ36 | 632 | #1: Stimulation of insulin secretion from pancreatic beta cells. |
| 106 | HFTDZ36 | 632 | #39: Protection from Endothelial Cell Apoptosis. |
| 108 | HFVGE32 | 634 | #10: Activation of Endothelial Cell p38 or JNK Signaling Pathway. |
| 109 | HFXBL33 | 635 | #19: Regulation of transcription via DMEF1 response element in adipocytes and pre-adipocytes |
| 110 | HFXDN63 | 636 | #13: Activation of transcription through serum response element in immune cells (such as natural killer cells). |
| 111 | HFXJX44 | 637 | #1: Stimulation of insulin secretion from pancreatic beta cells. |
| 112 | HFXKJ03 | 638 | #13: Activation of transcription through serum response element in immune cells (such as natural killer cells). |
| 112 | HFXKJ03 | 638 | #70: Activation of Transcription |
| 113 | HFXKT05 | 639 | #44: Myoblast cell proliferation |
| 114 | HGBHI35 | 640 | #1: Stimulation of insulin secretion from pancreatic beta cells. |
| 114 | HGBHI35 | 640 | #18: Inhibition of squalene synthetase gene transcription. |
| 115 | HGBIB74 | 641 | #12b: Activation of transcription through NFAT response element in immune cells (such as natural killer cells). |
| 115 | HGBIB74 | 641 | #13: Activation of transcription through serum response element in immune cells (such as natural killer cells). |
| 115 | HGBIB74 | 641 | #38: Activation of transcription through GAS response element in immune cells (such as T-cells). |
| 116 | HGLAF75 | 642 | #4: Regulation of viability and proliferation of pancreatic beta cells. |
| 116 | HGLAF75 | 642 | #9b: Regulation of transcription of Malic Enzyme in hepatocytes |
| 116 | HGLAF75 | 642 | #31: Insulin Secretion |
| 117 | HGLAL82 | 643 | #2: Activation of transcription through serum response element in immune cells (such as T-cells). |
| 118 | HHEMA59 | 644 | #13: Activation of transcription through serum response element in immune cells (such as natural killer cells). |
| 118 | HHEMA59 | 644 | #43: Production of RANTES in endothelial cells (such as human umbilical vein endothelial cells (HUVEC)) |
| 120 | HHEPM33 | 646 | #6: Activation of transcription through cAMP response element (CRE) in pre-adipocytes. |
| 120 | HHEPM33 | 646 | #12b: Activation of transcription through NFAT response element in immune cells (such as natural killer cells). |
| 120 | HHEPM33 | 646 | #13: Activation of transcription through serum response element in immune cells (such as natural killer cells). |
| 120 | HHEPM33 | 646 | #34: Activation of transcription through GATA-3 response element in immune cells (such as mast cells). |
| 120 | HHEPM33 | 646 | #38: Activation of transcription through GAS response element in immune cells (such as T-cells). |
| 120 | HHEPM33 | 646 | #47: Activation of transcription through NFAT response element in immune cells (such as mast cells). |
| 121 | HHFBY53 | 647 | #10: Activation of Endothelial Cell p38 or JNK Signaling Pathway. |
| 122 | HHFGR93 | 648 | #36: Activation of transcription through NFKB response element in epithelial cells (such as HELA cells). |
| 122 | HHFGR93 | 648 | #42: Calcium flux in immune cells (such as monocytes) |
| 122 | HHFGR93 | 648 | #45: Production of MCP-1 |
| 122 | HHFGR93 | 648 | #71: Production of RANTES in bronchial epithelium cells |
| 123 | HHGCG53 | 649 | #1: Stimulation of insulin secretion from pancreatic beta cells. |
| 124 | HHGCM76 | 650 | #1: Stimulation of insulin secretion from pancreatic beta cells. |
| 124 | HHGCM76 | 650 | #30: Production of ICAM-1 |
| 125 | HHGDF16 | 651 | #2: Activation of transcription through serum response element in immune cells (such as T-cells). |
| 125 | HHGDF16 | 651 | #14: Activation of transcription through AP1 response element in immune cells (such as T-cells). |
| 126 | HHPDX20 | 652 | #6: Activation of transcription through cAMP response element (CRE) in pre-adipocytes. |
| 126 | HHPDX20 | 652 | #20: Endothelial Cell Apoptosis |
| 127 | HHPEN62 | 653 | #5: Proliferation of pre-adipose cells (such as 3T3-L1 cells) |
| 127 | HHPEN62 | 653 | #25: Stimulation of Calcium Flux in pancreatic beta cells. |
| 127 | HHPEN62 | 653 | #37: Activation or inhibition of transcription through NFKB response element in immune cells (such as basophils). |
| 128 | HHPGO40 | 654 | #5: Proliferation of pre-adipose cells (such as 3T3-L1 cells) |
| 128 | HHPGO40 | 654 | #72: Proliferation of immune cells (such as the HMC-1 human mast cell line) |
| 129 | HHSDX28 | 655 | #2: Activation of transcription through serum response element in immune cells (such as T-cells). |
| 129 | HHSDX28 | 655 | #34: Activation of transcription through GATA-3 response element in immune cells (such as mast cells). |
| 129 | HHSDX28 | 655 | #67: Production of TNF alpha by dendritic cells |
| 130 | HILCF66 | 656 | #10: Activation of Endothelial Cell p38 or JNK Signaling Pathway. |
| 131 | HJABB94 | 657 | #18: Inhibition of squalene synthetase gene transcription. |
| 131 | HJABB94 | 657 | #31: Insulin Secretion |
| 132 | HJACG02 | 658 | #5: Proliferation of pre-adipose cells (such as 3T3-L1 cells) |
| 132 | HJACG02 | 658 | #37: Activation or inhibition of transcription through NFKB response element in immune cells (such as basophils). |
| 133 | HJACG30 | 659 | #1: Stimulation of insulin secretion from pancreatic beta cells. |
| 133 | HJACG30 | 659 | #2: Activation of transcription through serum response element in immune cells (such as T-cells). |
| 133 | HJACG30 | 659 | #18: Inhibition of squalene synthetase gene transcription. |
| 134 | HJBCY35 | 660 | #4: Regulation of viability and proliferation of pancreatic beta cells. |
| 134 | HJBCY35 | 660 | #64: Activation of Skeletal Mucle Cell PI3 Kinase Signalling Pathway |
| 135 | HJMBI18 | 661 | #13: Activation of transcription through serum response element in immune cells (such as natural killer cells). |
| 136 | HJMBM38 | 662 | #20: Endothelial Cell Apoptosis |
| 137 | HJPAD75 | 663 | #5: Proliferation of pre-adipose cells (such as 3T3-L1 cells) |
| 137 | HJPAD75 | 663 | #8: Production of IL-6 |
| 137 | HJPAD75 | 663 | #29: Activation of T-Cell p38 or JNK Signaling Pathway. |
| 137 | HJPAD75 | 663 | #57: Regulation of transcription through the FAS promoter element in hepatocytes |
| 138 | HJPCP42 | 664 | #37: Activation or inhibition of transcription through NFKB response element in immune cells (such as basophils). |
| 138 | HJPCP42 | 664 | #39: Protection from Endothelial Cell Apoptosis. |
| 139 | HKABI84 | 665 | #16: Activation of transcription through NFKB response element in immune cells (such as T-cells). |
| 139 | HKABI84 | 665 | #20: Endothelial Cell Apoptosis |
| 139 | HKABI84 | 665 | #73: Activation of transcription through NFAT response in immune cells (such as T-cells). |
| 140 | HKABZ65 | 666 | #8: Production of IL-6 |
| 140 | HKABZ65 | 666 | #10: Activation of Endothelial Cell p38 or JNK Signaling Pathway. |
| 140 | HKABZ65 | 666 | #65: Regulation of apoptosis in pancreatic beta cells. |
| 141 | HKACB56 | 667 | #10: Activation of Endothelial Cell p38 or JNK Signaling Pathway. |
| 141 | HKACB56 | 667 | #43: Production of RANTES in endothelial cells (such as human umbilical vein endothelial cells (HUVEC)) |
| 141 | HKACB56 | 667 | #44: Myoblast cell proliferation |
| 141 | HKACB56 | 667 | #49: Production of VCAM in endothelial cells (such as human umbilical vein endothelial cells (HUVEC)) |
| 141 | HKACB56 | 667 | #74: Production of IL-5 |
| 142 | HKACD58 | 668 | #13: Activation of transcription through serum response element in immune cells (such as natural killer cells). |
| 142 | HKACD58 | 668 | #19: Regulation of transcription via DMEF1 response element in adipocytes and pre-adipocytes |
| 143 | HKACH44 | 669 | #10: Activation of Endothelial Cell p38 or JNK Signaling Pathway. |
| 144 | HKAEV06 | 670 | #4b: Regulation of viability and proliferation of pancreatic beta cells. |
| 144 | HKAEV06 | 670 | #14: Activation of transcription through AP1 response element in immune cells (such as T-cells). |
| 144 | HKAEV06 | 670 | #70: Activation of Transcription |
| 145 | HKAFT66 | 671 | #31: Insulin Secretion |
| 145 | HKAFT66 | 671 | #34: Activation of transcription through GATA-3 response element in immune cells (such as mast cells). |
| 145 | HKAFT66 | 671 | #44: Myoblast cell proliferation |
| 145 | HKAFT66 | 671 | #47: Activation of transcription through NFAT response element in immune cells (such as mast cells). |
| 146 | HKBIE57 | 672 | #4: Regulation of viability and proliferation of pancreatic beta cells. |
| 146 | HKBIE57 | 672 | #43: Production of RANTES in endothelial cells (such as human umbilical vein endothelial cells (HUVEC)) |
| 147 | HKFBC53 | 673 | #9: Regulation of transcription of Malic Enzyme in adipocytes |
| 148 | HKGDL36 | 674 | #4: Regulation of viability and proliferation of pancreatic beta cells. |
| 148 | HKGDL36 | 674 | #5: Proliferation of pre-adipose cells (such as 3T3-L1 cells) |
| 148 | HKGDL36 | 674 | #43: Production of RANTES in endothelial cells (such as human umbilical vein endothelial cells (HUVEC)) |
| 148 | HKGDL36 | 674 | #49: Production of VCAM in endothelial cells (such as human umbilical vein endothelial cells (HUVEC)) |
| 149 | HKISB57 | 675 | #3: Activation of JNK Signaling Pathway in immune cells (such as eosinophils). |
| 149 | HKISB57 | 675 | #9: Regulation of transcription of Malic Enzyme in adipocytes |
| 150 | HKMLM11 | 676 | #44: Myoblast cell proliferation |
| 151 | HKMLP68 | 677 | #2: Activation of transcription through serum response element in immune cells (such as T-cells). |
| 152 | HKMMD13 | 678 | #18: Inhibition of squalene synthetase gene transcription. |
| 152 | HKMMD13 | 678 | #39: Protection from Endothelial Cell Apoptosis. |
| 153 | HKMMW74 | 679 | #4: Regulation of viability and proliferation of pancreatic beta cells. |
| 154 | HKMND01 | 680 | #10: Activation of Endothelial Cell p38 or JNK Signaling Pathway. |
| 155 | HLDBE54 | 681 | #39: Protection from Endothelial Cell Apoptosis. |
| 156 | HLDBX13 | 682 | #10: Activation of Endothelial Cell p38 or JNK Signaling Pathway. |
| 156 | HLDBX13 | 682 | #67: Production of TNF alpha by dendritic cells |
| 157 | HLDON23 | 683 | #27: Regulation of transcription through the PEPCK promoter in hepatocytes |
| 157 | HLDON23 | 683 | #30: Production of ICAM-1 |
| 157 | HLDON23 | 683 | #49: Production of VCAM in endothelial cells (such as human umbilical vein endothelial cells (HUVEC)) |
| 157 | HLDON23 | 683 | #55: Production of IL-10 and activation of T-cells. |
| 158 | HLDQC46 | 684 | #2: Activation of transcription through serum response element in immune cells (such as T-cells). |
| 159 | HLDQR62 | 685 | #4: Regulation of viability and proliferation of pancreatic beta cells. |
| 159 | HLDQR62 | 685 | #7: Activation of transcription through cAMP response element in immune cells (such as T-cells). |
| 160 | HLDQU79 | 686 | #2: Activation of transcription through serum response element in immune cells (such as T-cells). |
| 160 | HLDQU79 | 686 | #4: Regulation of viability and proliferation of pancreatic beta cells. |
| 161 | HLDRM43 | 687 | #10: Activation of Endothelial Cell p38 or JNK Signaling Pathway. |
| 161 | HLDRM43 | 687 | #11: Activation of transcription through CD28 response element in immune cells (such as T-cells). |
| 161 | HLDRM43 | 687 | #13: Activation of transcription through serum response element in immune cells (such as natural killer cells). |
| 161 | HLDRM43 | 687 | #43: Production of RANTES in endothelial cells (such as human umbilical vein endothelial cells (HUVEC)) |
| 162 | HLDRP33 | 688 | #2: Activation of transcription through serum response element in immune cells (such as T-cells). |
| 163 | HLHAL68 | 689 | #4: Regulation of viability and proliferation of pancreatic beta cells. |
| 164 | HLHFP03 | 690 | #29: Activation of T-Cell p38 or JNK Signaling Pathway. |
| 164 | HLHFP03 | 690 | #49: Production of VCAM in endothelial cells (such as human umbilical vein endothelial cells (HUVEC)) |
| 165 | HLIBD68 | 691 | #1: Stimulation of insulin secretion from pancreatic beta cells. |
| 165 | HLIBD68 | 691 | #8: Production of IL-6 |
| 165 | HLIBD68 | 691 | #67: Production of TNF alpha by dendritic cells |
| 165 | HLIBD68 | 691 | #75: Production of MIP1alpha |
| 166 | HLICQ90 | 692 | #1: Stimulation of insulin secretion from pancreatic beta cells. |
| 166 | HLICQ90 | 692 | #2: Activation of transcription through serum response element in immune cells (such as T-cells). |
| 166 | HLICQ90 | 692 | #25: Stimulation of Calcium Flux in pancreatic beta cells. |
| 166 | HLICQ90 | 692 | #67: Production of TNF alpha by dendritic cells |
| 167 | HLMBO76 | 693 | #13: Activation of transcription through serum response element in immune cells (such as natural killer cells). |
| 168 | HLTEJ06 | 694 | #2: Activation of transcription through serum response element in immune cells (such as T-cells). |
| 169 | HLTHR66 | 695 | #1: Stimulation of insulin secretion from pancreatic beta cells. |
| 170 | HLTIP94 | 696 | #1: Stimulation of insulin secretion from pancreatic beta cells. |
| 171 | HLWAA17 | 697 | #9: Regulation of transcription of Malic Enzyme in adipocytes |
| 171 | HLWAA17 | 697 | #30: Production of ICAM-1 |
| 172 | HLWAA88 | 698 | #10: Activation of Endothelial Cell p38 or JNK Signaling Pathway. |
| 172 | HLWAA88 | 698 | #43: Production of RANTES in endothelial cells (such as human umbilical vein endothelial cells (HUVEC)) |
| 173 | HLWAD77 | 699 | #5: Proliferation of pre-adipose cells (such as 3T3-L1 cells) |
| 173 | HLWAD77 | 699 | #76: Activation of transcription through the EGR (Early Growth Response) element in immune cells (such as B-cells). |
| 174 | HLWAE11 | 700 | #2: Activation of transcription through serum response element in immune cells (such as T-cells). |
| 174 | HLWAE11 | 700 | #12c: Activation of transcription through NFKB response element in immune cells (such as natural killer cells). |
| 174 | HLWAE11 | 700 | #42: Calcium flux in immune cells (such as monocytes) |
| 174 | HLWAE11 | 700 | #49: Production of VCAM in endothelial cells (such as human umbilical vein endothelial cells (HUVEC)) |
| 175 | HLWAO22 | 701 | #13: Activation of transcription through serum response element in immune cells (such as natural killer cells). |
| 175 | HLWAO22 | 701 | #45: Production of MCP-1 |
| 175 | HLWAO22 | 701 | #73: Activation of transcription through NFAT response in immune cells (such as T-cells). |
| 176 | HLWBH18 | 702 | #10: Activation of Endothelial Cell p38 or JNK Signaling Pathway. |
| 176 | HLWBH18 | 702 | #18: Inhibition of squalene synthetase gene transcription. |
| 177 | HLWBY76 | 703 | #2: Activation of transcription through serum response element in immune cells (such as T-cells). |
| 178 | HLYAC95 | 704 | #1: Stimulation of insulin secretion from pancreatic beta cells. |
| 178 | HLYAC95 | 704 | #21: Production of IFNgamma using a T cells |
| 179 | HMADK33 | 705 | #27: Regulation of transcription through the PEPCK promoter in hepatocytes |
| 180 | HMADS41 | 706 | #24: Regulation of apoptosis of immune cells (such as mast cells). |
| 180 | HMADS41 | 706 | #39: Protection from Endothelial Cell Apoptosis. |
| 180 | HMADS41 | 706 | #40: Activation of Hepatocyte ERK Signaling Pathway |
| 181 | HMAMI15 | 707 | #25: Stimulation of Calcium Flux in pancreatic beta cells. |
| 181 | HMAMI15 | 707 | #70: Activation of Transcription |
| 182 | HMCFY13 | 708 | #19: Regulation of transcription via DMEF1 response element in adipocytes and pre-adipocytes |
| 183 | HMDAB56 | 709 | #27: Regulation of transcription through the PEPCK promoter in hepatocytes |
| 184 | HMDAM24 | 710 | #39: Protection from Endothelial Cell Apoptosis. |
| 185 | HMEAI48 | 711 | #2: Activation of transcription through serum response element in immune cells (such as T-cells). |
| 185 | HMEAI48 | 711 | #43: Production of RANTES in endothelial cells (such as human umbilical vein endothelial cells (HUVEC)) |
| 186 | HMEED18 | 712 | #25: Stimulation of Calcium Flux in pancreatic beta cells. |
| 186 | HMEED18 | 712 | #43: Production of RANTES in endothelial cells (such as human umbilical vein endothelial cells (HUVEC)) |
| 187 | HMEFT54 | 713 | #65: Regulation of apoptosis in pancreatic beta cells. |
| 188 | HMEGF92 | 714 | #28: Production of ICAM in endothelial cells (such as human umbilical vein endothelial cells (HUVEC)) |
| 188 | HMEGF92 | 714 | #65: Regulation of apoptosis in pancreatic beta cells. |
| 189 | HMSDL37 | 715 | #4: Regulation of viability and proliferation of pancreatic beta cells. |
| 190 | HMSFI26 | 716 | #1: Stimulation of insulin secretion from pancreatic beta cells. |
| 191 | HMSGT42 | 717 | #10: Activation of Endothelial Cell p38 or JNK Signaling Pathway. |
| 192 | HMSHM14 | 718 | #2: Activation of transcription through serum response element in immune cells (such as T-cells). |
| 192 | HMSHM14 | 718 | #7: Activation of transcription through cAMP response element in immune cells (such as T-cells). |
| 192 | HMSHM14 | 718 | #45: Production of MCP-1 |
| 193 | HMSHS36 | 719 | #3: Activation of JNK Signaling Pathway in immune cells (such as eosinophils). |
| 193 | HMSHS36 | 719 | #12b: Activation of transcription through NFAT response element in immune cells (such as natural killer cells). |
| 193 | HMSHS36 | 719 | #13: Activation of transcription through serum response element in immune cells (such as natural killer cells). |
| 194 | HMSKC04 | 720 | #11: Activation of transcription through CD28 response element in immune cells (such as T-cells). |
| 194 | HMSKC04 | 720 | #12b: Activation of transcription through NFAT response element in immune cells (such as natural killer cells). |
| 194 | HMSKC04 | 720 | #13: Activation of transcription through serum response element in immune cells (such as natural killer cells). |
| 194 | HMSKC04 | 720 | #14: Activation of transcription through AP1 response element in immune cells (such as T-cells). |
| 194 | HMSKC04 | 720 | #14b: Activation of transcription through AP1 response element in immune cells (such as T-cells). |
| 194 | HMSKC04 | 720 | #15: Activation of transcription through NFAT response element in immune cells (such as T-cells). |
| 194 | HMSKC04 | 720 | #16b: Activation of transcription through NFKB response element in immune cells (such as T-cells). |
| 194 | HMSKC04 | 720 | #17: Activation of transcription through STAT6 response element in immune cells (such as T-cells). |
| 194 | HMSKC04 | 720 | #34: Activation of transcription through GATA-3 response element in immune cells (such as mast cells). |
| 194 | HMSKC04 | 720 | #38: Activation of transcription through GAS response element in immune cells (such as T-cells). |
| 194 | HMSKC04 | 720 | #43: Production ot RANTES in endothelial cells (such as human umbilical vein endothelial cells (HUVEC)) |
| 194 | HMSKC04 | 720 | #47: Activation of transcription through NFAT response element in immune cells (such as mast cells). |
| 195 | HMUAP70 | 721 | #2: Activation of transcription through serum response element in immune cells (such as T-cells). |
| 196 | HMVBS81 | 722 | #1: Stimulation of insulin secretion from pancreatic beta cells. |
| 197 | HMWDC28 | 723 | #1: Stimulation of insulin secretion from pancreatic beta cells. |
| 198 | HMWFT65 | 724 | #19: Regulation of transcription via DMEF1 response element in adipocytes and pre-adipocytes |
| 199 | HMWGY65 | 725 | #10: Activation of Endothelial Cell p38 or JNK Signaling Pathway. |
| 199 | HMWGY65 | 725 | #18: Inhibition of squalene synthetase gene transcription. |
| 199 | HMWGY65 | 725 | #29: Activation of T-Cell p38 or JNK Signaling Pathway. |
| 200 | HNEAC05 | 726 | #5: Proliferation of pre-adipose cells (such as 3T3-L1 cells) |
| 200 | HNEAC05 | 726 | #13: Activation of transcription through serum response element in immune cells (such as natural killer cells). |
| 201 | HNEEB45 | 727 | #2: Activation of transcription through serum response element in immune cells (such as T-cells). |
| 201 | HNEEB45 | 727 | #6: Activation of transcription through cAMP response element (CRE) in pre-adipocytes. |
| 201 | HNEEB45 | 727 | #49: Production of VCAM in endothelial cells (such as human umbilical vein endothelial cells (HUVEC)) |
| 201 | HNEEB45 | 727 | #53: Activation of transcription through NFKB response element in immune cells (such as EOL1 cells). |
| 202 | HNEEE24 | 728 | #31: Insulin Secretion |
| 203 | HNFFC43 | 729 | #9: Regulation of transcription of Malic Enzyme in adipocytes |
| 203 | HNFFC43 | 729 | #19: Regulation of transcription via DMEF1 response element in adipocytes and pre-adipocytes |
| 203 | HNFFC43 | 729 | #29: Activation of T-Cell p38 or JNK Signaling Pathway. |
| 203 | HNFFC43 | 729 | #72: Proliferation of immune cells (such as the HMC-1 human mast cell line) |
| 204 | HNFIY77 | 730 | #31: Insulin Secretion |
| 205 | HNFJF07 | 731 | #1: Stimulation of insulin secretion from pancreatic beta cells. |
| 205 | HNFJF07 | 731 | #2: Activation of transcription through serum response element in immune cells (such as T-cells). |
| 205 | HNFJF07 | 731 | #4: Regulation of viability and proliferation of pancreatic beta cells. |
| 205 | HNFJF07 | 731 | #19: Regulation of transcription via DMEF1 response element in adipocytes and pre-adipocytes |
| 206 | HNGAK47 | 732 | #2: Activation of transcription through serum response element in immune cells (such as T-cells). |
| 206 | HNGAK47 | 732 | #20: Endothelial Cell Apoptosis |
| 207 | HNGBC07 | 733 | #13: Activation of transcription through serum response element in immune cells (such as natural killer cells). |
| 208 | HNGDG40 | 734 | #5: Proliferation of pre-adipose cells (such as 3T3-L1 cells) |
| 208 | HNGDG40 | 734 | #10: Activation of Endothelial Cell p38 or JNK Signaling Pathway. |
| 209 | HNGEP09 | 735 | #2: Activation of transcription through serum response element in immune cells (such as T-cells). |
| 210 | HNGFR31 | 736 | #31: Insulin Secretion |
| 211 | HNGIJ31 | 737 | #1: Stimulation of insulin secretion from pancreatic beta cells. |
| 211 | HNGIJ31 | 737 | #7: Activation of transcription through cAMP response element in immune cells (such as T-cells). |
| 211 | HNGIJ31 | 737 | #45: Production of MCP-1 |
| 211 | HNGIJ31 | 737 | #64: Activation of Skeletal Mucle Cell PI3 Kinase Signalling Pathway |
| 212 | HNGJE50 | 738 | #8: Production of IL-6 |
| 212 | HNGJE50 | 738 | #31: Insulin Secretion |
| 213 | HNGJT54 | 739 | #2: Activation of transcription through serum response element in immune cells (such as T-cells). |
| 213 | HNGJT54 | 739 | #7: Activation of transcription through cAMP response element in immune cells (such as T-cells). |
| 213 | HNGJT54 | 739 | #45: Production of MCP-1 |
| 214 | HNGND37 | 740 | #27: Regulation of transcription through the PEPCK promoter in hepatocytes |
| 215 | HNGOI12 | 741 | #25: Stimulation of Calcium Flux in pancreatic beta cells. |
| 215 | HNGOI12 | 741 | #55: Production of IL-10 and activation of T-cells. |
| 216 | HNGOM56 | 742 | #2b: Activation of transcription through serum response element in immune cells (such as T-cells). |
| 217 | HNGOU56 | 743 | #39: Protection from Endothelial Cell Apoptosis. |
| 218 | HNGOW62 | 744 | #39: Protection from Endothelial Cell Apoptosis. |
| 219 | HNHEU93 | 745 | #1: Stimulation of insulin secretion from pancreatic beta cells. |
| 219 | HNHEU93 | 745 | #49: Production of VCAM in endothelial cells (such as human umbilical vein endothelial cells (HUVEC)) |
| 220 | HNHFM14 | 746 | #18: Inhibition of squalene synthetase gene transcription. |
| 220 | HNHFM14 | 746 | #25: Stimulation of Calcium Flux in pancreatic beta cells. |
| 222 | HNHNB29 | 748 | #27: Regulation of transcription through the PEPCK promoter in hepatocytes |
| 223 | HNHOD46 | 749 | #2: Activation of transcription through serum response element in immune cells (such as T-cells). |
| 223 | HNHOD46 | 749 | #5: Proliferation of pre-adipose cells (such as 3T3-L1 cells) |
| 223 | HNHOD46 | 749 | #6: Activation of transcription through cAMP response element (CRE) in pre-adipocytes. |
| 223 | HNHOD46 | 749 | #7b: Activation of transcription through cAMP response element in immune cells (such as T-cells). |
| 223 | HNHOD46 | 749 | #7: Activation of transcription through cAMP response element in immune cells (such as T-cells). |
| 223 | HNHOD46 | 749 | #8: Production of IL-6 |
| 223 | HNHOD46 | 749 | #11: Activation of transcription through CD28 response element in immune cells (such as T-cells). |
| 223 | HNHOD46 | 749 | #12c: Activation of transcription through NFKB response element in immune cells (such as natural killer cells). |
| 223 | HNHOD46 | 749 | #13: Activation of transcription through serum response element in immune cells (such as natural killer cells). |
| 223 | HNHOD46 | 749 | #14: Activation of transcription through AP1 response element in immune cells (such as T-cells). |
| 223 | HNHOD46 | 749 | #15: Activation of transcription through NFAT response element in immune cells (such as T-cells). |
| 223 | HNHOD46 | 749 | #16b: Activation of transcription through NFKB response element in immune cells (such as T-cells). |
| 223 | HNHOD46 | 749 | #16: Activation of transcription through NFKB response element in immune cells (such as T-cells). |
| 223 | HNHOD46 | 749 | #17: Activation of transcription through STAT6 response element in immune cells (such as T-cells). |
| 223 | HNHOD46 | 749 | #19: Regulation of transcription via DMEF1 response element in adipocytes and pre-adipocytes |
| 223 | HNHOD46 | 749 | #22: Activation of Adipocyte ERK Signaling Pathway |
| 223 | HNHOD46 | 749 | #34: Activation of transcription through GATA-3 response element in immune cells (such as mast cells). |
| 223 | HNHOD46 | 749 | #38: Activation of transcription through GAS response element in immune cells (such as T-cells). |
| 223 | HNHOD46 | 749 | #38b: Activation of transcription through GAS response element in immune cells (such as T-cells). |
| 223 | HNHOD46 | 749 | #46: Activation of transcription through serum response element in pre-adipocytes. |
| 223 | HNHOD46 | 749 | #47: Activation of transcription through NFAT response element in immune cells (such as mast cells). |
| 223 | HNHOD46 | 749 | #51: Activation of transcription through NFKB response element in immune cells (such as basophils). |
| 223 | HNHOD46 | 749 | #73: Activation of transcription through NFAT response in immune cells (such as T-cells). |
| 223 | HNHOD46 | 749 | #75: Production of MIP1alpha |
| 223 | HNHOD46 | 749 | #77: SEAP in HIB/CRE |
| 223 | HNHOD46 | 749 | #78: SEAP in 293/ISRE |
| 223 | HNHOD46 | 749 | #79: SEAP in Jurkat-AP1 |
| 223 | HNHOD46 | 749 | #80: IL-10 in Human T-cell 2B9 |
| 224 | HNHOG73 | 750 | #6: Activation of transcription through cAMP response element (CRE) in pre-adipocytes. |
| 224 | HNHOG73 | 750 | #13: Activation of transcription through serum response element in immune cells (such as natural killer cells). |
| 224 | HNHOG73 | 750 | #51: Activation of transcription through NFKB response element in immune cells (such as basophils). |
| 224 | HNHOG73 | 750 | #78: SEAP in 293/ISRE |
| 225 | HNTBI26 | 751 | #65: Regulation of apoptosis in pancreatic beta cells. |
| 225 | HNTBI26 | 751 | #81: IL-13 in HMC |
| 225 | HNTBI26 | 751 | #82: IL-10 in Human T-cell 2B9 |
| 225 | HNTBI26 | 751 | #83: Caspase (+paclitaxel) in SW480 |
| 225 | HNTBI26 | 751 | #84: IL-8 in Normal Human Bronchial Epitheliae |
| 225 | HNTBI26 | 751 | #85: Production of IL-8 by by endothelial cells (such as Human Umbilical Cord Endothelial Cells). |
| 226 | HNTBL27 | 752 | #55: Production of IL-10 and activation of T-cells. |
| 226 | HNTBL27 | 752 | #65: Regulation of apoptosis in pancreatic beta cells. |
| 227 | HNTCE26 | 753 | #1: Stimulation of insulin secretion from pancreatic beta cells. |
| 227 | HNTCE26 | 753 | #30: Production of ICAM-1 |
| 227 | HNTCE26 | 753 | #67: Production of TNF alpha by dendritic cells |
| 227 | HNTCE26 | 753 | #86: CD69 in Human T cells |
| 228 | HNTNI01 | 754 | #6: Activation of transcription through cAMP response element (CRE) in pre-adipocytes. |
| 228 | HNTNI01 | 754 | #9: Regulation of transcription of Malic Enzyme in adipocytes |
| 228 | HNTNI01 | 754 | #12b: Activation of transcription through NFAT response element in immune cells (such as natural killer cells). |
| 228 | HNTNI01 | 754 | #19: Regulation of transcription via DMEF1 response element in adipocytes and pre-adipocytes |
| 228 | HNTNI01 | 754 | #34: Activation of transcription through GATA-3 response element in immune cells (such as mast cells). |
| 228 | HNTNI01 | 754 | #38: Activation of transcription through GAS response element in immune cells (such as T-cells). |
| 228 | HNTNI01 | 754 | #46: Activation of transcription through serum response element in pre-adipocytes. |
| 228 | HNTNI01 | 754 | #47: Activation of transcription through NFAT response element in immune cells (such as mast cells). |
| 228 | HNTNI01 | 754 | #48: Activation of transcription through NFKB response element in immune cells (such as mast cells). |
| 228 | HNTNI01 | 754 | #51: Activation of transcription through NFKB response element in immune cells (such as basophils). |
| 228 | HNTNI01 | 754 | #52: Activation of transcription through GAS response element in immune cells (such as eosinophils). |
| 228 | HNTNI01 | 754 | #53: Activation of transcription through NFKB response element in immune cells (such as EOL1 cells). |
| 228 | HNTNI01 | 754 | #54: Activation of transcription through STAT6 response element in immune cells (such as mast cells). |
| 228 | HNTNI01 | 754 | #87: SEAP in Molt4/SRE |
| 228 | HNTNI01 | 754 | #88: SEAP in NK16/STAT6 |
| 229 | HODDF13 | 755 | #18: Inhibition of squalene synthetase gene transcription. |
| 229 | HODDF13 | 755 | #34: Activation of transcription through GATA-3 response element in immune cells (such as mast cells). |
| 229 | HODDF13 | 755 | #47: Activation of transcription through NFAT response element in immune cells (such as mast cells). |
| 229 | HODDF13 | 755 | #49: Production of VCAM in endothelial cells (such as human umbilical vein endothelial cells (HUVEC)) |
| 229 | HODDF13 | 755 | #57: Regulation of transcription through the FAS promoter element in hepatocytes |
| 229 | HODDF13 | 755 | #70: Activation of Transcription |
| 229 | HODDF13 | 755 | #89: SEAP in Jurkat/IL4 promoter (antiCD3 co-stim) |
| 230 | HODDN92 | 756 | #8: Production of IL-6 |
| 230 | HODDN92 | 756 | #10: Activation of Endothelial Cell p38 or JNK Signaling Pathway. |
| 230 | HODDN92 | 756 | #34: Activation of transcription through GATA-3 response element in immune cells (such as mast cells). |
| 230 | HODDN92 | 756 | #45: Production of MCP-1 |
| 230 | HODDN92 | 756 | #47: Activation of transcription through NFAT response element in immune cells (such as mast cells). |
| 230 | HODDN92 | 756 | #57: Regulation of transcription through the FAS promoter element in hepatocytes |
| 230 | HODDN92 | 756 | #75: Production of MIP1alpha |
| 231 | HODFN71 | 757 | #2b: Activation of transcription through serum response element in immune cells (such as T-cells). |
| 231 | HODFN71 | 757 | #11: Activation of transcription through CD28 response element in immune cells (such as T-cells). |
| 231 | HODFN71 | 757 | #12b: Activation of transcription through NFAT response element in immune cells (such as natural killer cells). |
| 231 | HODFN71 | 757 | #13: Activation of transcription through serum response element in immune cells (such as natural killer cells). |
| 231 | HODFN71 | 757 | #16b: Activation of transcription through NFKB response element in immune cells (such as T-cells). |
| 231 | HODFN71 | 757 | #18: Inhibition of squalene synthetase gene transcription. |
| 231 | HODFN71 | 757 | #87: SEAP in Molt4/SRE |
| 231 | HODFN71 | 757 | #88: SEAP in NK16/STAT6 |
| 231 | HODFN71 | 757 | #90: IL-2 in Human T-cell 293T |
| 232 | HODGE68 | 758 | #2b: Activation of transcription through serum response element in immune cells (such as T-cells). |
| 233 | HOEDB32 | 759 | #13: Activation of transcription through serum response element in immune cells (such as natural killer cells). |
| 233 | HOEDB32 | 759 | #17: Activation of transcription through STAT6 response element in immune cells (such as T-cells). |
| 233 | HOEDB32 | 759 | #67: Production of TNF alpha by dendritic cells |
| 233 | HOEDB32 | 759 | #75: Production of MIP1alpha |
| 233 | HOEDB32 | 759 | #91: MCP-1 in Eol-1 |
| 234 | HOFMQ33 | 760 | #4b: Regulation of viability and proliferation of pancreatic beta cells. |
| 234 | HOFMQ33 | 760 | #87: SEAP in Molt4/SRE |
| 235 | HOFMT75 | 761 | #10: Activation of Endothelial Cell p38 or JNK Signaling Pathway. |
| 235 | HOFMT75 | 761 | #29: Activation of T-Cell p38 or JNK Signaling Pathway. |
| 236 | HOFNY91 | 762 | #2: Activation of transcription through serum response element in immune cells (such as T-cells). |
| 236 | HOFNY91 | 762 | #49: Production of VCAM in endothelial cells (such as human umbilical vein endothelial cells (HUVEC)) |
| 237 | HOFOC73 | 763 | #44: Myoblast cell proliferation |
| 237 | HOFOC73 | 763 | #92: Caspase (+camptothecin) in SW480 |
| 238 | HOGAW62 | 764 | #10: Activation of Endothelial Cell p38 or JNK Signaling Pathway. |
| 239 | HOHCH55 | 765 | #2: Activation of transcription through serum response element in immune cells (such as T-cells). |
| 240 | HOQBJ82 | 766 | #18: Inhibition of squalene synthetase gene transcription. |
| 240 | HOQBJ82 | 766 | #31: Insulin Secretion |
| 241 | HOSBY40 | 767 | #57: Regulation of transcription through the FAS promoter element in hepatocytes |
| 241 | HOSBY40 | 767 | #93: SEAP in UMR-106 |
| 242 | HOSDJ25 | 768 | #12b: Activation of transcription through NFAT response element in immune cells (such as natural killer cells). |
| 242 | HOSDJ25 | 768 | #30b: Production of ICAM-1 |
| 242 | HOSDJ25 | 768 | #65: Regulation of apoptosis in pancreatic beta cells. |
| 242 | HOSDJ25 | 768 | #77: SEAP in HIB/CRE |
| 243 | HOSFD58 | 769 | #29: Activation of T-Cell p38 or JNK Signaling Pathway. |
| 244 | HPDDC77 | 770 | #29: Activation of T-Cell p38 or JNK Signaling Pathway. |
| 244 | HPDDC77 | 770 | #83: Caspase (+paclitaxel) in SW480 |
| 244 | HPDDC77 | 770 | #94: IL-2 in Human T cells |
| 245 | HPEAD79 | 771 | #19: Regulation of transcription via DMEF1 response element in adipocytes and pre-adipocytes |
| 246 | HPFCL43 | 772 | #2: Activation of transcription through serum response element in immune cells (such as T-cells). |
| 246 | HPFCL43 | 772 | #92: Caspase (+camptothecin) in SW480 |
| 246 | HPFCL43 | 772 | #95: SEAP in ATP-3T3-L1 |
| 247 | HPIBO15 | 773 | #4: Regulation of viability and proliferation of pancreatic beta cells. |
| 247 | HPIBO15 | 773 | #8: Production of IL-6 |
| 247 | HPIBO15 | 773 | #96: Glucose Production in H4IIE |
| 248 | HPICB53 | 774 | #20: Endothelial Cell Apoptosis |
| 249 | HPJBI33 | 775 | #1: Stimulation of insulin secretion from pancreatic beta cells. |
| 249 | HPJBI33 | 775 | #97: SEAP in SW480 |
| 250 | HPJBK12 | 776 | #10: Activation of Endothelial Cell p38 or JNK Signaling Pathway. |
| 250 | HPJBK12 | 776 | #24: Regulation of apoptosis of immune cells (such as mast cells). |
| 250 | HPJBK12 | 776 | #31: Insulin Secretion |
| 251 | HPMDK28 | 777 | #25: Stimulation of Calcium Flux in pancreatic beta cells. |
| 251 | HPMDK28 | 777 | #89: SEAP in Jurkat/IL4 promoter (antiCD3 co-stim) |
| 252 | HPMFP40 | 778 | #2: Activation of transcription through serum response element in immune cells (such as T-cells). |
| 253 | HPRAL78 | 779 | #19: Regulation of transcription via DMEF1 response element in adipocytes and pre-adipocytes |
| 253 | HPRAL78 | 779 | #32: VEGF in SW480 |
| 253 | HPRAL78 | 779 | #90: IL-2 in Human T-cell 293T |
| 253 | HPRAL78 | 779 | #98: SEAP in OE-33 |
| 254 | HPRBC80 | 780 | #12b: Activation of transcription through NFAT response element in immune cells (such as natural killer cells). |
| 254 | HPRBC80 | 780 | #13: Activation of transcription through serum response element in immune cells (such as natural killer cells). |
| 254 | HPRBC80 | 780 | #14: Activation of transcription through API response element in immune cells (such as T-cells). |
| 254 | HPRBC80 | 780 | #15: Activation of transcription through NFAT response element in immune cells (such as T-cells). |
| 254 | HPRBC80 | 780 | #16b: Activation of transcription through NFKB response element in immune cells (such as T-cells). |
| 254 | HPRBC80 | 780 | #34: Activation of transcription through GATA-3 response element in immune cells (such as mast cells). |
| 254 | HPRBC80 | 780 | #47: Activation of transcription through NFAT response element in immune cells (such as mast cells). |
| 254 | HPRBC80 | 780 | #77: SEAP in HIB/CRE |
| 255 | HPTTG19 | 781 | #20: Endothelial Cell Apoptosis |
| 256 | HPZAB47 | 782 | #29: Activation of T-Cell p38 or JNK Signaling Pathway. |
| 256 | HPZAB47 | 782 | #99: CD152 in Human T cells |
| 256 | HPZAB47 | 782 | #100: Activation of transcription through NFKB response element in neuronal cells (such as SKNMC cells). |
| 257 | HRAAB15 | 783 | #21: Production of IFNgamma using a T cells |
| 257 | HRAAB15 | 783 | #29: Activation of T-Cell p38 or JNK Signaling Pathway. |
| 258 | HRABA80 | 784 | #31: Insulin Secretion |
| 258 | HRABA80 | 784 | #60: Activation of Endothelial Cell ERK Signaling Pathway. |
| 258 | HRABA80 | 784 | #99: CD152 in Human T cells |
| 259 | HRACD15 | 785 | #9b: Regulation of transcription of Malic Enzyme in hepatocytes |
| 259 | HRACD15 | 785 | #24: Regulation of apoptosis of immune cells (such as mast cells). |
| 259 | HRACD15 | 785 | #29: Activation of T-Cell p38 or JNK Signaling Pathway. |
| 259 | HRACD15 | 785 | #77: SEAP in HIB/CRE |
| 259 | HRACD15 | 785 | #89: SEAP in Jurkat/IL4 promoter (antiCD3 co-stim) |
| 260 | HRACJ35 | 786 | #9b: Regulation of transcription of Malic Enzyme in hepatocytes |
| 260 | HRACJ35 | 786 | #49: Production of VCAM in endothelial cells (such as human umbilical vein endothelial cells (HUVEC)) |
| 260 | HRACJ35 | 786 | #101: Hexosaminidase in RBL-2H3 |
| 261 | HRDFD27 | 787 | #2: Activation of transcription through serum response element in immune cells (such as T-cells). |
| 261 | HRDFD27 | 787 | #10: Activation of Endothelial Cell p38 or JNK Signaling Pathway. |
| 261 | HRDFD27 | 787 | #12c: Activation of transcription through NFKB response element in immune cells (such as natural killer cells). |
| 261 | HRDFD27 | 787 | #82: IL-10 in Human T-cell 2B9 |
| 262 | HRGBL78 | 788 | #1: Stimulation of insulin secretion from pancreatic beta cells. |
| 263 | HROAJ03 | 789 | #10: Activation of Endothelial Cell p38 or JNK Signaling Pathway. |
| 263 | HROAJ03 | 789 | #102: IL-4 in HMC |
| 264 | HROAJ39 | 790 | #25: Stimulation of Calcium Flux in pancreatic beta cells. |
| 265 | HROBD68 | 791 | #65: Regulation of apoptosis in pancreatic beta cells. |
| 266 | HSATR82 | 792 | #2: Activation of transcription through serum response element in immune cells (such as T-cells). |
| 267 | HSAVH65 | 793 | #29: Activation of T-Cell p38 or JNK Signaling Pathway. |
| 267 | HSAVH65 | 793 | #84: IL-8 in Normal Human Bronchial Epitheliae |
| 267 | HSAVH65 | 793 | #103: ICAM in Normal Human Bronchial Epitheliae |
| 268 | HSAWD74 | 794 | #5: Proliferation of pre-adipose cells (such as 3T3-L1 cells) |
| 268 | HSAWD74 | 794 | #19: Regulation of transcription via DMEF1 response element in adipocytes and pre-adipocytes |
| 268 | HSAWD74 | 794 | #47: Activation of transcription through NFAT response element in immune cells (such as mast cells). |
| 269 | HSAWZ41 | 795 | #6: Activation of transcription through cAMP response element (CRE) in pre-adipocytes. |
| 269 | HSAWZ41 | 795 | #13: Activation of transcription through serum response element in immune cells (such as natural killer cells). |
| 269 | HSAWZ41 | 795 | #14b: Activation of transcription through AP1 response element in immune cells (such as T-cells). |
| 269 | HSAWZ41 | 795 | #17: Activation of transcription through STAT6 response element in immune cells (such as T-cells). |
| 269 | HSAWZ41 | 795 | #34: Activation of transcription through GATA-3 response element in immune cells (such as mast cells). |
| 269 | HSAWZ41 | 795 | #38: Activation of transcription through GAS response element in immune cells (such as T-cells). |
| 269 | HSAWZ41 | 795 | #47: Activation of transcription through NFAT response element in immune cells (such as mast cells). |
| 269 | HSAWZ41 | 795 | #53: Activation of transcription through NFKB response element in immune cells (such as EOL1 cells). |
| 269 | HSAWZ41 | 795 | #77: SEAP in HIB/CRE |
| 269 | HSAWZ41 | 795 | #78: SEAP in 293/ISRE |
| 269 | HSAWZ41 | 795 | #104: SEAP in OE-21 |
| 270 | HSAXA83 | 796 | #2: Activation of transcription through serum response element in immune cells (such as T-cells). |
| 271 | HSAYB43 | 797 | #20: Endothelial Cell Apoptosis |
| 272 | HSDEK49 | 798 | #2: Activation of transcription through serum response element in immune cells (such as T-cells). |
| 272 | HSDEK49 | 798 | #9: Regulation of transcription of Malic Enzyme in adipocytes |
| 272 | HSDEK49 | 798 | #105: MIP-1a in HMC |
| 273 | HSDFJ26 | 799 | #27: Regulation of transcription through the PEPCK promoter in hepatocytes |
| 274 | HSDJJ82 | 800 | #39: Protection from Endothelial Cell Apoptosis. |
| 274 | HSDJJ82 | 800 | #106: IL-6 in HUVEC |
| 275 | HSDSB09 | 801 | #1: Stimulation of insulin secretion from pancreatic beta cells. |
| 275 | HSDSB09 | 801 | #2: Activation of transcription through serum response element in immune cells (such as T-cells). |
| 275 | HSDSB09 | 801 | #6: Activation of transcription through cAMP response element (CRE) in pre-adipocytes. |
| 275 | HSDSB09 | 801 | #9: Regulation of transcription of Malic Enzyme in adipocytes |
| 275 | HSDSB09 | 801 | #13: Activation of transcription through serum response element in immune cells (such as natural killer cells). |
| 275 | HSDSB09 | 801 | #17: Activation of transcription through STAT6 response element in immune cells (such as T-cells). |
| 275 | HSDSB09 | 801 | #19: Regulation of transcription via DMEF1 response element in adipocytes and pre-adipocytes |
| 275 | HSDSB09 | 801 | #25: Stimulation of Calcium Flux in pancreatic beta cells. |
| 275 | HSDSB09 | 801 | #34: Activation of transcription through GATA-3 response element in immune cells (such as mast cells). |
| 275 | HSDSB09 | 801 | #46: Activation of transcription through serum response element in pre-adipocytes. |
| 275 | HSDSB09 | 801 | #47: Activation of transcription through NFAT response element in immune cells (such as mast cells). |
| 275 | HSDSB09 | 801 | #48: Activation of transcription through NFKB response element in immune cells (such as mast cells). |
| 275 | HSDSB09 | 801 | #51: Activation of transcription through NFKB response element in immune cells (such as basophils). |
| 275 | HSDSB09 | 801 | #54: Activation of transcription through STAT6 response element in immune cells (such as mast cells). |
| 275 | HSDSB09 | 801 | #77: SEAP in HIB/CRE |
| 275 | HSDSB09 | 801 | #78: SEAP in 293/ISRE |
| 275 | HSDSB09 | 801 | #89: SEAP in Jurkat/IL4 promoter (antiCD3 co-stim) |
| 275 | HSDSB09 | 801 | #107: CXCR4 in SW480 |
| 275 | HSDSB09 | 801 | #108: CXCR4 in HT1080 |
| 275 | HSDSB09 | 801 | #109: IgG in Human B cells |
| 275 | HSDSB09 | 801 | #110: SEAP in Alk Phos C2C12 |
| 275 | HSDSB09 | 801 | #111: IgG in Human B cells SAC |
| 275 | HSDSB09 | 801 | #112: SEAP in Jurkat/IL4 promoter |
| 275 | HSDSB09 | 801 | #113: SEAP in Ku812/NFkB (TNF synergy) |
| 276 | HSDSE75 | 802 | #8: Production of IL-6 |
| 276 | HSDSE75 | 802 | #44: Myoblast cell proliferation |
| 277 | HSDZR57 | 803 | #10: Activation of Endothelial Cell p38 or JNK Signaling Pathway. |
| 277 | HSDZR57 | 803 | #95: SEAP in ATP-3T3-L1 |
| 277 | HSDZR57 | 803 | #110: SEAP in Alk Phos C2C12 |
| 278 | HSIDJ81 | 804 | #31: Insulin Secretion |
| 278 | HSIDJ81 | 804 | #114: TNFa in Human T-cell 2B9 |
| 278 | HSIDJ81 | 804 | #115: Activation of transcription through NFKB response element in neuronal cells (such as SKNMC cells). |
| 279 | HSKDA27 | 805 | #26: Production of GM-CSF |
| 279 | HSKDA27 | 805 | #65: Regulation of apoptosis in pancreatic beta cells. |
| 279 | HSKDA27 | 805 | #83: Caspase (+paclitaxel) in SW480 |
| 279 | HSKDA27 | 805 | #116: MCP-1 in HUVEC |
| 280 | HSKGN81 | 806 | #1: Stimulation of insulin secretion from pancreatic beta cells. |
| 280 | HSKGN81 | 806 | #77: SEAP in HIB/CRE |
| 280 | HSKGN81 | 806 | #96: Glucose Production in H41IE |
| 280 | HSKGN81 | 806 | #117: IL-8 in SW480 |
| 281 | HSLCQ82 | 807 | #2: Activation of transcription through serum response element in immune cells (such as T-cells). |
| 282 | HSNAD72 | 808 | #1: Stimulation of insulin secretion from pancreatic beta cells. |
| 283 | HSNMC45 | 809 | #25: Stimulation of Calcium Flux in pancreatic beta cells. |
| 284 | HSQFP66 | 810 | #1: Stimulation of insulin secretion from pancreatic beta cells. |
| 285 | HSRFZ57 | 811 | #49: Production of VCAM in endothelial cells (such as human umbilical vein endothelial cells (HUVEC)) |
| 285 | HSRFZ57 | 811 | #57: Regulation of transcription through the FAS promoter element in hepatocytes |
| 285 | HSRFZ57 | 811 | #89: SEAP in Jurkat/IL4 promoter (antiCD3 co-stim) |
| 286 | HSSFT08 | 812 | #2: Activation of transcription through serum response element in immune cells (such as T-cells). |
| 287 | HSSGD52 | 813 | #5: Proliferation of pre-adipose cells (such as 3T3-L1 cells) |
| 287 | HSSGD52 | 813 | #13: Activation of transcription through serum response element in immune cells (such as natural killer cells). |
| 287 | HSSGD52 | 813 | #17: Activation of transcription through STAT6 response element in immune cells (such as T-cells). |
| 287 | HSSGD52 | 813 | #34: Activation of transcription through GATA-3 response element in immune cells (such as mast cells). |
| 287 | HSSGD52 | 813 | #47: Activation of transcription through NFAT response element in immune cells (such as mast cells). |
| 287 | HSSGD52 | 813 | #90: IL-2 in Human T-cell 293T |
| 288 | HSSGG82 | 814 | #20: Endothelial Cell Apoptosis |
| 289 | HSUBW09 | 815 | #18: Inhibition of squalene synthetase gene transcription. |
| 289 | HSUBW09 | 815 | #57: Regulation of transcription through the FAS promoter element in hepatocytes |
| 289 | HSUBW09 | 815 | #99: CD152 in Human T cells |
| 290 | HSVBU91 | 816 | #6: Activation of transcription through cAMP response element (CRE) in pre-adipocytes. |
| 290 | HSVBU91 | 816 | #11b: Activation of transcription through CD28 response element in immune cells (such as T-cells). |
| 290 | HSVBU91 | 816 | #31: Insulin Secretion |
| 290 | HSVBU91 | 816 | #40: Activation of Hepatocyte ERK Signaling Pathway |
| 290 | HSVBU91 | 816 | #118: TNFa in Human T-cell 293T |
| 291 | HSYAV50 | 817 | #6: Activation of transcription through cAMP response element (CRE) in pre-adipocytes. |
| 291 | HSYAV50 | 817 | #13: Activation of transcription through serum response element in immune cells (such as natural killer cells). |
| 291 | HSYAV50 | 817 | #38: Activation of transcription through GAS response element in immune cells (such as T-cells). |
| 291 | HSYAV50 | 817 | #104: SEAP in OE-21 |
| 291 | HSYAV50 | 817 | #108: CXCR4 in HT1080 |
| 291 | HSYAV50 | 817 | #109: IgG in Human B cells |
| 291 | HSYAV50 | 817 | #119: IFNg in Human T-cell 293T |
| 292 | HTAEE28 | 818 | #31: Insulin Secretion |
| 292 | HTAEE28 | 818 | #39: Protection from Endothelial Cell Apoptosis. |
| 293 | HTECC05 | 819 | #4: Regulation of viability and proliferation of pancreatic beta cells. |
| 293 | HTECC05 | 819 | #93: SEAP in UMR-106 |
| 293 | HTECC05 | 819 | #120: ICAM in OE19 |
| 294 | HTEEB42 | 820 | #9b: Regulation of transcription of Malic Enzyme in hepatocytes |
| 295 | HTEFU65 | 821 | #1: Stimulation of insulin secretion from pancreatic beta cells. |
| 295 | HTEFU65 | 821 | #6: Activation of transcription through cAMP response element (CRE) in pre-adipocytes. |
| 295 | HTEFU65 | 821 | #9b: Regulation of transcription of Malic Enzyme in hepatocytes |
| 295 | HTEFU65 | 821 | #18: Inhibition of squalene synthetase gene transcription. |
| 295 | HTEFU65 | 821 | #21: Production of IFNgamma using a T cells |
| 295 | HTEFU65 | 821 | #44: Myoblast cell proliferation |
| 296 | HTEGA76 | 822 | #20: Endothelial Cell Apoptosis |
| 296 | HTEGA76 | 822 | #22: Activation of Adipocyte ERK Signaling Pathway |
| 297 | HTELM16 | 823 | #2b: Activation of transcription through serum response element in immune cells (such as T-cells). |
| 297 | HTELM16 | 823 | #18: Inhibition of squalene synthetase gene transcription. |
| 297 | HTELM16 | 823 | #75: Production of MIP1 alpha |
| 297 | HTELM16 | 823 | #114: TNFa in Human T-cell 2B9 |
| 298 | HTELP17 | 824 | #25: Stimulation of Calcium Flux in pancreatic beta cells. |
| 298 | HTELP17 | 824 | #27: Regulation of transcription through the PEPCK promoter in hepatocytes |
| 298 | HTELP17 | 824 | #102: IL-4 in HMC |
| 299 | HTELS08 | 825 | #18: Inhibition of squalene synthetase gene transcription. |
| 299 | HTELS08 | 825 | #27: Regulation of transcription through the PEPCK promoter in hepatocytes |
| 299 | HTELS08 | 825 | #106: IL-6 in HUVEC |
| 300 | HTEPG70 | 826 | #6: Activation of transcription through cAMP response element (CRE) in pre-adipocytes. |
| 300 | HTEPG70 | 826 | #13: Activation of transcription through serum response element in immune cells (such as natural killer cells). |
| 300 | HTEPG70 | 826 | #16b: Activation of transcription through NFKB response element in immune cells (such as T-cells). |
| 300 | HTEPG70 | 826 | #34: Activation of transcription through GATA-3 response element in immune cells (such as mast cells). |
| 300 | HTEPG70 | 826 | #46: Activation of transcription through serum response element in pre-adipocytes. |
| 300 | HTEPG70 | 826 | #47: Activation of transcription through NFAT response element in immune cells (such as mast cells). |
| 300 | HTEPG70 | 826 | #51: Activation of transcription through NFKB response element in immune cells (such as basophils). |
| 300 | HTEPG70 | 826 | #77: SEAP in HIB/CRE |
| 300 | HTEPG70 | 826 | #78: SEAP in 293/ISRE |
| 301 | HTGEP89 | 827 | #2: Activation of transcription through serum response element in immune cells (such as T-cells). |
| 302 | HTHBG43 | 828 | #13: Activation of transcription through serum response element in immune cells (such as natural killer cells). |
| 302 | HTHBG43 | 828 | #17: Activation of transcription through STAT6 response element in immune cells (such as T-cells). |
| 303 | HTHDS25 | 829 | #2: Activation of transcription through serum response element in immune cells (such as T-cells). |
| 303 | HTHDS25 | 829 | #18: Inhibition of squalene synthetase gene transcription. |
| 303 | HTHDS25 | 829 | #121: IFNg in Human T-cell 2B9 |
| 304 | HTLEP53 | 830 | #2: Activation of transcription through serum response element in immune cells (such as T-cells). |
| 304 | HTLEP53 | 830 | #20: Endothelial Cell Apoptosis |
| 304 | HTLEP53 | 830 | #31: Insulin Secretion |
| 304 | HTLEP53 | 830 | #34: Activation of transcription through GATA-3 response element in immune cells (such as mast cells). |
| 304 | HTLEP53 | 830 | #47: Activation of transcription through NFAT response element in immune cells (such as mast cells). |
| 304 | HTLEP53 | 830 | #89: SEAP in Jurkat/IL4 promoter (antiCD3 co-stim) |
| 305 | HTLGE31 | 831 | #2: Activation of transcription through serum response element in immune cells (such as T-cells). |
| 306 | HTLHY14 | 832 | #42: Calcium flux in immune cells (such as monocytes) |
| 306 | HTLHY14 | 832 | #105: MIP-1a in HMC |
| 307 | HTLIV19 | 833 | #12b: Activation of transcription through NFAT response element in immune cells (such as natural killer cells). |
| 307 | HTLIV19 | 833 | #13: Activation of transcription through serum response element in immune cells (such as natural killer cells). |
| 307 | HTLIV19 | 833 | #77: SEAP in HIB/CRE |
| 307 | HTLIV19 | 833 | #88: SEAP in NK16/STAT6 |
| 308 | HTOAK16 | 834 | #28: Production of ICAM in endothelial cells (such as human umbilical vein endothelial cells (HUVEC)) |
| 308 | HTOAK16 | 834 | #49: Production of VCAM in endothelial cells (such as human umbilical vein endothelial cells (HUVEC)) |
| 308 | HTOAK16 | 834 | #85: Production of IL-8 by by endothelial cells (such as Human Umbilical Cord Endothelial Cells). |
| 308 | HTOAK16 | 834 | #116: MCP-1 in HUVEC |
| 308 | HTOAK16 | 834 | #122: IL-13 in Human T cells |
| 309 | HTOGR42 | 835 | #2: Activation of transcription through serum response element in immune cells (such as T-cells). |
| 309 | HTOGR42 | 835 | #23: Activation of Endothelial Cell JNK Signaling Pathway. |
| 309 | HTOGR42 | 835 | #32: VEGF in SW480 |
| 309 | HTOGR42 | 835 | #82: IL-10 in Human T-cell 2B9 |
| 309 | HTOGR42 | 835 | #123: IL-10 in Human T-cell 293T |
| 309 | HTOGR42 | 835 | #124: Activation of Natural Killer Cell ERK Signaling Pathway. |
| 310 | HTOHT18 | 836 | #2: Activation of transcription through serum response element in immune cells (such as T-cells). |
| 310 | HTOHT18 | 836 | #67: Production of TNF alpha by dendritic cells |
| 311 | HTOIZ02 | 837 | #8: Production of IL-6 |
| 311 | HTOIZ02 | 837 | #20: Endothelial Cell Apoptosis |
| 312 | HTOJK60 | 838 | #2: Activation of transcription through serum response element in immune cells (such as T-cells). |
| 313 | HTPCS72 | 839 | #25: Stimulation of Calcium Flux in pancreatic beta cells. |
| 313 | HTPCS72 | 839 | #114: TNFa in Human T-cell 2B9 |
| 314 | HTPIH83 | 840 | #31: Insulin Secretion |
| 315 | HTSEW17 | 841 | #1: Stimulation of insulin secretion from pancreatic beta cells. |
| 315 | HTSEW17 | 841 | #125: Activation of transcription through NFKB response element in immune cells (such as B-cells). |
| 316 | HTTBI76 | 842 | #1: Stimulation of insulin secretion from pancreatic beta cells. |
| 316 | HTTBI76 | 842 | #86: CD69 in Human T cells |
| 316 | HTTBI76 | 842 | #92: Caspase (+camptothecin) in SW480 |
| 317 | HTTBS64 | 843 | #9b: Regulation of transcription of Malic Enzyme in hepatocytes |
| 318 | HTWDF76 | 844 | #11b: Activation of transcription through CD28 response element in immune cells (such as T-cells). |
| 318 | HTWDF76 | 844 | #13: Activation of transcription through serum response element in immune cells (such as natural killer cells). |
| 318 | HTWDF76 | 844 | #14b: Activation of transcription through AP1 response element in immune cells (such as T-cells). |
| 319 | HTXCV12 | 845 | #2: Activation of transcription through serum response element in immune cells (such as T-cells). |
| 319 | HTXCV12 | 845 | #16: Activation of transcription through NFKB response element in immune cells (such as T-cells). |
| 319 | HTXCV12 | 845 | #43: Production of RANTES in endothelial cells (such as human umbilical vein endothelial cells (HUVEC)) |
| 319 | HTXCV12 | 845 | #92: Caspase (+camptothecin) in SW480 |
| 319 | HTXCV12 | 845 | #119: IFNg in Human T-cell 293T |
| 320 | HTXFL30 | 846 | #18: Inhibition of squalene synthetase gene transcription. |
| 320 | HTXFL30 | 846 | #67: Production of TNF alpha by dendritic cells |
| 320 | HTXFL30 | 846 | #92: Caspase (+camptothecin) in SW480 |
| 320 | HTXFL30 | 846 | #126: Regulation of proliferation and/or differentiation in immune cells (such as mast cells). |
| 321 | HTXJM03 | 847 | #9b: Regulation of transcription of Malic Enzyme in hepatocytes |
| 321 | HTXJM03 | 847 | #96: Glucose Production in H4I1E |
| 322 | HTXON32 | 848 | #31: Insulin Secretion |
| 322 | HTXON32 | 848 | #107: CXCR4 in SW480 |
| 322 | HTXON32 | 848 | #111: IgG in Human B cells SAC |
| 323 | HUFBY15 | 849 | #29: Activation of T-Cell p38 or JNK Signaling Pathway. |
| 323 | HUFBY15 | 849 | #78: SEAP in 293/ISRE |
| 324 | HUFCJ30 | 850 | #1: Stimulation of insulin secretion from pancreatic beta cells. |
| 324 | HUFCJ30 | 850 | #109: IgG in Human B cells |
| 325 | HUKAH51 | 851 | #3: Activation of JNK Signaling Pathway immune cells (such as eosinophils). |
| 325 | HUKAH51 | 851 | #39: Protection from Endothelial Cell Apoptosis. |
| 325 | HUKAH51 | 851 | #78: SEAP in 293/ISRE |
| 325 | HUKAH51 | 851 | #90: IL-2 in Human T-cell 293T |
| 325 | HUKAH51 | 851 | #127: SEAP in HepG2/Squale-synthetase(stimulation) |
| 326 | HUSXS50 | 852 | #18: Inhibition of squalene synthetase gene transcription. |
| 326 | HUSXS50 | 852 | #29: Activation of T-Cell p38 or JNK Signaling Pathway. |
| 326 | HUSXS50 | 852 | #42: Calcium flux in immune cells (such as monocytes) |
| 326 | HUSXS50 | 852 | #53: Activation of transcription through NFKB response element in immune cells (such as EOL1 cells). |
| 327 | HUVEB53 | 853 | #65: Regulation of apoptosis in pancreatic beta cells. |
| 327 | HUVEB53 | 853 | #77: SEAP in HIB/CRE |
| 328 | HWAAD63 | 854 | #57: Regulation of transcription through the FAS promoter element in hepatocytes |
| 329 | HWABY10 | 855 | #8: Production of IL-6 |
| 329 | HWABY10 | 855 | #11: Activation of transcription through CD28 response element in immune cells (such as T-cells). |
| 329 | HWABY10 | 855 | #13: Activation of transcription through serum response element in immune cells (such as natural killer cells). |
| 330 | HWADJ89 | 856 | #1: Stimulation of insulin secretion from pancreatic beta cells. |
| 330 | HWADJ89 | 856 | #2: Activation of transcription through serum response element in immune cells (such as T-cells). |
| 331 | HWBCB89 | 857 | #2: Activation of transcription through serum response element in immune cells (such as T-cells). |
| 331 | HWBCB89 | 857 | #13: Activation of transcription through serum response element in immune cells (such as natural killer cells). |
| 331 | HWBCB89 | 857 | #16: Activation of transcription through NFKB response element in immune cells (such as T-cells). |
| 331 | HWBCB89 | 857 | #30: Production of ICAM-1 |
| 331 | HWBCB89 | 857 | #34: Activation of transcription through GATA-3 response element in immune cells (such as mast cells). |
| 331 | HWBCB89 | 857 | #99: CD152 in Human T cells |
| 332 | HWBFX31 | 858 | #9: Regulation of transcription of Malic Enzyme in adipocytes |
| 332 | HWBFX31 | 858 | #98: SEAP in OE-33 |
| 333 | HWDAH38 | 859 | #2: Activation of transcription through serum response element in immune cells (such as T-cells). |
| 333 | HWDAH38 | 859 | #98: SEAP in OE-33 |
| 334 | HWHGZ51 | 860 | #38c: Activation of transcription through GAS response element in immune cells (such as T-cells). |
| 334 | HWHGZ51 | 860 | #45: Production of MCP-1 |
| 334 | HWHGZ51 | 860 | #53: Activation of transcription through NFKB response element in immune cells (such as EOL1 cells). |
| 334 | HWHGZ51 | 860 | #98: SEAP in OE-33 |
| 334 | HWHGZ51 | 860 | #99: CD152 in Human T cells |
| 334 | HWHGZ51 | 860 | #101: Hexosaminidase in RBL-2H3 |
| 334 | HWHGZ51 | 860 | #128: HLA-DR in Human T cells |
| 335 | HWLIH65 | 861 | #29: Activation of T-Cell p38 or JNK Signaling Pathway. |
| 335 | HWLIH65 | 861 | #49: Production of VCAM in endothelial cells (such as human umbilical vein endothelial cells (HUVEC)) |
| 336 | HTEAM34 | 862 | #10: Activation of Endothelial Cell p38 or JNK Signaling Pathway. |
| 336 | HTEAM34 | 862 | #114: TNFa in Human T-cell 2B9 |
| 337 | HTEJN13 | 863 | #18: Inhibition of squalene synthetase gene transcription. |
| 337 | HTEJN13 | 863 | #22: Activation of Adipocyte ERK Signaling Pathway |

[0104] TABLE 1D.2
Biological Activity: #1: Stimulation of insulin secretion from pancreatic beta cells.
Exemplary Assay: Assays for measuring secretion of insulin are well-known in the art and may be used or routinely modified to assess the ability of polypeptides of the invention (including antibodies and
agonists or antagonists of the invention) to stimulate insulin secretion. For example, insulin secretion is measured by FMAT using anti-rat insulin antibodies. Insulin secretion from pancreatic beta cells is
upregulated by glucose and also by certain proteins/peptides, and disregulation is a key component in diabetes. Exemplary assays that may be used or routinely modified to test for stimulation of insulin secretion
(from pancreatic cells) by polypeptides of the invention (including antibodies and agonists or antagonists of the invention) include assays disclosed in: Ahren, B., et al., Am J Physiol, 277(4 Pt 2): R959-66 (1999);
Li, M., et al., Endocrinology, 138(9): 3735-40 (1997); Kim, K. H., et al., FEBS Lett, 377(2): 237-9 (1995); and, Miraglia S et. al., Journal of Biomolecular Screening, 4: 193-204 (1999), the contents of each of
which is herein incorporated by reference in its entirety. Pancreatic cells that may be used according to these assays are publicly available (e.g., through the ATCC) and/or may be routinely generated. Exemplary
pancreatic cells that may be used according to these assays include rat INS-1 cells. INS-1 cells are a semi-adherent cell line established from cells isolated from an X-ray induced rat transplantable insulinoma.
These cells retain characteristics typical of native pancreatic beta cells including glucose inducible insulin secretion. References: Asfari et al. Endocrinology 1992 130: 167.
Preferred Indication: A highly preferred indication is diabetes mellitus. An additional highly preferred indication is a complication associated with diabetes (e.g., diabetic retinopathy, diabetic
nephropathy, kidney disease (e.g., renal failure, nephropathy and/or other diseases and disorders as described in the “Renal Disorders” section below), diabetic neuropathy, nerve disease and nerve damage (e.g.,
due to diabetic neuropathy), blood vessel blockage, heart disease, stroke, impotence (e.g., due to diabetic neuropathy or blood vessel blockage), seizures, mental confusion, drowsiness, nonketotic hyperglycemic-
hyperosmolar coma, cardiovascular disease (e.g., heart disease, atherosclerosis, microvascular disease, hypertension, stroke, and other diseases and disorders as described in the “Cardiovascular Disorders” section
below), dyslipidemia, endocrine disorders (as described in the “Endocrine Disorders” section below), neuropathy, vision impairment (e.g., diabetic retinopathy and blindness), ulcers and impaired wound healing,
and infection (e.g., infectious diseases and disorders as described in the “Infectious Diseases” section below, especially of the urinary tract and skin), carpal tunnel syndrome and Dupuytren's contracture).
An additional highly preferred indication is obesity and/or complications associated with obesity. Additional highly preferred indications include weight loss or alternatively, weight gain. Aditional
highly preferred indications are complications associated with insulin resistance.
Biological Activity: #2: Activation of transcription through serum response element in immune cells (such as T-cells).
Exemplary Assay: Assays for the activation of transcription through the Serum Response Element (SRE) are well-known in the art and may be used or routinely modified to assess the ability of polypeptides of
the invention (including antibodies and agonists or antagonists of the invention) to regulate the serum response factors and modulate the expression of genes involved in growth. Exemplary assays for
transcription through the SRE that may be used or routinely modified to test SRE activity of the polypeptides of the invention (including antibodies and agonists or antagonists of the invention) include assays
disclosed in Berger et al., Gene 66: 1-10 (1998); Cullen and Malm, Methods in Enzymol 216: 362-368 (1992); Henthorn et al., Proc Natl Acad Sci USA 85: 6342-6346 (1988); and Black et al., Virus Genes
12(2): 105-117 (1997), the content of each of which are herein incorporated by reference in its entirety. T cells that may be used according to these assays are publicly available (e.g., through the ATCC).
Exemplary mouse T cells that may be used according to these assays include the CTLL cell line, which is an IL-2 dependent suspension culture of T cells with cytotoxic activity.
Preferred Indication: A preferred embodiment of the invention includes a method for inhibiting (e.g., reducing) TNF alpha production. An alternative preferred embodiment of the invention includes a
method for stimulating (e.g., increasing) TNF alpha production. Preferred indications include blood disorders (e.g., as described below under “Immune Activity”, “Blood-Related Disorders”, and/or
“Cardiovascular Disorders”), Highly preferred indications include autoimmune diseases (e.g., rheumatoid arthritis, systemic lupus erythematosis, Crohn''s disease, multiple sclerosis and/or as described below),
immunodeficiencies (e.g., as described below), boosting a T cell-mediated immune response, and suppressing a T cell-mediated immune response. Additional highly preferred indications include inflammation
and inflammatory disorders, and treating joint damage in patients with rheumatoid arthritis. An additional highly preferred indication is sepsis. Highly preferred indications include neoplastic diseases (e.g.,
leukemia, lymphoma, and/or as described below under “Hyperproliferative Disorders”). Additionally, highly preferred indications include neoplasms and cancers, such as, for example, leukemia, lymphoma,
melanoma, glioma (e.g., malignant glioma), solid tumors, and prostate, breast, lung, colon, pancreatic, esophageal, stomach, brain, liver and urinary cancer. Other preferred indications include benign
dysproliferative disorders and pre-neoplastic conditions, such as, for example, hyperplasia, metaplasia, and/or dysplasia. Preferred indications include anemia, pancytopenia, leukopenia, thrombocytopenia,
Hodgkin's disease, acute lymphocytic anemia (ALL), plasmacytomas, multiple myeloma, Burkitt's lymphoma, arthritis, AIDS, granulomatous disease, inflammatory bowel disease, neutropenia, neutrophilia,
psoriasis, suppression of immune reactions to transplanted organs and tissues, hemophilia, hypercoagulation, diabetes mellitus, endocarditis, meningitis, Lyme Disease, cardiac reperfusion injury, and asthma and
allergy. An additional preferred indication is infection (e.g., an infectious disease as described below under “Infectious Disease”).
Biological Activity: #2b: Activation of transcription through serum response element in immune cells (such as T-cells).
Exemplary Assay: Assays for the activation of transcription through the Serum Response Element (SRE) are well-known in the art and may be used or routinely modified to assess the ability of polypeptides of
the invention (including antibodies and agonists or antagonists of the invention) to regulate serum response factors and modulate the expression of genes involved in growth and upregulate the function of
growth-related genes in many cell types. Exemplary assays for transcription through the SRE that may be used or routinely modified to test SRE activity of the polypeptides of the invention (including antibodies
and agonists or antagonists of the invention) include assays disclosed in Berger et al., Gene 66: 1-10 (1998); Cullen and Malm, Methods in Enzymol 216: 362-368 (1992); Henthorn et al., Proc Natl Acad Sci USA
85: 6342-6346 (1988); Benson et al., J Immunol 153(9): 3862-3873 (1994); and Black et al., Virus Genes 12(2): 105-117 (1997), the content of each of which are herein incorporated by reference in its entirety.
Human T cells that may be used according to these assays are publicly available (e.g., through the ATCC). Exemplary human T cells that may be used according to these assays include the JURKAT cell line,
which is a suspension culture of leukemia cells that produce IL-2 when stimulated.
Preferred Indication: A preferred embodiment of the invention includes a method for inhibiting (e.g., reducing) TNF alpha production. An alternative highly preferred embodiment of the invention includes a
method for stimulating (e.g., increasing) TNF alpha production. Preferred indications include blood disorders (e.g., as described below under “Immune Activity”, “Blood-Related Disorders”, and/or
“Cardiovascular Disorders”), Highly preferred indications include autoimmune diseases (e.g., rheumatoid arthritis, systemic lupus erythematosis, Crohn''s disease, multiple sclerosis and/or as described below),
immunodeficiencies (e.g., as described below), boosting a T cell-mediated immune response, and suppressing a T cell-mediated immune response. Additional highly preferred indications include inflammation
and inflammatory disorders, and treating joint damage in patients with rheumatoid arthritis. An additional highly preferred indication is sepsis. Highly preferred indications include neoplastic diseases (e.g.,
leukemia, lymphoma, and/or as described below under “Hyperproliferative Disorders”). Additionally, highly preferred indications include neoplasms and cancers, such as, leukemia, lymphoma, melanoma,
glioma (e.g., malignant glioma), solid tumors, and prostate, breast, lung, colon, pancreatic, esophageal, stomach, brain, liver and urinary cancer. Other preferred indications include benign dysproliferative
disorders and pre-neoplastic conditions, such as, for example, hyperplasia, metaplasia, and/or dysplasia. Preferred indications include anemia, pancytopenia, leukopenia, thrombocytopenia, Hodgkin's disease,
acute lymphocytic anemia (ALL), plasmacytomas, multiple myeloma, Burkitt's lymphoma, arthritis, AIDS, granulomatous disease, inflammatory bowel disease, neutropenia, neutrophilia, psoriasis, suppression
of immune reactions to transplanted organs and tissues, hemophilia, hypercoagulation, diabetes mellitus, endocarditis, meningitis, Lyme Disease, cardiac reperfusion injury, and asthma and allergy. An
additional preferred indication is infection (e.g., an infectious disease as described below under “Infectious Disease”).
Biological Activity: #3: Activation of JNK Signaling Pathway in immune cells (such as eosinophils).
Exemplary Assay: Kinase assay. JNK kinase assays for signal transduction that regulate cell proliferation, activation, or apoptosis are well known in the art and may be used or routinely modified to assess the
ability of polypeptides of the invention (including antibodies and agonists or antagonists of the invention) to promote or inhibit cell proliferation, activation, and apoptosis. Exemplary assays for JNK kinase
activity that may be used or routinely modified to test JNK kinase-induced activity of polypeptides of the invention (including antibodies and agonists or antagonists of the invention) include the assays disclosed
in Forrer et al., Biol Chem 379(8-9): 1101-1110 (1998); Gupta et al., Exp Cell Res 247(2): 495-504 (1999); Kyriakis JM, Biochem Soc Symp 64: 29-48 (1999); Chang and Karin, Nature 410(6824): 37-40 (2001);
and Cobb MH, Prog Biophys Mol Biol 71(3-4): 479-500 (1999); the contents of each of which are herein incorporated by reference in its entirety. Exemplary cells that may be used according to these assays
include eosinophils. Eosinophils are important in the late stage of allergic reactions; they are recruited to tissues and mediate the inflammatory response of late stage allergic reaction. Moreover, exemplary
assays that may be used or routinely modified to assess the ability of polypeptides of the invention (including antibodies and agonists or antagonists of the invention) to modulate signal transduction, cell
proliferation, activation, or apoptosis in eosinophils include assays disclosed and/or cited in: Zhang JP, et al., “Role of caspases in dexamethasone-induced apoptosis and activation of c-Jun NH2-terminal kinase
and p38 mitogen-activated protein kinase in human eosinophils” Clin Exp Immunol; Oct; 122(1): 20-7 (2000); Hebestreit H, et al., “Disruption of fas receptor signaling by nitric oxide in eosinophils” J Exp Med;
Feb 2; 187(3): 415-25 (1998); J Allergy Clin Immunol 1999 Sep; 104(3 Pt 1): 565-74; and, Sousa AR, et al., “In vivo resistance to corticosteroids in bronchial asthma is associated with enhanced phosyphorylation
of JUN N-terminal kinase and failure of prednisolone to inhibit JUN N-terminal kinase phosphorylation” J Allergy Clin Immunol; Sep; 104(3 Pt 1): 565-74 (1999); the contents of each of which are herein
incorporated by reference in its entirety.
Preferred Indication: Highly preferred indications include asthma, allergy, hypersensitivity reactions, inflammation, and inflammatory disorders. Additional highly preferred indications include immune and
hematopoietic disorders (e.g., as described below under “Immune Activity”, and “Blood-Related Disorders”), autoimmune diseases (e.g., rheumatoid arthritis, systemic lupus erythematosis, Crohn''s disease,
multiple sclerosis and/or as described below), immunodeficiencies (e.g., as described below). Highly preferred indications also include boosting or inhibiting immune cell proliferation. Preferred indications
include neoplastic diseases (e.g., leukemia, lymphoma, and/or as described below under “Hyperproliferative Disorders”). Highly preferred indications include boosting an eosinophil-mediated immune response,
and suppressing an eosinophil-mediated immune response.
Biological Activity: #4: Regulation of viability and proliferation of pancreatic beta cells.
Exemplary Assay: Assays for the regulation of viability and proliferation of cells in vitro are well-known in the art and may be used or routinely modified to assess the ability of polypeptides of the invention
(including antibodies and agonists or antagonists of the invention) to regulate viability and proliferation of pancreatic beta cells. For example, the Cell Titer-Glo luminescent cell viability assay measures the
number of viable cells in culture based on quantitation of the ATP present which signals the presence of metabolically active cells. Exemplary assays that may be used or routinely modified to test regulation of
viability and proliferation of pancreatic beta cells by polypeptides of the invention (including antibodies and agonists or antagonists of the invention) include assays disclosed in: Friedrichsen BN, et al., Mol
Endocrinol, 15(1): 136-48 (2001); Huotari MA, et al., Endocrinology, 139(4): 1494-9 (1998); Hugl SR, et al., J Biol Chem 1998 Jul 10; 273(28): 17771-9 (1998), the contents of each of which is herein incorporated
by reference in its entirety. Pancreatic cells that may be used according to these assays are publicly available (e.g., through the ATCC) and/or may be routinely generated. Exemplary pancreatic cells that may be
used according to these assays include rat INS-1 cells. INS-1 cells are a semi-adherent cell line established from cells isolated from an X-ray induced rat transplantable insulinoma. These cells retain
characteristics typical of native pancreatic beta cells including glucose inducible insulin secretion. References: Asfari et al. Endocrinology 1992 130: 167.
Preferred Indication: A highly preferred indication is diabetes mellitus. An additional highly preferred indication is a complication associated with diabetes (e.g., diabetic retinopathy, diabetic nephropathy,
kidney disease (e.g., renal failure, nephropathy and/or other diseases and disorders as described in the “Renal Disorders” section below), diabetic neuropathy, nerve disease and nerve damage (e.g., due to diabetic
neuropathy), blood vessel blockage, heart disease, stroke, impotence (e.g., due to diabetic neuropathy or blood vessel blockage), seizures, mental confusion, drowsiness, nonketotic hyperglycemic-hyperosmolar
coma, cardiovascular disease (e.g., heart disease, atherosclerosis, microvascular disease, hypertension, stroke, and other diseases and disorders as described in the “Cardiovascular Disorders” section below),
dyslipidemia, endocrine disorders (as described in the “Endocrine Disorders” section below), neuropathy, vision impairment (e.g., diabetic retinopathy and blindness), ulcers and impaired wound healing, and
infection (e.g., infectious diseases and disorders as described in the “Infectious Diseases” section below, especially of the urinary tract and skin), carpal tunnel syndrome and Dupuytren's contracture). An
additional highly preferred indication is obesity and/or complications associated with obesity. Additional highly preferred indications include weight loss or alternatively, weight gain. Additional highly preferred
indications are complications associated with insulin resistance.
Biological Activity: #4b: Regulation of viability and proliferation of pancreatic beta cells.
Exemplary Assay: Assays for the regulation of viability and proliferation of cells in vitro are well-known in the art and may be used or routinely modified to assess the ability of polypeptides of the invention
(including antibodies and agonists or antagonists of the invention) to regulate viability and proliferation of pancreatic beta cells. For example, the Cell Titer-Glo luminescent cell viability assay measures the
number of viable cells in culture based on quantitation of the ATP present which signals the presence of metabolically active cells. Exemplary assays that may be used or routinely modified to test regulation of
viability and proliferation of pancreatic beta cells by polypeptides of the invention (including antibodies and agonists or antagonists of the invention) include assays disclosed in: Ohtani KI, et al., Endocrinology,
139(1): 172-8 (1998); Krautheim A, et al, Exp Clin Endocrinol Diabetes, 107 (1): 29-34 (1999), the contents of each of which is herein incorporated by reference in its entirety. Pancreatic cells that may be used
according to these assays are publicly available (e.g., through the ATCC) and/or may be routinely generated. Exemplary pancreatic cells that may be used according to these assays include HITT15 Cells.
HITT15 are an adherent epithelial cell line established from Syrian hamster islet cells transformed with SV40. These cells express glucagon, somatostatin, and glucocorticoid receptors. The cells secrete insulin,
which is stimulated by glucose and glucagon and suppressed by somatostatin or glucocorticoids. ATTC# CRL-1777 Refs: Lord and Ashcroft. Biochem. J. 219: 547-551; Santerre et al. Proc. Natl. Acad. Sci.
USA 78: 4339-4343, 1981.
Preferred Indication: A highly preferred indication is diabetes mellitus. An additional highly preferred indication is a complication associated with diabetes (e.g., diabetic retinopathy, diabetic nephropathy,
kidney disease (e.g., renal failure, nephropathy and/or other diseases and disorders as described in the “Renal Disorders” section below), diabetic neuropathy, nerve disease and nerve damage (e.g., due to diabetic
neuropathy), blood vessel blockage, heart disease, stroke, impotence (e.g., due to diabetic neuropathy or blood vessel blockage), seizures, mental confusion, drowsiness, nonketotic hyperglycemic-hyperosmolar
coma, cardiovascular disease (e.g., heart disease, atherosclerosis, microvascular disease, hypertension, stroke, and other diseases and disorders as described in the “Cardiovascular Disorders” section below),
dyslipidemia, endocrine disorders (as described in the “Endocrine Disorders” section below), neuropathy, vision impairment (e.g., diabetic retinopathy and blindness), ulcers and impaired wound healing, and
infection (e.g., infectious diseases and disorders as described in the “Infectious Diseases” section below, especially of the urinary tract and skin), carpal tunnel syndrome and Dupuytren's contracture). An
additional highly preferred indication is obesity and/or complications associated with obesity. Additional highly preferred indications include weight loss or alternatively, weight gain. Additional highly preferred
indications are complications associated with insulin resistance.
Biological Activity: #5: Proliferation of pre-adipose cells (such as 3T3-L1 cells)
Exemplary Assay: Assays for the regulation (i.e. increases or decreases) of viability and proliferation of cells in vitro are well-known in the art and may be used or routinely modified to assess the ability of
polypeptides of the invention (including antibodies and agonists or antagonists of the invention) to regulate viability and proliferation of pre-adipose cells and cell lines. For example, the CellTiter-Gloo
Luminescent Cell Viability Assay (Promega Corp., Madison, WI, USA) can be used to measure the number of viable cells in culture based on quantitation of the ATP present which signals the presence of
metabolically active cells. 3T3-L1 is a mouse preadipocyte cell line. It is a continuous substrain of 3T3 fibroblast cells developed through clonal isolation. Cells were differentiated to an adipose-like state before
being used in the screen. See Green H and Meuth M., Cell 3: 127-133 (1974), which is herein incorporated by reference in its entirety.
Preferred Indication:
Biological Activity: #6: Activation of transcription through cAMP response element (CRE) in pre-adipocytes.
Exemplary Assay: Assays for the activation of transcription through the cAMP response element are well-known in the art and may be used or routinely modified to assess the ability of polypeptides of the
invention (including antibodies and agonists or antagonists of the invention) to increase cAMP, regulate CREB transcription factors, and modulate expression of genes involved in a wide variety of cell functions.
For example, a 3T3-L1/CRE reporter assay may be used to identify factors that activate the cAMP signaling pathway. CREB plays a major role in adipogenesis, and is involved in differentiation into adipocytes.
CRE contains the binding sequence for the transcription factor CREB (CRE binding protein). Exemplary assays for transcription through the cAMP response element that may be used or routinely modified to
test cAMP-response element activity of polypeptides of the invention (including antibodies and agonists or antagonists of the invention) include assays disclosed in Berger et al., Gene 66: 1-10 (1998); Cullen and
Malm, Methods in Enzymol 216: 362-368 (1992); Henthorn et al., Proc Natl Acad Sci USA 85: 6342-6346 (1988); Reusch et al., Mol Cell Biol 20(3): 1008-1020 (2000); and Klemm et al., J Biol Chem 273: 917-923
(1998), the contents of each of which are herein incorporated by reference in its entirety. Pre-adipocytes that may be used according to these assays are publicly available (e.g., through the ATCC) and/or
may be routinely generated. Exemplary mouse adipocyte cells that may be used according to these assays include 3T3-L1 cells. 3T3-L1 is an adherent mouse preadipocyte cell line that is a continuous substrain
of 3T3 fibroblast cells developed through clonal isolation and undergo a pre-adipocyte to adipose-like conversion under appropriate differentiation conditions known in the art.
Preferred Indication: A highly preferred indication is obesity and/or complications associated with obesity. Additional highly preferred indications include weight loss or alternatively, weight gain. An
additional highly preferred indication is diabetes mellitus. An additional highly preferred indication is a complication associated with diabetes (e.g., diabetic retinopathy, diabetic nephropathy, kidney disease
(e.g., renal failure, nephropathy and/or other diseases and disorders as described in the “Renal Disorders” section below), diabetic neuropathy, nerve disease and nerve damage (e.g., due to diabetic neuropathy),
blood vessel blockage, heart disease, stroke, impotence (e.g., due to diabetic neuropathy or blood vessel blockage), seizures, mental confusion, drowsiness, nonketotic hyperglycemic-hyperosmolar coma,
cardiovascular disease (e.g., heart disease, atherosclerosis, microvascular disease, hypertension, stroke, and other diseases and disorders as described in the “Cardiovascular Disorders” section below),
dyslipidemia, endocrine disorders (as described in the “Endocrine Disorders” section below), neuropathy, vision impairment (e.g., diabetic retinopathy and blindness), ulcers and impaired wound healing, and
infection (e.g., infectious diseases and disorders as described in the “Infectious Diseases” section below, especially of the urinary tract and skin), carpal tunnel syndrome and Dupuytren's contracture). Additional
highly preferred indications are complications associated with insulin resistance.
Biological Activity: #7: Activation of transcription through cAMP response element in immune cells (such as T-cells).
Exemplary Assay: Assays for the activation of transcription through the cAMP response element are well-known in the art and may be used or routinely modified to assess the ability of polypeptides of the
invention (including antibodies and agonists or antagonists of the invention) to increase cAMP and regulate CREB transcription factors, and modulate expression of genes involved in a wide variety of cell
functions. Exemplary assays for transcription through the cAMP response element that may be used or routinely modified to test cAMP-response element activity of polypeptides of the invention (including
antibodies and agonists or antagonists of the invention) include assays disclosed in Berger et al., Gene 66: 1-10 (1998); Cullen and Malm, Methods in Enzymol 216: 362-368 (1992); Henthorn et al., Proc Natl
Acad Sci USA 85: 6342-6346 (1988); Black et al., Virus Genes 15(2): 105-117 (1997); and Belkowski et al., J Immunol 161(2): 659-665 (1998), the contents of each of which are herein incorporated by reference
in its entirety. T cells that may be used according to these assays are publicly available (e.g., through the ATCC). Exemplary mouse T cells that may be used according to these assays include the CTLL cell
line, which is a suspension culture of IL-2 dependent cytotoxic T cells.
Preferred Indication: Preferred indications include blood disorders (e.g., as described below under “Immune Activity”, “Blood-Related Disorders”, and/or “Cardiovascular Disorders”), and infection (e.g., an
infectious disease as described below under “Infectious Disease”). Preferred indications include autoimmune diseases (e.g., rheumatoid arthritis, systemic lupus erythematosis, multiple sclerosis and/or as
described below), immunodeficiencies (e.g., as described below), boosting a T cell-mediated immune response, and suppressing a T cell-mediated immune response. Additional preferred indications include
inflammation and inflammatory disorders. Highly preferred indications include neoplastic diseases (e.g., leukemia, lymphoma, and/or as described below under “Hyperproliferative Disorders”). Highly
preferred indications include neoplasms and cancers, such as, for example, leukemia, lymphoma (e.g., T cell lymphoma, Burkitt's lymphoma, non-Hodgkins lymphoma, Hodgkin''s disease), melanoma, and
prostate, breast, lung, colon, pancreatic, esophageal, stomach, brain, liver and urinary cancer. Other preferred indications include benign dysproliferative disorders and pre-neoplastic conditions, such as, for
example, hyperplasia, metaplasia, and/or dysplasia. Preferred indications include anemia, pancytopenia, leukopenia, thrombocytopenia, acute lymphocytic anemia (ALL), plasmacytomas, multiple myeloma,
arthritis, AIDS, granulomatous disease, inflammatory bowel disease, sepsis, neutropenia, neutrophilia, psoriasis, suppression of immune reactions to transplanted organs and tissues, hemophilia,
hypercoagulation, diabetes mellitus, endocarditis, meningitis, Lyme Disease, and asthma and allergy.
Biological Activity: #7b: Activation of transcription through cAMP response element in immune cells (such as T-cells).
Exemplary Assay: Assays for the activation of transcription through the cAMP response element are well-known in the art and may be used or routinely modified to assess the ability of polypeptides of the
invention (including antibodies and agonists or antagonists of the invention) to increase cAMP, bind to CREB transcription factor, and modulate expression of genes involved in a wide variety of cell functions.
Exemplary assays for transcription through the cAMP response element that may be used or routinely modified to test cAMP-response element activity of polypeptides of the invention (including antibodies and
agonists or antagonists of the invention) include assays disclosed in Berger et al., Gene 66: 1-10 (1998); Cullen and Malm, Methods in Enzymol 216: 362-368 (1992); Henthorn et al., Proc Natl Acad Sci USA
85: 6342-6346 (1988); Black et al., Virus Genes 15(2): 105-117 (1997); and Belkowski et al., J Immunol 161(2): 659-665 (1998), the contents of each of which are herein incorporated by reference in its entirety. T
cells that may be used according to these assays are publicly available (e.g., through the ATCC). Exemplary human T cells that may be used according to these assays include the JURKAT cell line, which is a
suspension culture of leukemia cells that produce IL-2 when stimulated.
Preferred Indication: Preferred indications include blood disorders (e.g., as described below under “Immune Activity”, “Blood-Related Disorders”, and/or “Cardiovascular Disorders”), and infection (e.g., an
infectious disease as described below under “Infectious Disease”). Preferred indications include autoimmune diseases (e.g., rheumatoid arthritis, systemic lupus erythematosis, multiple sclerosis and/or as
described below), immunodeficiencies (e.g., as described below), boosting a T cell-mediated immune response, and suppressing a T cell-mediated immune response. Additional preferred indications include
inflammation and inflammatory disorders. Highly preferred indications include neoplastic diseases (e.g., leukemia, lymphoma, and/or as described below under “Hyperproliferative Disorders”). Highly
preferred indications include neoplasms and cancers, such as, leukemia, lymphoma (e.g., T cell lymphoma, Burkitt's lymphoma, non-Hodgkins lymphoma, Hodgkin''s disease), melanoma, and prostate, breast,
lung, colon, pancreatic, esophageal, stomach, brain, liver and urinary cancer. Other preferred indications include benign dysproliferative disorders and pre-neoplastic conditions, such as, for example, hyperplasia,
metaplasia, and/or dysplasia. Preferred indications include anemia, pancytopenia, leukopenia, thrombocytopenia, acute lymphocytic anemia (ALL), plasmacytomas, multiple myeloma, arthritis, AIDS,
granulomatous disease, inflammatory bowel disease, sepsis, neutropenia, neutrophilia, psoriasis, suppression of immune reactions to transplanted organs and tissues, hemophilia, hypercoagulation, diabetes
mellitus, endocarditis, meningitis, Lyme Disease, and asthma and allergy.
Biological Activity: #7c: Activation of transcription through cAMP response element in immune cells (such as T-cells).
Exemplary Assay: Assays for the activation of transcription through the cAMP response element are well-known in the art and may be used or routinely modified to assess the ability of polypeptides of the
invention (including antibodies and agonists or antagonists of the invention) to increase cAMP, regulate CREB transcription factors, and modulate expression of genes involved in a wide variety of cell functions.
Exemplary assays for transcription through the cAMP response element that may be used or routinely modified to test cAMP-response element activity of polypeptides of the invention (including antibodies and
agonists or antagonists of the invention) include assays disclosed in Berger et al., Gene 66: 1-10 (1998); Cullen and Malm, Methods in Enzymol 216: 362-368 (1992); Henthorn et al., Proc Natl Acad Sci USA
85: 6342-6346 (1988); Black et al., Virus Genes 15(2): 105-117 (1997); and Belkowski et al, J Immunol 161(2): 659-665 (1998), the contents of each of which are herein incorporated by reference in its entirety.
T cells that may be used according to these assays are publicly available (e.g., through the ATCC). Exemplary mouse T cells that may be used according to these assays include the HT2 cell line, which is a
suspension culture of IL-2 dependent T cells that also respond to IL-4.
Preferred Indication: Preferred indications include blood disorders (e.g., as described below under “Immune Activity”, “Blood-Related Disorders”, and/or “Cardiovascular Disorders”), and infection (e.g., an
infectious disease as described below under “Infectious Disease”). Preferred indications include autoimmune diseases (e.g., rheumatoid arthritis, systemic lupus erythematosis, multiple sclerosis and/or as
described below), immunodeficiencies (e.g., as described below), boosting a T cell-mediated immune response, and suppressing a T cell-mediated immune response. Additional preferred indications include
inflammation and inflammatory disorders. Highly preferred indications include neoplastic diseases (e.g., leukemia, lymphoma, and/or as described below under “Hyperproliferative Disorders”). Highly
preferred indications include neoplasms and cancers, such as, for example, leukemia, lymphoma (e.g., T cell lymphoma, Burkitt's lymphoma, non-Hodgkins lymphoma, Hodgkin''s disease), melanoma, and
prostate, breast, lung, colon, pancreatic, esophageal, stomach, brain, liver and urinary cancer. Other preferred indications include benign dysproliferative disorders and pre-neoplastic conditions, such as, for
example, hyperplasia, metaplasia, and/or dysplasia. Preferred indications include anemia, pancytopenia, leukopenia, thrombocytopenia, acute lymphocytic anemia (ALL), plasmacytomas, multiple myeloma,
arthritis, AIDS, granulomatous disease, inflammatory bowel disease, sepsis, neutropenia, neutrophilia, psoriasis, suppression of immune reactions to transplanted organs and tissues, hemophilia,
hypercoagulation, diabetes mellitus, endocarditis, meningitis, Lyme Disease, and asthma and allergy.
Biological Activity: #8: Production of IL-6
Exemplary Assay: IL-6 FMAT. IL-6 is produced by T cells and has strong effects on B cells. IL-6 participates in IL-4 induced IgE production and increases IgA production (IgA plays a role in mucosal
immunity). IL-6 induces cytotoxic T cells. Deregulated expression of IL-6 has been linked to autoimmune disease, plasmacytomas, myelomas, and chronic hyperproliferative diseases. Assays for
immunomodulatory and differentiation factor proteins produced by a large variety of cells where the expression level is strongly regulated by cytokines, growth factors, and hormones are well known in the art
and may be used or routinely modified to assess the ability of polypeptides of the invention (including antibodies and agonists or antagonists of the invention) to mediate immunomodulation and differentiation
and modulate T cell proliferation and function. Exemplary assays that test for immunomodulatory proteins evaluate the production of cytokines, such as IL-6, and the stimulation and upregulation of T cell
proliferation and functional activities. Such assays that may be used or routinely modified to test immunomodulatory and diffferentiation activity of polypeptides of the invention (including antibodies and
agonists or antagonists of the invention) include assays diclosed in Miraglia et al., J Biomolecular Screening 4: 193-204(1999); Rowland et al., “Lymphocytes: a practical approach” Chapter 6: 138-160 (2000);
and Verhasselt et al., J Immunol 158: 2919-2925 (1997), the contents of each of which are herein incorporated by reference in its entirety. Human dendritic cells that may be used according to these assays may be
isolated using techniques disclosed herein or otherwise known in the art. Human dendritic cells are antigen presenting cells in suspension culture, which, when activated by antigen and/or cytokines, initiate and
upregulate T cell proliferation and functional activities.
Preferred Indication: A highly preferred embodiment of the invention includes a method for stimulating (e.g., increasing) IL-6 production. An alternative highly preferred embodiment of the invention includes
a method for inhibiting (e.g., reducing) IL-6 production. A highly preferrred indication is the stimulation or enhancement of mucosal immunity. Highly preferred indications include blood disorders (e.g., as
described below under “Immune Activity”, “Blood-Related Disorders”, and/or “Cardiovascular Disorders”), and infection (e.g., as described below under “Infectious Disease”). Highly preferred indications
include autoimmune diseases (e.g., rheumatoid arthritis, systemic lupus erythematosis, multiple sclerosis and/or as described below) and immunodeficiencies (e.g., as described below). Highly preferred
indications also include boosting a B cell-mediated immune response and alternatively suppressing a B cell-mediated immune response. Highly preferred indications include inflammation and inflammatory
disorders. Additional highly preferred indications include asthma and allergy. Highly preferred indications include neoplastic diseases (e.g., myeloma, plasmacytoma, leukemia, lymphoma, melanoma, and/or as
described below under “Hyperproliferative Disorders”). Highly preferred indications include neoplasms and cancers, such as, myeloma, plasmacytoma, leukemia, lymphoma, melanoma, and prostate, breast,
lung, colon, pancreatic, esophageal, stomach, brain, liver and urinary cancer. Other preferred indications include benign dysproliferative disorders and pre-neoplastic conditions, such as, for example, hyperplasia,
metaplasia, and/or dysplasia Preferred indications include anemia, pancytopenia, leukopenia, thrombocytopenia, Hodgkin's disease, acute lymphocytic anemia (ALL), multiple myeloma, Burkitt's lymphoma,
arthritis, AIDS, granulomatous disease, inflammatory bowel disease, sepsis, neutropenia, neutrophilia, psoriasis, suppression of immune reactions to transplanted organs and tissues, hemophilia,
hypercoagulation, diabetes mellitus, endocarditis, meningitis, and Lyme Disease. An additonal preferred indication is infection (e.g., an infectious disease as described below under “Infectious Disease”).
Biological Activity: #9b: Regulation of transcription of Malic Enzyme in hepatocytes
Exemplary Assay: Assays for the regulation of transcription of Malic Enzyme are well-known in the art and may be used or routinely modified to assess the ability of polypeptides of the invention (including
antibodies and agonists or antagonists of the invention) to regulate transcription of Malic Enzyme, a key enzyme in lipogenesis. Malic enzyme is involved in lipogenesisand its expression is stimulted by insulin.
ME promoter contains two direct repeat (DR1)-like elements MEp and MEd identified as putative PPAR response elements. ME promoter may also responds to AP1 and other transcription factors. Exemplary
assays that may be used or routinely modified to test for regulation of transcription of Malic Enzyme (in hepatocytes) by polypeptides of the invention (including antibodies and agonists or antagonists of the
invention) include assays disclosed in: Streeper, R. S., et al., Mol Endocrinol, 12(11): 1778-91 (1998); Garcia-Jimenez, C., et al., Mol Endocrinol, 8(10): 1361-9 (1994); Barroso, I., et al., J Biol Chem,
274(25): 17997-8004 (1999); Ijpenberg, A., et al., J Biol Chem, 272(32): 20108-20117 (1997); Berger, et al., Gene 66: 1-10 (1988); and, Cullen, B., et al., Methods in Enzymol. 216: 362-368 (1992), the contents of
each of which is herein incorporated by reference in its entirety. Hepatocytes that may be used according to these assays are publicly available (e.g., through the ATCC) and/or may be routinely generated.
Exemplary hepatocytes that may be used according to these assays includes the mouse 3T3-L1 cell line. 3T3-L1 is a mouse preadipocyte cell line (adherent). It is a continuous substrain of 3T3 fibroblasts
developed through clonal isolation. Cells undergo a pre-adipocyte to adipose-like conversion under appropriate differentiation culture conditions.
Preferred Indication: A highly preferred indication is diabetes mellitus. An additional highly preferred indication is a complication associated with diabetes (e.g., diabetic retinopathy, diabetic
nephropathy, kidney disease (e.g., renal failure, nephropathy and/or other diseases and disorders as described in the “Renal Disorders” section below), diabetic neuropathy, nerve disease and nerve damage (e.g.,
due to diabetic neuropathy), blood vessel blockage, heart disease, stroke, impotence (e.g., due to diabetic neuropathy or blood vessel blockage), seizures, mental confusion, drowsiness, nonketotic hyperglycemic-
hyperosmolar coma, cardiovascular disease (e.g., heart disease, atherosclerosis, microvascular disease, hypertension, stroke, and other diseases and disorders as described in the “Cardiovascular Disorders” section
below), dyslipidemia, endocrine disorders (as described in the “Endocrine Disorders” section below), neuropathy, vision impairment (e.g., diabetic retinopathy and blindness), ulcers and impaired wound healing,
and infection (e.g., infectious diseases and disorders as described in the “Infectious Diseases” section below, especially of the urinary tract and skin), carpal tunnel syndrome and Dupuytren's contracture).
An additional highly preferred indication is obesity and/or complications associated with obesity. Additional highly preferred indications include weight loss or alternatively, weight gain. Aditional
highly preferred indications are complications associated with insulin resistance.
Biological Activity: #9: Regulation of transcription of Malic Enzyme in adipocytes
Exemplary Assay: Assays for the regulation of transcription of Malic Enzyme are well-known in the art and may be used or routinely modified to assess the ability of polypeptides of the invention (including
antibodies and agonists or antagonists of the invention) to regulate transcription of Malic Enzyme, a key enzyme in lipogenesis. Malic enzyme is involved in lipogenesisand its expression is stimulted by insulin.
ME promoter contains two direct repeat (DR1)-like elements MEp and MEd identified as putative PPAR response elements. ME promoter may also responds to AP1 and other transcription factors. Exemplary
assays that may be used or routinely modified to test for regulation of transcription of Malic Enzyme (in adipoocytes) by polypeptides of the invention (including antibodies and agonists or antagonists of the
invention) include assays disclosed in: Streeper, R. S., et al., Mol Endocrinol, 12(11): 1778-91 (1998); Garcia-Jimenez, C., et al., Mol Endocrinol, 8(10): 1361-9 (1994); Barroso, I., et al., J Biol Chem,
274(25): 17997-8004 (1999); Ijpenberg, A., et al., J Biol Chem, 272(32): 20108-20117 (1997); Berger, et al., Gene 66: 1-10 (1988); and, Cullen, B., et al., Methods in Enzymol. 216: 362-368 (1992), the contents of
each of which is herein incorporated by reference in its entirety. Hepatocytes that may be used according to these assays are publicly available (e.g., through the ATCC) and/or may be routinely generated.
Exemplary hepatocytes that may be used according to these assays includes the H4IIE rat liver hepatoma cell line.
Preferred Indication: A highly preferred indication is diabetes mellitus. An additional highly preferred indication is a complication associated with diabetes (e.g., diabetic retinopathy, diabetic
nephropathy, kidney disease (e.g., renal failure, nephropathy and/or other diseases and disorders as described in the “Renal Disorders” section below), diabetic neuropathy, nerve disease and nerve damage (e.g.,
due to diabetic neuropathy), blood vessel blockage, heart disease, stroke, impotence (e.g., due to diabetic neuropathy or blood vessel blockage), seizures, mental confusion, drowsiness, nonketotic hyperglycemic-
hyperosmolar coma, cardiovascular disease (e.g., heart disease, atherosclerosis, microvascular disease, hypertension, stroke, and other diseases and disorders as described in the “Cardiovascular Disorders” section
below), dyslipidemia, endocrine disorders (as described in the “Endocrine Disorders” section below), neuropathy, vision impairment (e.g., diabetic retinopathy and blindness), ulcers and impaired wound healing,
and infection (e.g., infectious diseases and disorders as described in the “Infectious Diseases” section below, especially of the urinary tract and skin), carpal tunnel syndrome and Dupuytren's contracture).
An additional highly preferred indication is obesity and/or complications associated with obesity. Additional highly preferred indications include weight loss or alternatively, weight gain. Aditional
highly peferred indications are complications associated with insulin resistance.
Biological Activity: #10: Activation of Endothelial Cell p38 or JNK Signaling Pathway.
Exemplary Assay: Kinase assay. JNK and p38 kinase assays for signal transduction that regulate cell proliferation, activation, or apoptosis are well known in the art and may be used or routinely modified to
assess the ability of polypeptides of the invention (including antibodies and agonists or antagonists of the invention) to promote or inhibit cell proliferation, activation, and apoptosis. Exemplary assays for JNK
and p38 kinase activity that may be used or routinely modified to test JNK and p38 kinase-induced activity of polypeptides of the invention (including antibodies and agonists or antagonists of the invention)
include the assays disclosed in Forrer et al., Biol Chem 379(8-9): 1101-1110 (1998); Gupta et al., Exp Cell Res 247(2): 495-504 (1999); Kyriakis JM, Biochem Soc Symp 64: 29-48 (1999); Chang and Karin,
Nature 410(6824): 37-40 (2001); and Cobb MH, Prog Biophys Mol Biol 71(3-4): 479-500 (1999); the contents of each of which are herein incorporated by reference in its entirety. Endothelial cells that may be
used according to these assays are publicly available (e.g., through the ATCC). Exemplary endothelial cells that may be used according to these assays include human umbilical vein endothelial cells (HUVEC),
which are endothelial cells which line venous blood vessels, and are involved in functions that include, but are not limited to, angiogenesis, vascular permeability, vascular tone, and immune cell extravasation.
Preferred Indication: A highly preferred embodiment of the invention includes a method for stimulating endothelial cell growth. An alternative highly preferred embodiment of the invention includes a
method for inhibiting endothelial cell growth. A highly preferred embodiment of the invention includes a method for stimulating endothelial cell proliferation. An alternative highly preferred embodiment of
the invention includes a method for inhibiting endothelial cell proliferation. A highly preferred embodiment of the invention includes a method for stimulating apoptosis of endothelial cells. An alternative
highly preferred embodiment of the invention includes a method for inhibiting (e.g., decreasing) apoptosis of endothelial cells. A highly preferred embodiment of the invention includes a method for
stimulating (e.g., increasing) endothelial cell activation. An altenative highly preferred embodiment of the invention includes a method for inhibiting (e.g., decreasing) the activation of and/or inactivating
endothelial cells. A highly preferred embodiment of the invention includes a method for stimulating angiogenisis. An alternative highly preferred embodiment of the invention includes a method for
inhibiting angiogenesis. A highly preferred embodiment of the invention includes a method for reducing cardiac hypertrophy. An alternative highly preferred embodiment of the invention includes a method
for inducing cardiac hypertrophy. Highly preferred indications include neoplastic diseases (e.g., as described below under “Hyperproliferative Disorders”), and disorders of the cardiovascular system (e.g.,
heart disease, congestive heart failure, hypertension, aortic stenosis, cardiomyopathy, valvular regurgitation, left ventricular dysfunction, atherosclerosis and atherosclerotic vascular disease, diabetic nephropathy,
intracardiac shunt, cardiac hypertrophy, myocardial infarction, chronic hemodynamic overload, and/or as described below under “Cardiovascular Disorders”). Highly preferred indications include
cardiovascular, endothelial and/or angiogenic disorders (e.g., systemic disorders that affect vessels such as diabetes mellitus, as well as diseases of the vessels themselves, such as of the arteries, capillaries, veins
and/or lymphatics). Highly preferred are indications that stimulate angiogenesis and/or cardiovascularization. Highly preferred are indications that inhibit angiogenesis and/or cardiovascularization. Highly
preferred indications include antiangiogenic activity to treat solid tumors, leukemias, and Kaposi''s sarcoma, and retinal disorders. Highly preferred indications include neoplasms and cancer, such as, Kaposi''s
sarcoma, hemangioma (capillary and cavernous), glomus tumors, telangiectasia, bacillary angiomatosis, hemangioendothelioma, angiosarcoma, haemangiopericytoma, lymphangioma, lymphangiosarcoma.
Highly preferred indications also include cancers such as, prostate, breast, lung, colon, pancreatic, esophageal, stomach, brain, liver, and urinary cancer. Preferred indications include benign dysproliferative
disorders and pre-neoplastic conditions, such as, for example, hyperplasia, metaplasia, and/or dysplasia. Highly preferred indications also include arterial disease, such as, atherosclerosis, hypertension,
coronary artery disease, inflammatory vasculitides, Reynaud''s disease and Reynaud''s phenomenom, aneurysms, restenosis; venous and lymphatic disorders such as thrombophlebitis, lymphangitis, and
lymphedema; and other vascular disorders such as peripheral vascular disease, and cancer. Highly preferred indications also include trauma such as wounds, burns, and injured tissue (e.g., vascular injury such
as, injury resulting from balloon angioplasty, and atheroschlerotic lesions), implant fixation, scarring, ischemia reperfusion injury, rheumatoid arthritis, cerebrovascular disease, renal diseases such as acute renal
failure, and osteoporosis. Additional highly preferred indications include stroke, graft rejection, diabetic or other retinopathies, thrombotic and coagulative disorders, vascularitis, lymph angiogenesis, sexual
disorders, age-related macular degeneration, and treatment/prevention of endometriosis and related conditions. Additional highly preferred indications include fibromas, heart disease, cardiac arrest, heart valve
disease, and vascular disease. Preferred indications include blood disorders (e.g., as described below under “Immune Activity”, “Blood-Related Disorders”, and/or “Cardiovascular Disorders”). Preferred
indications include autoimmune diseases (e.g., rheumatoid arthritis, systemic lupus erythematosis, multiple sclerosis and/or as described below) and immunodeficiencies (e.g., as described below). Additional
preferred indications include inflammation and inflammatory disorders (such as acute and chronic inflammatory diseases, e.g., inflammatory bowel disease and Crohn's disease), and pain management.
Biological Activity: #11: Activation of transcription through CD28 response element in immune cells (such as T-cells).
Exemplary Assay: Assays for the activation of transcription through the CD28 response element are well-known in the art and may be used or routinely modified to assess the ability of polypeptides of the
invention (including antibodies and agonists or antagonists of the invention) to stimulate IL-2 expression in T cells. Exemplary assays for transcription through the CD28 response element that may be used or
routinely modified to test CD28-response element activity of polypeptides of the invention (including antibodies and agonists or antagonists of the invention) include assays disclosed in Berger et al., Gene 66: 1-10
(1998); Cullen and Malm, Methods in Enzymol 216: 362-368 (1992); Henthorn et al., Proc Natl Acad Sci USA 85: 6342-6346 (1988); McGuire and Iacobelli, J Immunol 159(3): 1319-1327 (1997); Parra et al.,
J Immunol 166(4): 2437-2443 (2001); and Butscher et al., J Biol Chem 3(1): 552-560 (1998), the contents of each of which are herein incorporated by reference in its entirety. T cells that may be used according
to these assays are publicly available (e.g., through the ATCC). Exemplary human T cells that may be used according to these assays include the SUPT cell line, which is a suspension culture of IL-2 and IL-4
responsive T cells.
Preferred Indication: A highly preferred embodiment of the invention includes a method for stimulating T cell proliferation. An alternative highly preferred embodiment of the invention includes a method
for inhibiting T cell proliferation. A highly preferred embodiment of the invention includes a method for activating T cells. An alternative highly preferred embodiment of the invention includes a method for
inhibiting the activation of and/or inactivating T cells. A highly preferred embodiment of the invention includes a method for stimulating (e.g., increasing) IL-2 production. An alternative highly preferred
embodiment of the invention includes a method for inhibiting (e.g., reducing) IL-2 production. Additional highly preferred indications include inflammation and inflammatory disorders. Highly preferred
indications include autoimmune diseases (e.g., rheumatoid arthritis, systemic lupus erythematosis, multiple sclerosis and/or as described below), immunodeficiencies (e.g., as described below), boosting a T cell-
mediated immune response, and suppressing a T cell-mediated immune response. Highly preferred indications include neoplastic diseases (e.g., melanoma, renal cell carcinoma, leukemia, lymphoma, and/or as
described below under “Hyperproliferative Disorders”). Highly preferred indications include neoplasms and cancers, such as, for example, melanoma (e.g., metastatic melanoma), renal cell carcinoma (e.g.,
metastatic renal cell carcinoma), leukemia, lymphoma (e.g,. T cell lymphoma), and prostate, breast, lung, colon, pancreatic, esophageal, stomach, brain, liver and urinary cancer. Other preferred indications
include benign dysproliferative disorders and pre-neoplastic conditions, such as, for example, hyperplasia, metaplasia, and/or dysplasia. A highly preferred indication includes infection (e.g., AIDS,
tuberculosis, infections associated with granulomatous disease, and osteoporosis, and/or as described below under “Infectious Disease”). A highly preferred indication is AIDS. Additional highly preferred
indications include suppression of immune reactions to transplanted organs and/or tissues, uveitis, psoriasis, and tropical spastic paraparesis. Preferred indications include blood disorders (e.g., as described
below under “Immune Activity”, “Blood-Related Disorders”, and/or “Cardiovascular Disorders”). Preferred indications also include anemia, pancytopenia, leukopenia, thrombocytopenia, Hodgkin's disease,
acute lymphocytic anemia (ALL), plasmacytomas, multiple myeloma, Burkitt's lymphoma, arthritis, granulomatous disease, inflammatory bowel disease, sepsis, neutropenia, neutrophilia, hemophilia,
hypercoagulation, diabetes mellitus, endocarditis, meningitis, Lyme Disease, asthma and allergy.
Biological Activity: #11b: Activation of transcription through CD28 response element in immune cells (such as T-cells).
Exemplary Assay: Assays for the activation of transcription through the CD28 response element are well-known in the art and may be used or routinely modified to assess the ability of polypeptides of the
invention (including antibodies and agonists or antagonists of the invention) to stimulate IL-2 expression in T cells. Exemplary assays for transcription through the CD28 response element that may be used or
routinely modified to test CD28-response element activity of polypeptides of the invention (including antibodies and agonists or antagonists of the invention) include assays disclosed in Berger et al., Gene 66: 1-10
(1998); Cullen and Malm, Methods in Enzymol 216: 362-368 (1992); Henthorn et al., Proc Natl Acad Sci USA 85: 6342-6346 (1988); McGuire and Iacobelli, J Immunol 159(3): 1319-1327 (1997); Parra et al.,
J Immunol 166(4): 2437-2443 (2001); and Butscher et al., J Biol Chem 3(1): 552-560 (1998), the contents of each of which are herein incorporated by reference in its entirety. T cells that may be used according
to these assays are publicly available (e.g., through the ATCC). Exemplary human T cells that may be used according to these assays include the JURKAT cell line, which is a suspension culture of leukemia
cells that produce IL-2 when stimulated.
Preferred Indication: A highly preferred embodiment of the invention includes a method for stimulating T cell proliferation. An alternative highly preferred embodiment of the invention includes a method
for inhibiting T cell proliferation. A highly preferred embodiment of the invention includes a method for activating T cells. An alternative highly preferred embodiment of the invention includes a method for
inhibiting the activation of and/or inactivating T cells. A highly preferred embodiment of the invention includes a method for stimulating (e.g., increasing) IL-2 production. An alternative highly preferred
embodiment of the invention includes a method for inhibiting (e.g., reducing) IL-2 production. Additional highly preferred indications include inflammation and inflammatory disorders. Highly preferred
indications include autoimmune diseases (e.g., rheumatoid arthritis, systemic lupus erythematosis, multiple sclerosis and/or as described below), immunodeficiencies (e.g., as described below), boosting a T cell-
mediated immune response, and suppressing a T cell-mediated immune response. An additional highly preferred indication includes infection (e.g., AIDS, and/or as described below under “Infectious Disease”).
Highly preferred indications include neoplastic diseases (e.g., melanoma, renal cell carcinoma, leukemia, lymphoma, and/or as described below under “Hyperproliferative Disorders”). Highly preferred
indications include neoplasms and cancers, such as, for example, melanoma (e.g., metastatic melanoma), renal cell carcinoma (e.g., metastatic renal cell carcinoma), leukemia, lymphoma (e.g., T cell lymphoma),
and prostate, breast, lung, colon, pancreatic, esophageal, stomach, brain, liver and urinary cancer. Other preferred indications include benign dysproliferative disorders and pre-neoplastic conditions, such as, for
example, hyperplasia, metaplasia, and/or dysplasia. A highly preferred indication is infection e.g., tuberculosis, infections associated with granulomatous disease, and osteoporosis, and/or an infectious disease
as described below under “Infectious Disease”). A highly preferred indication is AIDS. Additional highly preferred indications include suppression of immune reactions to transplanted organs and/or tissues,
uveitis, psoriasis, and tropical spastic paraparesis. Preferred indications include blood disorders (e.g., as described below under “Immune Activity”, “Blood-Related Disorders”, and/or “Cardiovascular
Disorders”). Preferred indications also include anemia, pancytopenia, leukopenia, thrombocytopenia, Hodgkin's disease, acute lymphocytic anemia (ALL), plasmacytomas, multiple myeloma, Burkitt's
lymphoma, arthritis, granulomatous disease, inflammatory bowel disease, sepsis, neutropenia, neutrophilia, hemophilia, hypercoagulation, diabetes mellitus, endocarditis, meningitis, Lyme Disease, asthma and
allergy.
Biological Activity: #12b: Activation of transcription through NFAT response element in immune cells (such as natural killer cells).
Exemplary Assay: Assays for the activation of transcription through the Nuclear Factor of Activated T cells (NFAT) response element are well-known in the art and may be used or routinely modified to assess
the ability of polypeptides of the invention (including antibodies and agonists or antagonists of the invention) to regulate NFAT transcription factors and modulate expression of genes involved in
immunomodulatory functions. Exemplary assays for transcription through the NFAT response element that may be used or routinely modified to test NFAT-response element activity of polypeptides of the
invention (including antibodies and agonists or antagonists of the invention) include assays disclosed in Berger et al., Gene 66: 1-10 (1998); Cullen and Malm, Methods in Enzymol 216: 362-368 (1992); Henthorn
et al., Proc Natl Acad Sci USA 85: 6342-6346 (1988); Aramburu et al., J Exp Med 182(3): 801-810 (1995); De Boer et al., Int J Biochem Cell Biol 31(10): 1221-1236 (1999); Fraser et al., Eur J Immunol
29(3): 838-844 (1999); and Yeseen et al., J Biol Chem 268(19): 14285-14293 (1993), the contents of each of which are herein incorporated by reference in its entirety. NK cells that may be used according to these
assays are publicly available (e.g., through the ATCC). Exemplary human NK cells that may be used according to these assays include the NK-YT cell line, which is a human natural killer cell line with cytolytic
and cytotoxic activity.
Preferred Indication: Highly preferred indications include blood disorders (e.g., as described below under “Immune Activity”, “Blood-Related Disorders”, and/or “Cardiovascular Disorders”). Highly
preferred indications include autoimmune diseases (e.g., rheumatoid arthritis, systemic lupus erythematosis, multiple sclerosis and/or as described below), immunodeficiencies (e.g., as described below), boosting
a T cell-mediated immune response, and suppressing a T cell-mediated immune response. Additional highly preferred indications include inflammation and inflammatory disorders. An additional highly
preferred indication is infection (e.g., an infectious disease as described below under “Infectious Disease”). Preferred indications include neoplastic diseases (e.g., leukemia, lymphoma, and/or as described
below under “Hyperproliferative Disorders”). Preferred indications include neoplasms and cancers, such as, for example, leukemia, lymphoma, and prostate, breast, lung, colon, pancreatic, esophageal, stomach,
brain, liver and urinary cancer. Other preferred indications include benign dysproliferative disorders and pre-neoplastic conditions, such as, for example, hyperplasia, metaplasia, and/or dysplasia. Preferred
indications also include anemia, pancytopenia, leukopenia, thrombocytopenia, Hodgkin's disease, acute lymphocytic anemia (ALL), plasmacytomas, multiple myeloma, Burkitt's lymphoma, arthritis, AIDS,
granulomatous disease, inflammatory bowel disease, sepsis, neutropenia, neutrophilia, psoriasis, suppression of immune reactions to transplanted organs and tissues, hemophilia, hypercoagulation, diabetes
mellitus, endocarditis, meningitis, Lyme Disease, asthma and allergy.
Biological Activity: #12: Activation of transcription through NFKB response element in immune cells (such as natural killer cells).
Exemplary Assay: Assays for the activation of transcription through the NFKB response element are well-known in the art and may be used or routinely modified to assess the ability of polypeptides of the
invention (including antibodies and agonists or antagonists of the invention) to regulate NFKB transcription factors and modulate expression of immunomodulatory genes. Exemplary assays for transcription
through the NFKB response element that may be used or rountinely modified to test NFKB-response element activity of polypeptides of the invention (including antibodies and agonists or antagonists of the
invention) include assays disclosed in Berger et al., Gene 66: 1-10 (1998); Cullen and Malm, Methods in Enzymol 216: 362-368 (1992); Henthorn et al., Proc Natl Acad Sci USA 85: 6342-6346 (1988); Valle
Blazquez et al, Immunology 90(3): 455-460 (1997); Aramburau et al., J Exp Med 82(3): 801-810 (1995); and Fraser et al., 29(3): 838-844 (1999), the contents of each of which are herein incorporated by reference
in its entirety. NK cells that may be used according to these assays are publicly available (e.g., through the ATCC). Exemplary NK cells that may be used according to these assays include the NK-YT cell line,
which is a human natural killer cell line with cytolytic and cytotoxic activity.
Preferred Indication: Highly preferred indications include inflammation and inflammatory disorders. Highly preferred indications include blood disorders (e.g., as described below under “Immune
Activity”, “Blood-Related Disorders”, and/or “Cardiovascular Disorders”). Highly preferred indications include autoimmune diseases (e.g., rheumatoid arthritis, systemic lupus erythematosis, multiple sclerosis
and/or as described below), and immunodeficiencies (e.g., as described below). An additional highly preferred indication is infection (e.g., AIDS, and/or an infectious disease as described below under “Infectious
Disease”). Highly preferred indications include neoplastic diseases (e.g., melanoma, leukemia, lymphoma, and/or as described below under “Hyperproliferative Disorders”). Highly preferred indications
include neoplasms and cancers, such as, for example, melanoma, renal cell carcinoma, leukemia, lymphoma, and prostate, breast, lung, colon, pancreatic, esophageal, stomach, brain, liver and urinary cancer.
Other preferred indications include benign dysproliferative disorders and pre-neoplastic conditions, such as, for example, hyperplasia, metaplasia, and/or dysplasia. Preferred indications also include anemia,
pancytopenia, leukopenia, thrombocytopenia, Hodgkin's disease, acute lymphocytic anemia (ALL), plasmacytomas, multiple myeloma, Burkitt's lymphoma, arthritis, AIDS, granulomatous disease, inflammatory
bowel disease, sepsis, neutropenia, neutrophilia, psoriasis, hemophilia, hypercoagulation, diabetes mellitus, endocarditis, meningitis, Lyme Disease, suppression of immune reactions to transplanted organs,
asthma and allergy.
Biological Activity: #13: Activation of transcription through serum response element in immune cells (such as natural killer cells).
Exemplary Assay: Assays for the activation of transcription through the Serum Response Element (SRE) are well-known in the art and may be used or routinely modified to assess the ability of polypeptides of
the invention (including antibodies and agonists or antagonists of the invention) to regulate serum response factors and modulate the expression of genes involved in growth and upregulate the function of
growth-related genes in many cell types. Exemplary assays for transcription through the SRE that may be used or routinely modified to test SRE activity of the polypeptides of the invention (including antibodies
and agonists or antagonists of the invention) include assays disclosed in Berger et al., Gene 66: 1-10 (1998); Cullen and Malm, Methods in Enzymol 216: 362-368 (1992); Henthorn et al., Proc Natl Acad Sci USA
85: 6342-6346 (1988); Benson et al., J Immunol 153(9): 3862-3873 (1994); and Black et al., Virus Genes 12(2): 105-117 (1997), the content of each of which are herein incorporated by reference in its entirety. T
cells that may be used according to these assays are publicly available (e.g., through the ATCC). Exemplary T cells that may be used according to these assays include the NK-YT cell line, which is a human
natural killer cell line with cytolytic and cytotoxic activity.
Preferred Indication: A preferred embodiment of the invention includes a method for inhibiting (e.g., reducing) TNF alpha production. An alternative highly preferred embodiment of the invention includes a
method for stimulating (e.g., increasing) TNF alpha production. Preferred indications include blood disorders (e.g., as described below under “Immune Activity”, “Blood-Related Disorders”, and/or
“Cardiovascular Disorders”), Highly preferred indications include autoimmune diseases (e.g., rheumatoid arthritis, systemic lupus erythematosis, Crohn''s disease, multiple sclerosis and/or as described below),
immunodeficiencies (e.g., as described below), boosting a T cell-mediated immune response, and suppressing a T cell-mediated immune response. Additional highly preferred indications include inflammation
and inflammatory disorders, and treating joint damage in patients with rheumatoid arthritis. An additional highly preferred indication is sepsis. Highly preferred indications include neoplastic diseases (e.g.,
leukemia, lymphoma, and/or as described below under “Hyperproliferative Disorders”). Additionally, highly preferred indications include neoplasms and cancers, such as, for example, leukemia, lymphoma,
melanoma, glioma (e.g., malignant glioma), solid tumors, and prostate, breast, lung, colon, pancreatic, esophageal, stomach, brain, liver and urinary, cancer. Other preferred indications include benign
dysproliferative disorders and pre-neoplastic conditions, such as, for example, hyperplasia, metaplasia, and/or dysplasia. Preferred indications include anemia, pancytopenia, leukopenia, thrombocytopenia,
Hodgkin's disease, acute lymphocytic anemia (ALL), plasmacytomas, multiple myeloma, Burkitt's, lymphoma, arthritis, AIDS, granulomatous disease, inflammatory bowel disease, neutropenia, neutrophilia,
psoriasis, suppression of immune reactions to transplated organs and tissues, hemophilia, hypercoagulation, diabetes mellitus, endocarditis, meningitis, Lyme Disease, cardiac reperfusion injury, and asthma and
allergy. An additional preferred indication is infection (e.g., an infectious disease as described below under “Infectious Disease”).
Biological Activity: #14: Activation of transcription through AP1 response element in immune cells (such as T-cells).
Exemplary Assay: Assays for the activation of transcription through the AP1 response element are well-known in the art and may be used or routinely modified to assess the ability of polypeptides of the
invention (including antibodies and agonists or antagonists of the invention) to modulate growth and other cell functions. Exemplary assays for transcription through the AP1 response element that may be used
or routinely modified to test AP1-response element activity of polypeptides of the invention (including antibodies and agonists or antagonists of the invention) include assays disclosed in Berger et al., Gene 66: 1-10
(1988); Cullen and Malm, Methods in Enzymol 216: 362-368 (1992); Henthorn et al., Proc Natl Acad Sci USA 85: 6342-6346 (1988); Rellahan et al., J Biol Chem 272(49): 30806-30811 (1997); Chang et al.,
Mol Cell Biol 18(9): 4986-4993 (1998); and Fraser et al., Eur J Immunol 29(3): 838-844 (1999), the contents of each of which are herein incorporated by reference in its entirety. Human T cells that may be used
according to these assays are publicly available (e.g., through the ATCC). Exemplary human T cells that may be used according to these assays include the SUPT cell line, which is an IL-2 and IL-4 responsive
suspension-culture cell line.
Preferred Indication: Preferred indications include neoplastic diseases (e.g., as described below under “Hyperproliferative Disorders”), blood disorders (e.g., as described below under “Immune Activity”,
“Cardiovascular Disorders”, and/or “Blood-Related Disorders”), and infection (e.g., an infectious disease as described below under “Infectious Disease”). Highly preferred indications include autoimmune
diseases (e.g., rheumatoid arthritis, systemic lupus erythematosis, multiple sclerosis and/or as described below) and immunodeficiencies (e.g., as described below). Additional highly preferred indications include
inflammation and inflammatory disorders. Highly preferred indications also include neoplastic diseases (e.g., leukemia, lymphoma, and/or as described below under “Hyperproliferative Disorders”). Highly
preferred indications include neoplasms and cancers, such as, leukemia, lymphoma, prostate, breast, lung, colon, pancreatic, esophageal, stomach, brain, liver, and urinary cancer. Other preferred indications
include benign dysproliferative disorders and pre-neoplastic conditions, such as, for example, hyperplasia, metaplasia, and/or dysplasia. Preferred indications include arthritis, asthma, AIDS, allergy, anemia,
pancytopenia, leukopenia, thrombocytopenia, Hodgkin's disease, acute lymphocytic anemia (ALL), plasmacytomas, multiple myeloma, Burkitt's lymphoma, granulomatous disease, inflammatory bowel disease,
sepsis, psoriasis, suppression of immune reactions to transplanted organs and tissues, endocarditis, meningitis, and Lyme Disease.
Biological Activity: #14b: Activation of transcription through AP1 response element in immune cells (such as T-cells).
Exemplary Assay: Assays for the activation of transcription through the AP1 response element are known in the art and may be used or routinely modified to assess the ability of polypeptides of the invention
(including antibodies and agonists or antagonists of the invention) to modulate growth and other cell functions. Exemplary assays for transcription through the AP1 response element that may be used or routinely
modified to test AP1-response element activity of polypeptides of the invention (including antibodies and agonists or antagonists of the invention) include assays disclosed in Berger et al., Gene 66: 1-10 (1988);
Cullen and Malm, Methods in Enzymol 216: 362-368 (1992); Henthorn et al., Proc Natl Acad Sci USA 85: 6342-6346 (1988); Rellahan et al., J Biol Chem 272(49): 30806-30811 (1997); Chang et al., Mol Cell
Biol 18(9): 4986-4993 (1998); and Fraser et al., Eur J Immunol 29(3): 838-844 (1999), the contents of each of which are herein incorporated by reference in its entirety. T cells that may be used according to these
assays are publicly available (e.g., through the ATCC). Exemplary mouse T cells that may be used according to these assays include the CTLL cell line, which is an IL-2 dependent suspension-culture cell line
with cytotoxic activity.
Preferred Indication: Preferred indications include neoplastic diseases (e.g., as described below under “Hyperproliferative Disorders”), blood disorders (e.g., as described below under “Immune Activity”,
“Cardiovascular Disorders”, and/or “Blood-Related Disorders”), and infection (e.g., an infectious disease as described below under “Infectious Disease”). Highly preferred indications include autoimmune
diseases (e.g., rheumatoid arthritis, systemic lupus erythematosis, multiple sclerosis and/or as described below) and immunodeficiencies (e.g., as described below). Additional highly preferred indications include
inflammation and inflammatory disorders. Highly preferred indications also include neoplastic diseases (e.g., leukemia, lymphoma, and/or as described below under “Hyperproliferative Disorders”). Highly
preferred indications include neoplasms and cancers, such as, leukemia, lymphoma, prostate, breast, lung, colon, pancreatic, esophageal, stomach, brain, liver, and urinary cancer. Other preferred indications
include benign dysproliferative disorders and pre-neoplastic conditions, such as, for example, hyperplasia, metaplasia, and/or dysplasia. Preferred indications include arthritis, asthma, AIDS, allergy, anemia,
pancytopenia, leukopenia, thrombocytopenia, Hodgkin's disease, acute lymphocytic anemia (ALL), plasmacytomas, multiple myeloma, Burkitt's lymphoma, granulomatous disease, inflammatory bowel disease,
sepsis, psoriasis, suppression of immune reactions to transplanted organs and tissues, endocarditis, meningitis, and Lyme Disease.
Biological Activity: #15: Activation of transcription through NFAT response element in immune cells (such as T-cells).
Exemplary Assay: Assays for the activation of transcription through the Nuclear Factor of Activated T cells (NFAT) response element are well-known in the art and may be used or routinely modified to assess
the ability of polypeptides of the invention (including antibodies and agonists or antagonists of the invention) to regulate NFAT transcription factors and modulate expression of genes involved in
immunomodulatory functions. Exemplary assays for transcription through the NFAT response element that may be used or routinely modified to test NFAT-response element activity of polypeptides of the
invention (including antibodies and agonists or antagonists of the invention) include assays disclosed in Berger et al., Gene 66: 1-10 (1998); Cullen and Malm, Methods in Enzymol 216: 362-368 (1992); Henthorn
et al., Proc Natl Acad Sci USA 85: 6342-6346 (1988); Serfling et al., Biochim Biophys Acta 1498(1): 1-18 (2000); De Boer et al., Int J Biochem Cell Biol 31(10): 1221-1236 (1999); Fraser et al., Eur J Immunol
29(3): 838-844 (1999); and Yeseen et al., J Biol Chem 268(19): 14285-14293 (1993), the contents of each of which are herein incorporated by reference in its entirety. T cells that may be used according to these
assays are publicly available (e.g., through the ATCC). Exemplary human T cells that may be used according to these assays include the SUPT cell line, which is a suspension culture of IL-2 and IL-4 responsive
T cells.
Preferred Indication: Highly preferred indications include blood disorders (e.g., as described below under “Immune Activity”, “Blood-Related Disorders”, and/or “Cardiovascular Disorders”). Highly
preferred indications include autoimmune diseases (e.g., rheumatoid arthritis, systemic lupus erythematosis, multiple sclerosis and/or as described below), immunodeficiencies (e.g., as described below), boosting
a T cell-mediated immune response, and suppressing a T cell-mediated immune response. Additional highly preferred indications include inflammation and inflammatory disorders. An additional highly
preferred indication is infection (e.g., an infectious disease as described below under “Infectious Disease”). Preferred indications include neoplastic diseases (e.g., leukemia, lymphoma, and/or as described
below under “Hyperproliferative Disorders”). Preferred indications include neoplasms and cancers, such as, for example, leukemia, lymphoma, and prostate, breast, lung, colon, pancreatic, esophageal, stomach,
brain, liver and urinary cancer. Other preferred indications include benign dysproliferative disorders and pre-neoplastic conditions, such as, for example, hyperplasia, metaplasia, and/or dysplasia. Preferred
indications also include anemia, pancytopenia, leukopenia, thrombocytopenia, Hodgkin's disease, acute lymphocytic anemia (ALL), plasmacytomas, multiple myeloma, Burkitt's lymphoma, arthritis, AIDS,
granulomatous disease, inflammatory bowel disease, sepsis, neutropenia, neutrophilia, psoriasis, suppression of immune reactions to transplanted organs and tissues, hemophilia, hypercoagulation, diabetes
mellitus, endocarditis, meningitis, Lyme Disease, asthma and allergy.
Biological Activity: #16b: Activation of transcription through NFKB response element in immune cells (such as T-cells).
Exemplary Assay: Assays for the activation of transcription through the NFKB response element are well-known in the art and may be used or routinely modified to assess the ability of polypeptides of the
invention (including antibodies and agonists or antagonists of the invention) to regulate NFKB transcription factors and modulate expression of immunomodulatory genes. Exemplary assays for transcription
through the NFKB response element that may be used or rountinely modified to test NFKB-response element activity of polypeptides of the invention (including antibodies and agonists or antagonists of the
invention) include assays disclosed in Berger et al., Gene 66: 1-10 (1998); Cullen and Malm, Methods in Enzymol 216: 362-368 (1992); Henthorn et al., Proc Natl Acad Sci USA 85: 6342-6346 (1988); Black et
al., Virus Gnes 15(2): 105-117 (1997); and Fraser et al., 29(3): 838-844 (1999), the contents of each of which are herein incorporated by reference in its entirety. T cells that may be used according to these assays
are publicly available (e.g., through the ATCC). Exemplary human T cells that may be used according to these assays include the SUPT cell line, which is a suspension culture of IL-2 and IL-4 responsive T
cells.
Preferred Indication: Highly preferred indications include inflammation and inflammatory disorders. Highly preferred indications include blood disorders (e.g., as described below under “Immune
Activity”, “Blood-Related Disorders”, and/or “Cardiovascular Disorders”). Highly preferred indications include autoimmune diseases (e.g., rheumatoid arthritis, systemic lupus erythematosis, multiple sclerosis
and/or as described below), and immunodeficiencies (e.g., as described below). An additional highly preferred indication is infection (e.g., AIDS, and/or an infectious disease as described below under
“Infectious Disease”). Highly preferred indications include neoplastic diseases (e.g., melanoma, leukemia, lymphoma, and/or as described below under “Hyperproliferative Disorders”). Highly preferred
indications include neoplasms and cancers, such as, melanoma, renal cell carcinoma, leukemia, lymphoma, and prostate, breast, lung, colon, pancreatic, esophageal, stomach, brain, liver and urinary cancer. Other
preferred indications include benign dysproliferative disorders and pre-neoplastic conditions, such as, for example, hyperplasia, metaplasia, and/or dysplasia. Preferred indications also include anemia,
pancytopenia, leukopenia, thrombocytopenia, Hodgkin's disease, acute lymphocytic anemia (ALL), plasmacytomas, multiple myeloma, Burkitt's lymphoma, arthritis, AIDS, granulomatous disease,
inflammatory bowel disease, sepsis, neutropenia, neutrophilia, psoriasis, hemophilia, hypercoagulation, diabetes mellitus, endocarditis, meningitis, Lyme Disease, suppression of immune reactions to transplanted
organs, asthma and allergy.
Biological Activity: #16: Activation of transcription through NFKB response element in immune cells (such as T-cells).
Exemplary Assay: Assays for the activation of transcription through the NFKB response element are well-known in the art and may be used or routinely modified to assess the ability of polypeptides of the
invention (including antibodies and agonists or antagonists of the invention) to regulate NFKB transcription factors and modulate expression of immunomodulatory genes. Exemplary assays for transcription
through the NFKB response element that may be used or rountinely modified to test NFKB-response element activity of polypeptides of the invention (including antibodies and agonists or antagonists of the
invention) include assays disclosed in Berger et al., Gene 66: 1-10 (1998); Cullen and Malm, Methods in Enzymol 216: 362-368 (1992); Henthorn et al., Proc Natl Acad Sci USA 85: 6342-6346 (1988); Black et
al., Virus Gnes 15(2): 105-117 (1997); and Fraser et al., 29(3): 838-844 (1999), the contents of each of which are herein incorporated by reference in its entirety. Exemplary human T cells, such asthe MOLT4,
that may be used according to these assays are publicly available (e.g., through the ATCC).
Preferred Indication: Highly preferred indications include inflammation and inflammatory disorders. Highly preferred indications include blood disorders (e.g., as described below under “Immune
Activity”, “Blood-Related Disorders”, and/or “Cardiovascular Disorders”). Highly preferred indications include autoimmune diseases (e.g., rheumatoid arthritis, systemic lupus erythematosis, multiple sclerosis
and/or as described below), and immunodeficiencies (e.g., as described below). An additional highly preferred indication is infection (e.g., AIDS, and/or an infectious disease as described below under “Infectious
Disease”). Highly preferred indications include neoplastic diseases (e.g., melanoma, leukemia, lymphoma, and/or as described below under “Hyperproliferative Disorders”). Highly preferred indications
include neoplasms and cancers, such as, for example, melanoma, renal cell carcinoma, leukemia, lymphoma, and prostate, breast, lung, colon, pancreatic, esophageal, stomach, brain, liver and urinary cancer.
Other preferred indications include benign dysproliferative disorders and pre-neoplastic conditions, such as, for example, hyperplasia, metaplasia, and/or dysplasia. Preferred indications also include anemia,
pancytopenia, leukopenia, thrombocytopenia, Hodgkin's disease, acute lymphocytic anemia (ALL), plasmacytomas, multiple myeloma, Burkitt's lymphoma, arthritis, AIDS, granulomatous disease, inflammatory
bowel disease, sepsis, neutropenia, neutrophilia, psoriasis, hemophilia, hypercoagulation, diabetes mellitus, endocarditis, meningitis, Lyme Disease, suppression of immune reactions to transplanted organs,
asthma and allergy.
Biological Activity: #17: Activation of transcription through STAT6 response element in immune cells (such as T-cells).
Exemplary Assay: Assays for the activation of transcription through the Signal Transducers and Activators of Transcription (STAT6) response element are well-known in the art and may be used or routinely
modified to assess the ability of polypeptides of the invention (including antibodies and agonists or antagonists of the invention) to regulate STAT6 transcription factors and modulate the expression of multiple
genes. Exemplary assays for transcription through the STAT6 response element that may be used or routinely modified to test STAT6 response element activity of the polypeptides of the invention (including
antibodies and agonists or antagonists of the invention) include assays disclosed in Berger et al., Gene 66: 1-10 (1998); Cullen and Malm, Methods in Enzymol 216: 362-368 (1992); Henthorn et al., Proc Natl
Acad Sci USA 85: 6342-6346 (1988); Georas et al., Blood 92(12): 4529-4538 (1998); Moffatt et al., Transplantation 69(7): 1521-1523 (2000); Curiel et al., Eur J Immunol 27(8): 1982-1987 (1997); and Masuda et
al., J Biol Chem 275(38): 29331-29337 (2000), the contents of each of which are herein incorporated by reference in its entirety. T cells that may be used according to these assays are publicly available (e.g.,
through the ATCC). Exemplary T cells that may be used according to these assays include the SUPT cell line, which is a suspension culture of IL-2 and IL-4 responsive T cells.
Preferred Indication: A highly preferred indication is allergy. Another highly preferred indication is asthma. Additional highly preferred indications include inflammation and inflammatory
disorders. Preferred indications include blood disorders (e.g., as described below under “Immune Activity”, “Blood-Related Disorders”, and/or “Cardiovascular Disorders”). Preferred indications
include autoimmune diseases (e.g., rheumatoid arthritis, systemic lupus erythematosis, multiple sclerosis and/or as described below) and immunodeficiencies (e.g., as described below). Preferred
indications include neoplastic diseases (e.g., leukemia, lymphoma, melanoma, and/or as described below under “Hyperproliferative Disorders”). Preferred indications include neoplasms and cancers, such as,
leukemia, lymphoma, melanoma, and prostate, breast, lung, colon, pancreatic, esophageal, stomach, brain, liver and urinary cancer. Other preferred indications include benign dysproliferative disorders and pre-
neoplastic conditions, such as, for example, hyperplasia, metaplasia, and/or dysplasia. Preferred indications include anemia, pancytopenia, leukopenia, thrombocytopenia, Hodgkin's disease, acute
lymphocytic anemia (ALL), plasmacytomas, multiple myeloma, Burkitt's lymphoma, arthritis, AIDS, granulomatous disease, inflammatory bowel disease, sepsis, neutropenia, neutrophilia, psoriasis, suppression
of immune reactions to transplanted organs and tissues, hemophilia, hypercoagulation, diabetes mellitus, endocarditis, meningitis, and Lyme Disease. An additional preferred indication is infection
(e.g., an infectious disease as described below under “Infectious Disease”).
Biological Activity: #18: Inhibition of squalene synthetase gene transcription.
Exemplary Assay: Reporter Assay: construct contains regulatory and coding sequence of squalene synthetase, the first specific enzyme in the cholesterol biosynthetic pathway. See Jiang, et. al., J. Biol. Chem.
268: 12818-128241(993), the contents of which are herein incorporated by reference in its entirety. Cells were treated with SID supernatants, and SEAP activity was measured after 72 hours. HepG2 is a human
hepatocellular carcinoma cell line (ATCC HB-8065). See Knowles et al., Science. 209: 497-9 (1980), the contents of which are herein incorporated by reference in its entirety.
Preferred Indication:
Biological Activity: #19: Regulation of transcription via DMEFI response element in adipocytes and pre-adipocytes
Exemplary Assay: Assays for the regulation of transcription through the DMEFI response element are well-known in the art and may be used or routinely modified to assess the ability of polypeptides of the
invention (including antibodies and agonists or antagonists of the invention) to activate the DMEFI response element in a reporter construct (such as that containing the GLUT4 promoter) and to regulate insulin
production. The DMEFI response element is present in the GLUT4 promoter and binds to MEF2 transcription factor and another transcription factor that is required for insulin regulation of Glut4 expression in
skeletal muscle. GLUT4 is the primary insulin-responsive glucose transporter in fat and muscle tissue. Exemplary assays that may be used or routinely modified to test for DMEFI response element activity (in
adipocytes and pre-adipocytes) by polypeptides of the invention (including antibodies and agonists or antagonists of the invention) include assays disclosed inThai, M. V., et al., J Biol Chem, 273(23): 14285-92
(1998); Mora, S., et al., J Biol Chem, 275(21): 16323-8 (2000); Liu, M. L., et al., J Biol Chem, 269(45): 28514-21 (1994); “Identification of a 30-base pair regulatory element and novel DNA binding protein that
regulates the human GLUT4 promoter in transgenic mice”, J Biol Chem. 2000 Aug 4; 275(31): 23666-73; Berger, et al., Gene 66: 1-10(1988); and, Cullen, B., et al., Methods in Enzymol. 216: 362-368 (1992), the
contents of each of which is herein incorporated by reference in its entirety. Adipocytes and pre-adipocytes that may be used according to these assays are publicly available (e.g., through the ATCC) and/or may
be routinely generated. Exemplary cells that may be used according to these assays include the mouse 3T3-L1 cell line which is an adherent mouse preadipocyte cell line. Mouse 3T3-L1 cells are a continuous
substrain of 3T3 fibroblasts developed through clonal isolation. These cells undergo a pre-adipocyte to adipose-like conversion under appropriate differentiation culture conditions.
Preferred Indication: A highly preferred indication is diabetes mellitus. Additional highly preferred indications include complications associated with diabetes (e.g., diabetic retinopathy, diabetic nephropathy,
kidney disease (e.g., renal failure, nephropathy and/or other diseases and disorders as described in the “Renal Disorders” section below), diabetic neuropathy, nerve disease and nerve damage (e.g., due to diabetic
neuropathy), blood vessel blockage, heart disease, stroke, impotence (e.g., due to diabetic neuropathy or blood vessel blockage), seizures, mental confusion, drowsiness, nonketotic hyperglycemic-hyperosmolar
coma, cardiovascular disease (e.g., heart disease, atherosclerosis, microvascular disease, hypertension, stroke, and other diseases and disorders as described in the “Cardiovascular Disorders” section below),
dyslipidemia, endocrine disorders (as described in the “Endocrine Disorders” section below), neuropathy, vision impairment (e.g., diabetic retinopathy and blindness), ulcers and impaired wound healing, and
infection (e.g., infectious diseases and disorders as described in the “Infectious Diseases” section below, especially of the urinary tract and skin). An additional highly preferred indication is obesity and/or
complications associated with obesity. Additional highly preferred indications include weight loss or alternatively, weight gain. Additional highly preferred indications are complications associated with insulin
resistance.
Biological Activity: #20: Endothelial Cell Apoptosis
Exemplary Assay: Caspase Apoptosis. Assays for caspase apoptosis are well known in the art and may be used or routinely modified to assess the ability of polypeptides of the invention (including antibodies
and agonists or antagonists of the invention) to promote caspase protease-mediated apoptosis. Induction of apoptosis in endothelial cells supporting the vasculature of tumors is associated with tumor regression
due to loss of tumor blood supply. Exemplary assays for caspase apoptosis that may be used or routinely modified to test capase apoptosis activity of polypeptides of the invention (including antibodies and
agonists or antagonists of the invention) include the assays disclosed in Lee et al., FEBS Lett 485(2-3): 122-126 (2000); Nor et al., J Vasc Res 37(3): 209-218 (2000); and Karsan and Harlan, J Atheroscler
Thromb 3(2): 75-80 (1996); the contents of each of which are herein incorporated by reference in its entirety. Endothelial cells that may be used according to these assays are publicly available (e.g., through
commercial sources). Exemplary endothelial cells that may be used according to these assays include bovine aortic endothelial cells (bAEC), which are an example of endothelial cells which line blood vessels
and are involved in functions that include, but are not limited to, angiogenesis, vascular permeability, vascular tone, and immune cell extravasation.
Preferred Indication: A highly preferred embodiment of the invention includes a method for stimulating endothelial cell growth. An alternative highly preferred embodiment of the invention includes a
method for inhibiting endothelial cell growth. A highly preferred embodiment of the invention includes a method for stimulating endothelial cell proliferation. An alternative highly preferred embodiment of
the invention includes a method for inhibiting endothelial cell proliferation. A highly preferred embodiment of the invention includes a method for stimulating apoptosis of endothelial cells. An alternative
highly preferred embodiment of the invention includes a method for inhibiting (e.g., decreasing) apoptosis of endothelial cells. A highly preferred embodiment of the invention includes a method for
stimulating angiogenisis. An alternative highly preferred embodiment of the invention includes a method for inhibiting angiogenesis. A highly preferred embodiment of the invention includes a method for
reducing cardiac hypertrophy. An alternative highly preferred embodiment of the invention includes a method for inducing cardiac hypertrophy. Highly preferred indications include neoplastic diseases (e.g.,
as described below under “Hyperproliferative Disorders”), and disorders of the cardiovascular system (e.g., heart disease, congestive heart failure, hypertension, aortic stenosis, cardiomyopathy, valvular
regurgitation, left ventricular dysfunction, atherosclerosis and atherosclerotic vascular disease, diabetic nephropathy, intracardiac shunt, cardiac hypertrophy, myocardial infarction, chronic hemodynamic
overload, and/or as described below under “Cardiovascular Disorders”). Highly preferred indications include cardiovascular, endothelial and/or angiogenic disorders (e.g., systemic disorders that affect vessels
such as diabetes mellitus, as well as diseases of the vessels themselves, such as of the arteries, capillaries, veins and/or lymphatics). Highly preferred are indications that stimulate angiogenesis and/or
cardiovascularization. Highly preferred are indications that inhibit angiogenesis and/or cardiovascularization. Highly preferred indications include antiangiogenic activity to treat solid tumors, leukemias, and
Kaposi''s sarcoma, and retinal disorders. Highly preferred indications include neoplasms and cancer, such as, Kaposi''s sarcoma, hemangioma (capillary and cavernous), glomus tumors, telangiectasia, bacillary
angiomatosis, hemangioendothelioma, angiosarcoma, haemangiopericytoma, lymphangioma, lymphangiosarcoma. Highly preferred indications also include cancers such as, prostate, breast, lung, colon,
pancreatic, esophageal, stomach, brain, liver, and urinary cancer. Preferred indications include benign dysproliferative disorders and pre-neoplastic conditions, such as, for example, hyperplasia, metaplasia,
and/or dysplasia. Highly preferred indications also include arterial disease, such as, atherosclerosis, hypertension, coronary artery disease, inflammatory vasculitides, Reynaud''s disease and Reynaud''s
phenomenom, aneurysms, restenosis; venous and lymphatic disorders such as thrombophlebitis, lymphangitis, and lymphedema; and other vascular disorders such as peripheral vascular disease, and cancer.
Highly preferred indications also include trauma such as wounds, burns, and injured tissue (e.g., vascular injury such as, injury resulting from balloon angioplasty, and atheroschlerotic lesions), implant fixation,
scarring, ischemia reperfusion injury, rheumatoid arthritis, cerebrovascular disease, renal diseases such as acute renal failure, and osteoporosis. Additional highly preferred indications include stroke, graft
rejection, diabetic or other retinopathies, thrombotic and coagulative disorders, vascularitis, lymph angiogenesis, sexual disorders, age-related macular degeneration, and treatment/prevention of endometriosis
and related conditions. Additional highly preferred indications include fibromas, heart disease, cardiac arrest, heart valve disease, and vascular disease. Preferred indications include blood disorders (e.g., as
described below under “Immune Activity”, “Blood-Related Disorders”, and/or “Cardiovascular Disorders”). Preferred indications include autoimmune diseases (e.g., rheumatoid arthritis, systemic lupus
erythematosis, multiple sclerosis and/or as described below) and immunodeficiencies (e.g., as described below). Additional preferred indications include inflammation and inflammatory disorders (such as acute
and chronic inflammatory diseases, e.g., inflammatory bowel disease and Crohn's disease), and pain management.
Biological Activity: #21: Production of IFNgamma using a T cells
Exemplary Assay: IFNgamma FMAT. IFNg plays a central role in the immune system and is considered to be a proinflammatory cytokine. IFNg promotes TH1 and inhibits TH2 differentiation; promotes
IgG2a and inhibits IgE secretion; induces macrophage activation; and increases MHC expression. Assays for immunomodulatory proteins produced by T cells and NK cells that regulate a variety of
inflammatory activities and inhibit TH2 helper cell functions are well known in the art and may be used or routinely modified to assess the ability of polypeptides of the invention (including antibodies and
agonists or antagonists of the invention) to mediate immunomodulation, regulate inflammatory activities, modulate TH2 helper cell function, and/or mediate humoral or cell-mediated immunity. Exemplary
assays that test for immunomodulatory proteins evaluate the production of cytokines, such as Interferon gamma (IFNg), and the activation of T cells. Such assays that may be used or routinely modified to test
immunomodulatory activity of polypeptides of the invention (including antibodies and agonists or antagonists of the invention) include the assays disclosed in Miraglia et al., J Biomolecular Screening 4: 193-204
(1999); Rowland et al., “Lymphocytes: a practical approach” Chapter 6: 138-160 (2000); Gonzalez et al., J Clin Lab Anal 8(5): 225-233 (1995); Billiau et al., Ann NY Acad Sci 856: 22-32 (1998); Boehm et al.,
Annu Rev Immunol 15: 749-795 (1997), and Rheumatology (Oxford) 38(3): 214-20 (1999), the contents of each of which are herein incorporated by reference in its entirety. Human T cells that may be used
according to these assays may be isolated using techniques disclosed herein or otherwise known in the art. Human T cells are primary human lymphocytes that mature in the thymus and express a T Cell receptor
and CD3, CD4, or CD8. These cells mediate humoral or cell-mediated immunity and may be preactivated to enhance responsiveness to immunomodulatory factors.
Preferred Indication: A highly preferred embodiment of the invention includes a method for stimulating the production of IFNg. An alternative highly preferred embodiment of the invention includes a
method for inhibiting the production of IFNg. Highly preferred indications include blood disorders (e.g., as described below under “Immune Activity”, “Blood-Related Disorders”, and/or “Cardiovascular
Disorders”), and infection (e.g., viral infections, tuberculosis, infections associated with chronic granulomatosus disease and malignant osteoporosis, and/or as described below under “Infectious Disease”). Highly
preferred indications include autoimmune disease (e.g., rheumatoid arthritis, systemic lupus erythematosis, multiple sclerosis and/or as described below), immunodeficiency (e.g., as described below), boosting a
T cell-mediated immune-response, and suppressing a T cell-mediated immune response. Additional highly preferred indications include inflammation and inflammatory disorders. Additional preferred
indications include idiopathic pulmonary fibrosis. Highly preferred indications include neoplastic diseases (e.g., leukemia, lymphoma, melanoma, and/or as described below under “Hyperproliferative
Disorders”). Highly preferred indications include neoplasms and cancers, such as, for example, leukemia, lymphoma, melanoma, and prostate, breast, lung, colon, pancreatic, esophageal, stomach, brain, liver
and urinary cancer. Other preferred indications include benign dysproliferative disorders and pre-neoplastic conditions, such as, for example, hyperplasia, metaplasia, and/or dysplasia. Preferred indications
include anemia, pancytopenia, leukopenia, thrombocytopenia, Hodgkin''s disease, acute lymphocytic anemia (ALL), plasmacytomas, multiple myeloma, Burkitt's lymphoma, arthritis, AIDS, granulomatous
disease, inflammatory bowel disease, sepsis, neutropenia, neutrophilia, psoriasis, suppression of immune reactions to transplanted organs and tissues, hemophilia, hypercoagulation, diabetes mellitus,
endocarditis, meningitis, Lyme Disease, asthma and allergy.
Biological Activity: #22: Activation of Adipocyte ERK Signaling Pathway
Exemplary Assay: Kinase assay. Kinase assays, for example an Elk-1 kinase assay, for ERK signal transduction that regulate cell proliferation or differentiation are well known in the art and may be used or
routinely modified to assess the ability of polypeptides of the invention (including antibodies and agonists or antagonists of the invention) to promote or inhibit cell proliferation, activation, and differentiation.
Exemplary assays for ERK kinase activity that may be used or routinely modified to test ERK kinase-induced activity of polypeptides of the invention (including antibodies and agonists or antagonists of the
invention) include the assays disclosed in Forrer et al., Biol Chem 379(8-9): 1101-1110 (1998); Le Marchand-Brustel Y, Exp Clin Endocrinol Diabetes 107(2): 126-132 (1999); Kyriakis JM, Biochem Soc Symp
64: 29-48 (1999); Chang and Karin, Nature 410(6824): 37-40 (2001); and Cobb MH, Prog Biophys Mol Biol 71(3-4): 479-500 (1999); the contents of each of which are herein incorporated by reference in its
entirety. Mouse adipocyte cells that may be used according to these assays are publicly available (e.g., through the ATCC). Exemplary mouse adipocyte cells that may be used according to these assays include
3T3-L1 cells. 3T3-L1 is an adherent mouse preadipocyte cell line that is a continuous substrain of 3T3 fibroblast cells developed through clonal isolation and undergo a pre-adipocyte to adipose-like conversion
under appropriate differentiation conditions known in the art.
Preferred Indication: A highly preferred embodiment of the invention includes a method for stimulating adipocyte proliferation. An alternative highly preferred embodiment of the invention includes a
method for inhibiting adipocyte proliferation. A highly preferred embodiment of the invention includes a method for stimulating adipocyte differentiation. An alternative highly preferred embodiment of the
invention includes a method for inhibiting adipocyte differentiation. A highly preferred embodiment of the invention includes a method for stimulating (e.g., increasing) adipocyte activation. An alternative
highly preferred embodiment of the invention includes a method for inhibiting the activation of (e.g., decreasing) and/or inactivating adipocytes. Highly preferred indications include endocrine disorders
(e.g., as described below under “Endocrine Disorders”). Highly preferred indications also include neoplastic diseases (e.g., lipomas, liposarcomas, and/or as described below under “Hyperproliferative
Disorders”). Preferred indications include blood disorders (e.g., hypertension, congestive heart failure, blood vessel blockage, heart disease, stroke, impotence and/or as described below under “Immune
Activity”, “Cardiovascular Disorders”, and/or “Blood-Related Disorders”), immune disorders (e.g., as described below under “Immune
Activity”), neural disorders (e.g., as described below under “Neural
Activity and Neurological Diseases”), and infection (e.g., as described below under “Infectious Disease”). A highly preferred indication is diabetes mellitus. An additional highly preferred
indication is a complication associated with diabetes (e.g., diabetic retinopathy, diabetic nephropathy, kidney disease (e.g., renal failure, nephropathy and/or other diseases and disorders as described in the “Renal
Disorders” section below), diabetic neuropathy, nerve disease and nerve damage (e.g., due to diabetic neuropathy), blood vessel blockage, heart disease, stroke, impotence (e.g., due to diabetic neuropathy or
blood vessel blockage), seizures, mental confusion, drowsiness, nonketotic hyperglycemic-hyperosmolar coma, cardiovascular disease (e.g., heart disease, atherosclerosis, microvascular disease, hypertension,
stroke, and other diseases and disorders as described in the “Cardiovascular Disorders” section below), dyslipidemia, endocrine disorders (as described in the “Endocrine Disorders” section below), neuropathy,
vision impairment (e.g., diabetic retinopathy and blindness), ulcers and impaired wound healing, infection (e.g., infectious diseases and disorders as described in the “Infectious Diseases” section below
(particularly of the urinary tract and skin). An additional highly preferred indication is obesity and/or complications associated with obesity. Additional highly preferred indications include weight loss or
alternatively, weight gain. Additional highly preferred indications are complications associated with insulin resistance. Additional highly preferred indications are disorders of the musculoskeletal
systems including myopathies, muscular dystrophy, and/or as described herein. Additional highly preferred indications include, hypertension, coronary artery disease, dyslipidemia, gallstones, osteoarthritis,
degenerative arthritis, eating disorders, fibrosis, cachexia, and kidney diseases or disorders. Preferred indications include neoplasms and cancer, such as, lymphoma, leukemia and breast, colon, and kidney
cancer. Additional preferred indications include melanoma, prostate, lung, pancreatic, esophageal, stomach, brain, liver, and urinary cancer. Highly preferred indications include lipomas and liposarcomas.
Other preferred indications include benign dysproliferative disorders and pre-neoplastic conditions, such as, for example, hyperplasia, metaplasia, amid/or dysplasia.
Biological Activity: #23: Activation of Endothelial Cell JNK Signaling Pathway.
Exemplary Assay: Kinase assay. JNK kinase assays for signal transduction that regulate cell proliferation, activation, or apoptosis are well known in the art and may be used or routinely modified to assess the
ability of polypeptides of the invention (including antibodies and agonists or antagonists of the invention) to promote or inhibit cell proliferation, activation, and apoptosis. Exemplary assays for JNK kinase
activity that may be used or routinely modified to test JNK kinase-induced activity of polypeptides of the invention (including antibodies and agonists or antagonists of the invention) include the assays disclosed
in Forrer et al., Biol Chem 379(8-9): 1101-1110 (1998); Gupta et al., Exp Cell Res 247(2): 495-504 (1999); Kyriakis JM, Biochem Soc Symp 64: 29-48 (1999); Chang and Karin, Nature 410(6824): 37-40 (2001);
and Cobb MH, Prog Biophys Mol Biol 71(3-4): 479-500 (1999); the contents of each of which are herein incorporated by reference in its entirety. Endothelial cells that may be used according to these assays are
publicly available (e.g., through the ATCC). Exemplary endothelial cells that may be used according to these assays include human umbilical vein endothelial cells (HUVEC), which are endothelial cells which
line venous blood vessels, and are involved in functions that include, but are not limited to, angiogenesis, vascular permeability, vascular tone, and immune cell extravasation.
Preferred Indication: A highly preferred embodiment of the invention includes a method for stimulating endothelial cell growth. An alternative highly preferred embodiment of the invention includes a method
for inhibiting endothelial cell growth. A highly preferred embodiment of the invention includes a method for stimulating endothelial cell proliferation. An alternative highly preferred embodiment of the
invention includes a method for inhibiting endothelial cell proliferation. A highly preferred embodiment of the invention includes a method for stimulating apoptosis of endothelial cells. An alternative
highly preferred embodiment of the invention includes a method for inhibiting apoptosis of endothelial cells. A highly preferred embodiment of the invention includes a method for stimulating endothelial
cell activation. An alternative highly preferred embodiment of the invention includes a method for inhibiting the activation of and/or inactivating endothelial cells. A highly preferred embodiment of the
invention includes a method for stimulating angiogenisis. An alternative highly preferred embodiment of the invention includes a method for inhibiting angiogenesis. A highly preferred embodiment of the
invention includes a method for reducing cardiac hypertrophy. An alternative highly preferred embodiment of the invention include a method for inducing cardiac hypertrophy. Highly preferred indications
include neoplastic diseases (e.g., as described below under “Hyperproliferative Disorders”), and disorders of the cardiovascular system (e.g., heart disease, congestive heart failure, hypertension, aortic stenosis,
cardiomyopathy, valvular regurgitation, left ventricular dysfunction, atherosclerosis and atherosclerotic vascular disease, diabetic nephropathy, intracardiac shunt, cardiac hypertrophy, myocardial infarction,
chronic hemodynamic overload, and/or as described below under “Cardiovascular Disorders”). Highly preferred indications include cardiovascular, endothelial and/or angiogenic disorders (e.g., systemic
disorders that affect vessels such as diabetes mellitus, as well as diseases of the vessels themselves, such as of the arteries, capillaries, veins and/or lymphatics). Highly preferred are indications that stimulate
angiogenesis and/or cardiovascularization. Highly preferred are indications that inhibit angiogenesis and/or cardiovascularization. Highly preferred indications include antiangiogenic activity to treat solid
tumors, leukemias, and Kaposi''s sarcoma, and retinal disorders. Highly preferred indications include neoplasms and cancer, such as, Kaposi''s sarcoma, hemangioma (capillary and cavernous), glomus tumors,
telangiectasia, bacillary angiomatosis, hemangioendothelioma, angiosarcoma, haemangiopericytoma, lymphangioma, lymphangiosarcoma. Highly preferred indications also include cancers such as, prostate,
breast, lung, colon, pancreatic, esophageal, stomach, brain, liver, and urinary cancer. Preferred indications include benign dysproliferative disorders and pre-neoplastic conditions, such as, for example,
hyperplasia, metaplasia, and/or dysplasia. Highly preferred indications also include arterial disease, such as, atherosclerosis, hypertension, coronary artery disease, inflammatory vasculitides, Reynaud''s
disease and Reynaud''s phenomenom, aneurysms, restenosis; venous and lymphatic disorders such as thrombophlebitis, lymphangitis, and lymphedema; and other vascular disorders such as peripheral vascular
disease, and cancer. Highly preferred indications also include trauma such as wounds, bums, and injured tissue (e.g., vascular injury such as, injury resulting from balloon angioplasty, and atheroschlerotic
lesions), implant fixation, scarring, ischemia reperfusion injury, rheumatoid arthritis, cerebrovascular disease, renal diseases such as acute renal failure, and osteoporosis. Additional highly preferred
indications include stroke, graft rejection, diabetic or other retinopathies, thrombotic and coagulative disorders, vascularitis, lymph angiogenesis, sexual disorders, age-related macular degeneration, and treatment/
prevention of endometriosis and related conditions. Additional highly preferred indications include fibromas, heart disease, cardiac arrest, heart valve disease, and vascular disease. Preferred indications
include blood disorders (e.g., as described below under “Immune Activity”, “Blood-Related Disorders”, and/or “Cardiovascular Disorders”). Preferred indications include autoimmune diseases (e.g., rheumatoid
arthritis, systemic lupus erythematosis, multiple sclerosis and/or as described below) and immunodeficiencies (e.g., as described below). Additional preferred indications include inflammation and inflammatory
disorders (such as acute and chronic inflammatory diseases, e.g., inflammatory bowel disease and Crohn's disease), and pain management.
Biological Activity: #24: Regulation of apoptosis of immune cells (such as mast cells).
Exemplary Assay: Caspase Apoptosis. Assays for caspase apoptosis are well known in the art and may be used or routinely modified to assess the ability of polypeptides of the invention (including antibodies
and agonists or antagonists of the invention) to regulate caspase protease-mediated apoptosis in immune cells (such as, for example, in mast cells). Mast cells are found in connective and mucosal tissues
throughout the body, and their activation via immunoglobulin E-antigen, promoted by T helper cell type 2 cytokines, is an important component of allergic disease. Dysregulation of mast cell apoptosis may play
a role in allergic disease and mast cell tumor survival. Exemplary assays for caspase apoptosis that may be used or routinely modified to test capase apoptosis activity induced by polypeptides of the invention
(including antibodies and agonists or antagonists of the invention) include the assays disclosed in: Masuda A, et al., J Biol Chem, 276(28): 26107-26113 (2001); Yeatman CF 2nd, et al., J Exp Med, 192(8): 1093-1103
(2000); Lee et al., FEBS Lett 485(2-3): 122-126 (2000); Nor et al., J Vasc Res 37(3): 209-218 (2000); and Karsan and Harlan, J Atheroscler Thromb 3(2): 75-80 (1996); the contents of each of which are
herein incorporated by reference in its entirety. Immune cells that may be used according to these assays are publicly available (e.g., through commercial sources). Exemplary immune cells that may be used
according to these assays include mast cells such as the HMC human mast cell line.
Preferred Indication: Preferred embodiments of the invention include using polypeptides of the invention (or antibodies, agonists, or antagonists thereof) in detection, diagnosis, prevention, amid/or treatment of
asthma, allergy, hypersensitivity and inflammation.
Biological Activity: #25: Stimulation of Calcium Flux in pancreatic beta cells.
Exemplary Assay: Assays for measuring calcium flux are well-known in the art and may be used or routinely modified to assess the ability of polypeptides of the invention (including antibodies and agonists or
antagonists of the invention) to mobilize calcium. For example, the FLPR assay may be used to measure influx of calcium. Cells normally have very low concentrations of cytosolic calcium compared to much
higher extracellular calcium. Extracellular factors can cause an influx of calcium, leading to activation of calcium responsive signaling pathways and alterations in cell functions. Exemplary assays that may be
used or routinely modified to measure calcium flux by polypeptides of the invention (including antibodies and agonists or antagonists of the invention) include assays disclosed in: Satin LS, et al., Endocrinology,
136(10): 4589-601 (1995); Mogami H, et al., Endocrinology, 136(7): 2960-6 (1995); Richardson SB, et al., Biochem 1, 288 (Pt 3): 847-51 (1992); and, Meats, JE, et al., Cell Calcium 1989 Nov-Dec; 10(8): 535-41
(1989), the contents of each of which is herein incorporated by reference in its entirety. Pancreatic cells that may be used according to these assays are publicly available (e.g., through the ATCC) and/or may be
routinely generated. Exemplary pancreatic cells that may be used according to these assays include HITT15 Cells. HITT15 are an adherent epithelial cell line established from Syrian hamster islet cells
transformed with SV40. These cells express glucagon, somatostatin, and glucocorticoid receptors. The cells secrete insulin, which is stimulated by glucose and glucagon and suppressed by somatostatin or
glucocorticoids. ATTC# CRL-1777 Refs: Lord and Ashcroft. Biochem. J. 219: 547-551; Santerre et al. Proc. Natl. Acad. Sci. USA 78: 4339-4343, 1981.
Preferred Indication: A highly preferred indication is diabetes mellitus. An additional highly preferred indication is a complication associated with diabetes (e.g., diabetic retinopathy, diabetic
nephropathy, kidney disease (e.g., renal failure, nephropathy and/or other diseases and disorders as described in the “Renal Disorders” section below), diabetic neuropathy, nerve disease and nerve damage (e.g.,
due to diabetic neuropathy), blood vessel blockage, heart disease, stroke, impotence (e.g., due to diabetic neuropathy or blood vessel blockage), seizures, mental confusion, drowsiness, nonketotic hyperglycemic-
hyperosmolar coma, cardiovascular disease (e.g., heart disease, atherosclerosis, microvascular disease, hypertension, stroke, and other diseases and disorders as described in the “Cardiovascular Disorders” section
below), dyslipidemia, endocrine disorders (as described in the “Endocrine Disorders” section below), neuropathy, vision impairment (e.g., diabetic retinopathy and blindness), ulcers and impaired wound healing,
and infection (e.g., infectious diseases and disorders as described in the “Infectious Diseases” section below, especially of the urinary tract and skin), carpal tunnel syndrome and Dupuytren's contracture).
An additional highly preferred indication is obesity and/or complications associated with obesity. Additional highly preferred indications include weight loss or alternatively, weight gain. Aditional
highly preferred indications are complications associated with insulin resistance.
Biological Activity: #26: Production of GM-CSF
Exemplary Assay: GM-CSF FMAT. GM-CSF is expressed by activated T cells, macrophages, endothelial cells, and fibroblasts. GM-CSF regulates differentiation and proliferation of granulocytes-macrophage
progenitors and enhances antimicrobial activity in neutrophils, monocytes and macrophage. Additionally, GM-CSF plays an important role in the differentiation of dendritic cells and monocytes, and increases
antigen presentation. GM-CSF is considered to be a proinflammatory cytokine. Assays for immunomodulatory proteins that promote the production of GM-CSF are well known in the art and may be used or
routinely modified to assess the ability of polypeptides of the invention (including antibodies and agonists or antagonists of the invention) to mediate immunomodulation and modulate the growth and
differentiation of leukocytes. Exemplary assays that test for immunomodulatory proteins evaluate the production of cytokines, such as GM-CSF, and the activation of T cells. Such assays that may be used or
routinely modified to test immunomodulatory activity of polypeptides of the invention (including antibodies and agonists or antagonists of the invention) include the assays disclosed in Miraglia et al., J
Biomolecular Screening 4: 193-204 (1999); Rowland et at., “Lymphocytes: a practical approach” Chapter 6: 138-160 (2000); and Ye et al., J Leukoc Biol (58(2): 225-233, the contents of each of which are herein
incorporated by reference in its entirety. Natural killer cells that may be used according to these assays are publicly available (e.g., through the ATCC) or may be isolated using techniques disclosed herein or
otherwise known in the art. Natural killer (NK) cells are large granular lymphocytes that have cytotoxic activity but do bind antigen. NK cells show antibody-independent killing of tumor cells and also
recognize antibody bound on target cells, via NK Fe receptors, leading to cell-mediated cytotoxicity.
Preferred Indication: A highly preferred embodiment of the invention includes a method for stimulating the production of GM-CSF. An alternative highly preferred embodiment of the invention includes a
method for inhibiting the production of GM-CSF. Highly preferred indications include inflammation and inflammatory disorders. An additional highly preferred indication is infection (e.g., as described
below under “Infectious Disease”. Highly preferred indications include blood disorders (e.g., neutropenia (and the prevention of neutropenia (e.g., in HIV infected patients), and/or as described below under
“Immune Activity”, “Blood-Related Disorders”, and/or “Cardiovascular Disorders”). Highly preferred indications also include autoimmune diseases (e.g., rheumatoid arthritis, systemic lupus erythematosis,
multiple sclerosis and/or as described below) and immunodeficiencies (e.g., as described below). Additional highly preferred indications include asthma. Highly preferred indications include neoplastic diseases
(e.g., leukemia (e.g., acute lymphoblastic leukemia, and acute myelogenous leukemia), lymphoma (e.g., non-Hodgkin''s lymphoma and Hodgkin''s disease), and/or as described below under “Hyperproliferative
Disorders”). Highly preferred indications include neoplasms and cancers, such as, leukemia, lymphoma, melanoma, and prostate, breast, lung, colon, pancreatic, esophageal, stomach, brain, liver and urinary
cancer. Other preferred indications include benign dysproliferative disorders and pre-neoplastic conditions, such as, for example, hyperplasia, metaplasia, and/or dysplasia. Highly preferred indications include:
suppression of immune reactions to transplanted organs and tissues (e.g., bone marrow transplant); accelerating myeloid recovery; and mobilizing hematopoietic progenitor cells. Preferred indications include
boosting a T cell-mediated immune response, and alternatively, suppressing a I cell-mediated immune response. Preferred indications include anemia, pancytopenia, leukopenia, thrombocytopenia, acute
lymphocytic anemia (ALL), plasmacytomas, multiple myeloma, Burkitt's lymphoma, arthritis, AIDS, granulomatous disease, inflammatory bowel disease, sepsis, neutrophilia, psoriasis, hemophilia,
hypercoagulation, diabetes mellitus, endocarditis, meningitis, Lyme Disease, and allergy.
Biological Activity: #27: Regulation of transcription through the PEPCK promoter in hepatocytes
Exemplary Assay: Assays for the regulation of transcription through the PEPCK promoter are well-known in the art and may be used or routinely modified to assess the ability of polypeptides of the invention
(including antibodies and agonists or antagonists of the invention) to activate the PEPCK promoter in a reporter construct and regulate liver gluconeogenesis. Exemplary assays for regulation of transcription
through the PEPCK promoter that may be used or routinely modified to test for PEPCK promoter activity (in hepatocytes) of polypeptides of the invention (including antibodies and agonists or antagonists of the
invention) include assays disclosed in Berger et al., Gene 66: 1-10 (1998); Cullen and Malm, Methods in Enzymol 216: 362-368 (1992); Henthorn et al., Proc Natl Acad Sci USA 85: 6342-6346 (1988); Lochhead
et al., Diabetes 49(6): 896-903 (2000); and Yeagley et al., J Biol Chem 275(23): 17814-17820 (2000), the contents of each of which is herein incorporated by reference in its entirety. Hepatocyte cells that may be
used according to these assays are publicly available (e.g., through the ATCC) and/or may be routinely generated. Exemplary liver hepatoma cells that may be used according to these assays include H4l1e cells,
which contain a tyrosine amino transferase that is inducible with glucocorticoids, insulin, or cAMP derivatives.
Preferred Indication: A highly preferred indication is diabetes mellitus. An additional highly preferred indication is a complication associated with diabetes (e.g., diabetic retinopathy, diabetic
nephropathy, kidney disease (e.g., renal failure, nephropathy and/or other diseases and disorders as described in the “Renal Disorders” section below), diabetic neuropathy, nerve disease and nerve damage (e.g.,
due to diabetic neuropathy), blood vessel blockage, heart disease, stroke, impotence (e.g., due to diabetic neuropathy or blood vessel blockage), seizures, mental confusion, drowsiness, nonketotic hyperglycemic-
hyperosmolar coma, cardiovascular disease (e.g., heart disease, atherosclerosis, microvascular disease, hypertension, stroke, and other diseases and disorders as described in the “Cardiovascular Disorders” section
below), dyslipidemia, endocrine disorders (as described in the “Endocrine Disorders” section below), neuropathy, vision impairment (e.g., diabetic retinopathy and blindness), ulcers and impaired wound healing,
infection (e.g., an infectious diseases or disorders as described in the “Infectious Diseases” section below, especially of the urinary tract and skin), carpal tunnel syndrome and Dupuytren's contracture). An
additional highly preferred indication is obesity and/or complications associated with obesity. Additional highly preferred indications include weight loss or alternatively, weight gain. Additional highly
preferred indications are complications associated with insulin resistance. Additional highly preferred indications are disorders of the musculoskeletal systems including myopathies, muscular
dystrophy, and/or as described herein. Additional highly preferred indications include glycogen storage disease (e.g., glycogenoses), hepatitis, gallstones, cirrhosis of the liver, degenerative or necrotic
liver disease, alcoholic liver diseases, fibrosis, liver regeneration, metabolic disease, dyslipidemia and cholesterol metabolism, and hepatocarcinomas. Highly preferred indications include blood
disorders (e.g., as described below under “Immune Activity”, “Cardiovascular Disorders”, and/or “Blood-Related Disorders”), Immune disorders (e.g., as described below under “Immune Activity”), infection
(e.g., an infectious disease and/or disorder as described below under “Infectious Disease”), endocrine disorders (e.g., as described below under “Endocrine Disorders”), and neural disorders (e.g., as described
below under “Neural Activity and Neurological Diseases”). Additional preferred indications include neoplastic diseases (e.g., as described below under “Hyperproliferative Disorders”). Preferred
indications include neoplasms and cancers, such as, leukemia, lymphoma, prostate, breast, lung, colon, pancreatic, esophageal, stomach, brain, and urinary cancer. A highly preferred indication is liver cancer.
Other preferred indications include benign dysproliferative disorders and pre-neoplastic conditions, such as, for example, hyperplasia, metaplasia, and/or dysplasia.
Biological Activity: #28: Production of ICAM in endothelial cells (such as human umbilical vein endothelial cells (HUVEC))
Exemplary Assay: Endothelial cells, which are cells that line blood vessels, and are involved in functions that include, but are not limited to, angiogenesis, vascular permeability, vascular tone, and immune cell
extravasation. Exemplary endothelial cells that may be used in ICAM production assays include human umbilical vein endothelial cells (HUVEC), and are available from commercial sources. The expression of
ICAM (CD54), a intergral membrane protein, can be upregulated by cytokines or other factors, and ICAM expression is important in mediating immune and endothelial cell interactions leading to immune and
inflammatory responses. Assays for measuring expression of ICAM-1 are well-known in the art and may be used or routinely modified to assess the ability of polypeptides of the invention (including antibodies
and agonists or antagonists of the invention) to regulate ICAM-1 expression. Exemplary assays that may be used or routinely modified to measure ICAM-1 expression include assays disclosed in: Rolfe BE, et
al., Atherosclerosis, 149(1): 99-110 (2000); Panettieri RA Jr, et al., J Immunol, 154(5): 2358-2365 (1995); and, Grunstein MM, et al., Am J Physiol Lung Cell Mol Physiol, 278(6): L1154-L1163 (2000), the
contents of each of which is herein incorporated by reference in its entirety.
Preferred Indication: Highly preferred indications include inflammation (acute and chronic), restnosis, atherosclerosis, asthma and allergy. Highly preferred indications include inflammation and inflammatory
disorders, immunological disorders, neoplastic disorders (e.g. cancer/tumorigenesis), and cardiovascular disorders (such as described below under “Immune Activity”, “Blood-Related Disorders”,
“Hyperproliferative Disorders” and/or “Cardiovascular Disorders”). Highly preferred indications include neoplasms and cancers such as, for example, leukemia, lymphoma, melanoma, renal cell carcinoma, and
prostate, breast, lung, colon, pancreatic, esophageal, stomach, brain, liver and urinary cancer. Other preferred indications include benign dysproliferative disorders and pre-neoplastic conditions, such as, for
example, hyperplasia, metaplasia, and/or dysplasia.
Biological Activity: #29: Activation of T-Cell p38 or JNK Signaling Pathway.
Exemplary Assay: Kinase assay. JNK and p238 kinase assays for signal transduction that regulate cell proliferation, activation, or apoptosis are well known in the art and may be used or routinely modified to
assess the ability of polypeptides of the invention (including antibodies and agonists or antagonists of the invention) to promote or inhibit immune cell (e.g. T-cell) proliferation, activation, and apoptosis.
Exemplary assays for JNK and p38 kinase activity that may be used or routinely modified to test JNK and p38 kinase-induced activity of polypeptides of the invention (including antibodies and agonists or
antagonists of the invention) include the assays disclosed in Forrer et al., Biol Chem 379(8-9): 1101-1110 (1998); Gupta et al., Exp Cell Res 247(2): 495-504 (1999); Kyriakis JM, Biochem Soc Symp 64: 29-48
(1999); Chang and Karin, Nature 410(6824): 37-40 (2001); and Cobb MH, Prog Biophys Mol Biol 71(3-4): 479-500 (1999); the contents of each of which are herein incorporated by reference in its entirety. T
cells that may be used according to these assays are publicly available (e.g., through the ATCC). Exemplary mouse T cells that may be used according to these assays include the CTLL cell line, which is an IL-2
dependent suspension-culture cell line with cytotoxic activity.
Preferred Indication: Preferred indications include neoplastic diseases (e.g., as described below under “Hyperproliferative Disorders”), blood disorders (e.g., as described below under “Immune Activity”,
“Cardiovascular Disorders”, and/or “Blood-Related Disorders”), and infection (e.g., an infectious disease as described below under “Infectious Disease”). Highly preferred indications include autoimmune
diseases (e.g., rheumatoid arthritis, systemic lupus erythematosis, multiple sclerosis and/or as described below) and immunodeficiencies (e.g., as described below). Additional highly preferred indications include
inflammation and inflammatory disorders. Highly preferred indications also include neoplastic diseases (e.g., leukemia, lymphoma, and/or as described below under “Hyperproliferative Disorders”). Highly
preferred indications include neoplasms and cancers, such as, leukemia, lymphoma, prostate, breast, lung, colon, pancreatic, esophageal, stomach, brain, liver, and urinary cancer. Other preferred indications
include benign dysproliferative disorders and pre-neoplastic conditions, such as, for example, hyperplasia, metaplasia, and/or dysplasia. Preferred indications include arthritis, asthma, AIDS, allergy, anemia,
pancytopenia, leukopenia, thrombocytopenia, Hodgkin''s disease, acute lymphocytic anemia (ALL), plasmacytomas, multiple myeloma, Burkitt''s lymphoma, granulomatous disease, inflammatory bowel disease,
sepsis, psoriasis, suppression of immune reactions to transplanted organs and tissues, endocarditis, meningitis, and Lyme Disease.
Biological Activity: #30: Production of ICAM-1
Exemplary Assay: Assays for measuring expression of ICAM-1 are well-known in the art and may be used or routinely modified to assess the ability of polypeptides of the invention (including antibodies and
agonists or antagonists of the invention) to regulate ICAM-1 expression. Exemplary assays that may be used or routinely modified to measure ICAM-1 expression include assays disclosed in: Takacs P, et al,
FASEB J, 15(2): 279-281 (2001); and, Miyamoto K, et al., Am J Pathol, 156(5): 1733-1739 (2000), the contents of each of which is herein incorporated by reference in its entirety. Cells that may be used
according to these assays are publicly available (e.g., through the ATCC) and/or may be routinely generated. Exemplary cells that may be used according to these assays include microvascular endothelial cells
(MVEC).
Preferred Indication: Preferred embodiments of the invention include using polypeptides of the invention (or antibodies, agonists, or antagonists thereof) in detection, diagnosis, prevention, and/or treatment of
Inflammation, Vascular Disease, Athereosclerosis, Restenosis, and Stroke
Biological Activity: #30b: Production of ICAM-1
Exemplary Assay: Assays for measuring expression of ICAM-1 are well-known in the art and may be used or routinely modified to assess the ability of polypeptides of the invention (including antibodies and
agonists or antagonists of the invention) to regulate ICAM-1 expression. Exemplary assays that may be used or routinely modified to measure ICAM-1 expression include assays disclosed in: Rolfe BE, et al.,
Atherosclerosis, 149(1): 99-110 (2000); Panettieri RA Jr, et al., J Immunol, 154(5): 2358-2365 (1995); and, Grunstein MM, et al., Am J Physiol Lung Cell Mol Physiol, 278(6): L1154-L1163 (2000), the contents
of each of which is herein incorporated by reference in its entirety. Cells that may be used according to these assays are publicly available (e.g., through the ATCC) and/or may be routinely generated.
Exemplary cells that may be used according to these assays include Aortic Smooth Muscle Cells (AOSMC); such as bovine AOSMC.
Preferred Indication: Preferred embodiments of the invention include using polypeptides of the invention (or antibodies, agonists, or antagonists thereof) in detection, diagnosis, prevention, and/or treatment of
Vascular Disease, Atherosclerosis, Restenosis, Stroke, and Asthma.
Biological Activity: #31: Insulin Secretion
Exemplary Assay: Assays for measuring secretion of insulin are well-known in the art and may be used or routinely modified to assess the ability of polypeptides of the invention (including antibodies and
agonists or antagonists of the invention) to stimulate insulin secretion. For example, insulin secretion is measured by FMAT using anti-rat insulin antibodies. Insulin secretion from pancreatic beta cells is
upregulated by glucose and also by certain proteins/peptides, and disregulation is a key component in diabetes. Exemplary assays that may be used or routinely modified to test for stimulation of insulin secretion
(from pancreatic cells) by polypeptides of the invention (including antibodies and agonists or antagonists of the invention) include assays disclosed in: Shimizu, H., et al., Endocr J, 47(3): 261-9 (2000); Salapatek, A. M.,
et al., Mol Endocrinol, 13(8): 1305-17 (1999); Filipsson, K., et al., Ann N Y Acad Sci, 865: 441-4 (1998); Olson, L. K., et al., J Biol Chem, 271(28): 16544-52 (1996); and, Miraglia S et. al., Journal of
Biomolecular Screening, 4: 193-204 (1999), the contents of each of which is herein incorporated by reference in its entirety. Pancreatic cells that may be used according to these assays are publicly available (e.g.,
through the ATCC) and/or may be routinely generated. Exemplary pancreatic cells that may be used according to these assays include HITT15 Cells. HITT15 are an adherent epithelial cell line established from
Syrian hamster islet cells transformed with SV40. These cells express glucagon, somatostatin, and glucocorticoid receptors. The cells secrete insulin, which is stimulated by glucose and glucagon and suppressed
by somatostatin or glucocorticoids. ATTC# CRL-1777 Refs: Lord and Ashcroft. Biochem. J. 219: 547-551; Santerre et al. Proc. Natl. Acad. Sci. USA 78: 4339-4343, 1981.
Preferred Indication: A highly preferred indication is diabetes mellitus. An additional highly preferred indication is a complication associated with diabetes (e.g., diabetic retinopathy, diabetic nephropathy,
kidney disease (e.g., renal failure, nephropathy and/or other diseases and disorders as described in the “Renal Disorders” section below), diabetic neuropathy, nerve disease and nerve damage (e.g., due to diabetic
neuropathy), blood vessel blockage, heart disease, stroke, impotence (e.g., due to diabetic neuropathy or blood vessel blockage), seizures, mental confusion, drowsiness, nonketotic hyperglycemic-hyperosmolar
coma, cardiovascular disease (e.g., heart disease, atherosclerosis, microvascular disease, hypertension, stroke, and other diseases and disorders as described in the “Cardiovascular Disorders” section below),
dyslipidemia, endocrine disorders (as described in the “Endocrine Disorders” section below), neuropathy, vision impairment (e.g., diabetic retinopathy and blindness), ulcers and impaired wound healing, and
infection (e.g., infectious diseases and disorders as described in the “Infectious Diseases” section below, especially of the urinary tract and skin), carpal tunnel syndrome and Dupuytren's contracture). An
additional highly preferred indication is obesity and/or complications associated with obesity. Additional highly preferred indications include weight loss or alternatively, weight gain. Additional highly preferred
indications are complications associated with insulin resistance.
Biological Activity: #32: VEGF in SW480
Exemplary Assay:
Preferred Indication:
Biological Activity: #33: Production of IL-10 and activation of T-cells.
Exemplary Assay: Assays for production of IL-10 and activation of T-cells are well known in the art and may be used or routinely modified to assess the ability of polypeptides of the invention (including
antibodies and agonists or antagonists of the invention) to stimulate or inhibit production of IL-10 and/or activation of T-cells. Exemplary assays that may be used or routinely modified to assess the ability of
polypeptides and antibodies of the invention (including agonists or antagonists of the invention) to modulate IL-10 production and/or T-cell proliferation include, for example, assays such as disclosed and/or
cited in: Robinson, DS, et al., “Th-2 cytokines in allergic disease” Br Med Bull; 56 (4): 956-968 (2000), and Cohn, et al., “T-helper type 2 cell-directed therapy for asthma” Pharmacology & Therapeutics; 88:
187-196 (2000); the contents of each of which are herein incorporated by reference in their entirety. Exemplary cells that may be used according to these assays include Th2 cells. IL10 secreted from Th2 cells
may be measured as a marker of Th2 cell activation. Th2 cells are a class of T cells that secrete IL4, IL10, IL13, IL5 and IL6. Factors that induce differentiation and activation of Th2 cells play a major role in
the initiation and pathogenesis of allergy and asthma. Primary T helper 2 cells are generated via in vitro culture under Th2 polarizing conditions using peripheral blood lymphocytes isolated from cord blood.
Preferred Indication: Highly preferred indications include allergy and asthma. Additional highly preferred indications include immune and hematopoietic disorders (e.g., as described below under “Immune
Activity”, and “Blood-Related Disorders”), autoimmune diseases (e.g., rheumatoid arthritis, systemic lupus erythematosis, Crohn''s disease, multiple sclerosis and/or as described below), immunodeficiencies
(e.g., as described below), boosting a T cell-mediated immune response, and suppressing a T cell-mediated immune response.
Biological Activity: #34: Activation of transcription through GATA-3 response element in immune cells (such as mast cells).
Exemplary Assay: This reporter assay measures activation of the GATA-3 signaling pathway in HMC-1 human mast cell line. Activation of GATA-3 in mast cells has been linked to cytokine and chemokine
production. Assays for the activation of transcription through the GATA3 response element are well-known in the art and may be used or routinely modified to assess the ability of polypeptides of the invention
(including antibodies and agonists or antagonists of the invention) to regulate GATA3 transcription factors and modulate expression of mast cell genes important for immune response development. Exemplary
assays for transcription through the GATA3 response element that may be used or routinely modified to test GATA3-response element activity of polypeptides of the invention (including antibodies and agonists
or antagonists of the invention) include assays disclosed in Berger et al., Gene 66: 1-10 (1998); Cullen and Malm, Methods in Enzymol 216: 362-368 (1992); Henthorn et al., Proc Natl Acad Sci USA 85: 6342-6346
(1988); Flavell et al., Cold Spring Harb Symp Quant Biol 64: 563-571 (1999); Rodriguez-Palmero et al., Eur J Immunol 29(12): 3914-3924 (1999); Zheng and Flavell, Cell 89(4): 587-596 (1997); and
Henderson et al., Mol Cell Biol 14(6): 4286-4294 (1994), the contents of each of which are herein incorporated by reference in its entirety. Mast cells that may be used according to these assays are publicly
available (e.g., through the ATCC). Exemplary human mast cells that may be used according to these assays include the HMC-1 cell line, which is an immature human mast cell line established from the
peripheral blood of a patient with mast cell leukemia, and exhibits many characteristics of immature mast cells.
Preferred Indication: Highly preferred indications include allergy, asthma, and rhinitis. Additional preferred indications include infection (e.g., an infectious disease as described below under “Infectious
Disease”), and inflammation and inflammatory disorders. Preferred indications also include blood disorders (e.g., as described below under “Immune Activity”, “Blood-Related Disorders”, and/or
“Cardiovascular Disorders”). Preferred indications include autoimmune diseases (e.g., rheumatoid arthritis, systemic lupus erythematosis, multiple sclerosis and/or as described below) and immunodeficiencies
(e.g., as described below). Preferred indications include neoplastic diseases (e.g., leukemia, lymphoma, melanoma, prostate, breast, lung, colon, pancreatic, esophageal, stomach, brain, liver, and urinary tract
cancers and/or as described below under “Hyperproliferative Disorders”). Other preferred indications include benign dysproliferative disorders and pre-neoplastic conditions, such as, for example, hyperplasia,
metaplasia, and/or dysplasia. Preferred indications include anemia, pancytopenia, leukopenia, thrombocytopenia, leukemias, Hodgkin's disease, acute lymphocytic anemia (ALL), plasmacytomas, multiple
myeloma, Burkitt's lymphoma, arthritis, AIDS, granulomatous disease, inflammatory bowel disease, sepsis, neutropenia, neutrophilia, psoriasis, suppression of immune reactions to transplanted organs and
tissues, hemophilia, hypercoagulation, diabetes mellitus, endocarditis, meningitis, and Lyme Disease.
Biological Activity: #35: Activation of transcription through NFKB response element in immune cells (such as the U937 human monocyte cell line).
Exemplary Assay: This assay uses a NFKB response element (which will bind NFKB transcription factors) linked to a reporter gene to measure NFKB mediated transcription in the human monocyte cell line
U937. NFKB is upregulated by cytokines and other factors and NFKB element activation leads to expression of immunomodulatory genes. Activation of NFKB in monocytes can play a role in immune
responses. Exemplary assays for transcription through the NFKB response element that may be used or rountinely modified to test NFKB-response element activity of polypeptides of the invention (including
antibodies and agonists or antagonists of the invention) include assays disclosed in Berger et al., Gene 66: 1-10 (1998); Cullen and Malm, Methods in Enzymol 216: 362-368 (1992); Henthorn et al., Proc Natl
Acad Sci USA 85: 6342-6346 (1988); Valle Blazquez et al, Immunology 90(3): 455-460 (1997); Aramburau et al., J Exp Med 82(3): 801-810 (1995); and Fraser et al., 29(3): 838-844 (1999), the contents of each of
which are herein incorporated by reference in its entirety. Monocytic cells that may be used according to these assays are publicly available (e.g., through the ATCC). Exemplary human monocyte cells that may
be used according to these assays include the U937 cell line, which is cell line derived by Sundstrom and Nilsson in 1974 from malignant cells obtained from the pleural effusion of a patient with histiocytic
lymphoma.
Preferred Indication: Highly preferred indications include inflammation and inflammatory disorders. Highly preferred indications include immunological and hematopoietic disorders (e.g., as described below
under “Immune Activity”, “Blood-Related Disorders”, and/or “Cardiovascular Disorders”). Highly preferred indications include autoimmune diseases (e.g., rheumatoid arthritis, systemic lupus erythematosis,
multiple sclerosis and/or as described below), and immunodeficiencies (e.g., as described below). An additional highly preferred indication is infection (e.g., AIDS, and/or an infectious disease as described
below under “Infectious Disease”). Highly preferred indications include neoplastic diseases (e.g., melanoma, leukemia, lymphoma, and/or as described below under “Hyperproliferative Disorders”). Highly
preferred indications include neoplasms and cancers, such as, melanoma, renal cell carcinoma, leukemia, lymphoma, and prostate, breast, lung, colon, pancreatic, esophageal, stomach, brain, liver and urinary
cancer. Other preferred indications include benign dysproliferative disorders and pre-neoplastic conditions, such as, for example, hyperplasia, metaplasia, and/or dysplasia. Preferred indications also include
anemia, pancytopenia, leukopenia, thrombocytopenia, Hodgkin's disease, acute lymphocytic anemia (ALL), plasmacytomas, multiple myeloma, Burkitt's lymphoma, arthritis, AIDS, granulomatous disease,
inflammatory bowel disease, sepsis, neutropenia, neutrophilia, psoriasis, hemophilia, hypercoagulation, diabetes mellitus, endocarditis, meningitis, Lyme Disease, suppression of immune reactions to transplanted
organs, asthma and allergy.
Biological Activity: #36: Activation of transcription through NFKB response element in epithelial cells (such as HELA cells).
Exemplary Assay: Assays for the activation of transcription through the NFKB response element are well-known in the art and may be used or routinely modified to assess the ability of polypeptides of the
invention (including antibodies and agonists or antagonists of the invention) to regulate NFKB transcription factors and modulate expression of epithhelial genes. Exemplary assays for transcription through the
NFKB response element that may be used or routinely modified to test NFKB-response element activity of polypeptides of the invention (including antibodies and agonists or antagonists of the invention) include
assays disclosed in: Kaltschmidt B, et al., Oncogene, 18(21): 3213-3225 (1999); Beetz A, et al., Int J Radiat Biol, 76(11): 1443-1453 (2000); Berger et al., Gene 66: 1-10 (1998); Cullen and Malm, Methods in
Enzymol 216: 362-368 (1992); Henthorn et al., Proc Natl Acad Sci USA 85: 6342-6346 (1988); Valle Blazquez et al, Immunology 90(3): 455-460 (1997); Aramburau et al., J Exp Med 82(3): 801-810 (1995); and
Fraser et al., 29(3): 838-844 (1999), the contents of each of which are herein incorporated by reference in its entirety. Epithelial cells that may be used according to these assays are publicly available (e.g.,
through the ATCC). Exemplary epithelial cells that may be used according to these assays include the HELA cell line.
Preferred Indication: Preferred embodiments of the invention include using polypeptides of the invention (or antibodies, agonists, or antagonists thereof) in detection, diagnosis, prevention, and/or treatment of
Cancer, Wound Healing, and Inflamation. Highly preferred indications include neoplastic diseases (e.g., as described below under “Hyperproliferative Disorders”). Highly preferred indications include
neoplasms and cancers, such as, for example, melanoma, and prostate, breast, lung, colon, pancreatic, esophageal, stomach, brain, liver and urinary cancer. Other preferred indications include benign
dysproliferative disorders and pre-neoplastic conditions, such as, for example, hyperplasia, metaplasia, and/or dysplasia. Preferred indications include include inflammation and inflammatory disorders.
Biological Activity: #37: Activation or inhibition of transcription through NFKB response element in immune cells (such as basophils).
Exemplary Assay: This reporter assay measures activation or inhibition of the NFkB signaling pathway in Ku812 human basophil cell line. Assays for the activation or inhibition of transcription through the
NFKB response element are well-known in the art and may be used or routinely modified to assess the ability of polypeptides of the invention (including antibodies and agonists or antagonists of the invention) to
regulate NFKB transcription factors and modulate expression of immunomodulatory genes. NFkB is important in the pathogenesis of asthma. Exemplary assays for transcription through the NFKB response
element that may be used or rountinely modified to test NFKB-response element activity of polypeptides of the invention (including antibodies and agonists or antagonists of the invention) include assays
disclosed in Berger et al., Gene 66: 1-10 (1998); Cullen and Malm, Methods in Enzymol 216: 362-368 (1992); Henthorn et al., Proc Natl Acad Sci USA 85: 6342-6346 (1988); Marone et al, Int Arch Allergy
Immunol 114(3): 207-17 (1997), the contents of each of which are herein incorporated by reference in its entirety. Cells were pretreated with SID supernatants or controls for 15-18 hours, and then 10 ng/mL of
TNF was added to stimulate the NFkB reporter. SEAP activity was measured after 48 hours. Basophils that may be used according to these assays are publicly available (e.g., through the ATCC). Exemplary
human basophil cell lines that may be used according to these assays include Ku812, originally established from a patient with chronic myelogenous leukemia. It is an immature prebasophilic cell line that can be
induced to differentiate into mature basophils. See, Kishi et al., Leuk Res. 9: 381-390 (1985); Blom et al., Eur J Immunol. 22: 2025-32 (1992), where the contents of each are herein incorporated by reference in its
entirety.
Preferred Indication:
Biological Activity: #38c: Activation of transcription through GAS response element in immune cells (such as T-cells).
Exemplary Assay: Assays for the activation of transcription through the Gamma Interferon Activation Site (GAS) response element are well-known in the art and may be used or routinely modified to assess the
ability of polypeptides of the invention (including antibodies and agonists or antagonists of the invention) to regulate STAT transcription factors and modulate gene expression involved in a wide variety of cell
functions. Exemplary assays for transcription through the GAS response element that may be used or routinely modified to test GAS-response element activity of polypeptides of the invention (including
antibodies and agonists or antagonists of the invention) include assays disclosed in Berger et al., Gene 66: 1-10 (1998); Cullen and Malm, Methods in Enzymol 216: 362-368 (1992); Henthorn et al., Proc Natl
Acad Sci USA 85: 6342-6346 (1988); Matikainen et al., Blood 93(6): 1980-1991 (1999); and Henttinen et al., J Immunol 155(10): 4582-4587 (1995), the contents of each of which are herein incorporated by
reference in its entirety. Exemplary mouse T cells that may be used according to these assays are publicly available (e.g., through the ATCC). Exemplary T cells that may be used according to these assays
include the CTLL cell line, which is a suspension culture of IL-2 dependent cytotoxic T cells.
Preferred Indication: Highly preferred indications include neoplastic diseases (e.g., leukemia, lymphoma, and/or as described below under “Hyperproliferative Disorders”). Highly preferred indications
include neoplasms and cancers, such as, for example, leukemia, lymphoma (e.g., T cell lymphoma, Burkitt's lymphoma, non-Hodgkins lymphoma, Hodgkin''s disease), melanoma, and prostate, breast, lung,
colon, pancreatic, esophageal, stomach, brain, liver and urinary cancer. Other preferred indications include benign dysproliferative disorders and pre-neoplastic conditions, such as, for example, hyperplasia,
metaplasia, and/or dysplasia. Preferred indications include autoimmune diseases (e.g., rheumatoid arthritis, systemic lupus erythematosis, multiple sclerosis and/or as described below), immunodeficiencies
(e.g., as described below), boosting a T cell-mediated immune response, and suppressing a T cell-mediated immune response. Additional preferred indications include inflammation and inflammatory disorders.
Highly preferred indications include blood disorders (e.g., as described below under “Immune Activity”, “Blood-Related Disorders”, and/or “Cardiovascular Disorders”), and infection (e.g., viral infections,
tuberculosis, infections associated with chronic granulomatosus disease and malignant osteoporosis, and/or an infectious disease as described below under “Infectious Disease”). An additional preferred
indication is idiopathic pulmonary fibrosis. Preferred indications include anemia, pancytopenia, leukopenia, thrombocytopenia, acute lymphocytic anemia (ALL), plasmacytomas, multiple myeloma, arthritis,
AIDS, granulomatous disease, inflammatory bowel disease, sepsis, neutropenia, neutrophilia, psoriasis, suppression of immune reactions to transplanted organs and tissues, hemophilia, hypercoagulation,
diabetes mellitus, endocarditis, meningitis, Lyme Disease, and asthma and allergy.
Biological Activity: #38: Activation of transcription through GAS response element in immune cells (such as T-cells).
Exemplary Assay: Assays for the activation of transcription through the Gamma Interferon Activation Site (GAS) response element are well-known in the art and may be used or routinely modified to assess the
ability of polypeptides of the invention (including antibodies and agonists or antagonists of the invention) to regulate STAT transcription factors and modulate gene expression involved in a wide variety of cell
functions. Exemplary assays for transcription through the GAS response element that may be used or routinely modified to test GAS-response element activity of polypeptides of the invention (including
antibodies and agonists or antagonists of the invention) include assays disclosed in Berger et al., Gene 66: 1-10 (1998); Cullen and Malm, Methods in Enzymol 216: 362-368 (1992); Henthorn et al., Proc Natl
Acad Sci USA 85: 6342-6346 (1988); Matikainen et al., Blood 93(6): 1980-1991 (1999); and Henttinen et al., J Immunol 155(10): 4582-4587 (1995), the contents of each of which are herein incorporated by
reference in its entirety. Exemplary human T cells, such as the SUPT cell line, that may be used according to these assays are publicly available (e.g., through the ATCC).
Preferred Indication: Highly preferred indications include neoplastic diseases (e.g., leukemia, lymphoma, and/or as described below under “Hyperproliferative Disorders”). Highly preferred indications include
neoplasms and cancers, such as, for example, leukemia, lymphoma (e.g., T cell lymphoma, Burkitt's lymphoma, non-Hodgkins lymphoma, Hodgkin''s disease), melanoma, and prostate, breast, lung, colon,
pancreatic, esophageal, stomach, brain, liver and urinary cancer. Other preferred indications include benign dysproliferative disorders and pre-neoplastic conditions, such as, for example, hyperplasia, metaplasia,
and/or dysplasia. Preferred indications include autoimmune diseases (e.g., rheumatoid arthritis, systemic lupus erythematosis, multiple sclerosis and/or as described below), immunodeficiencies (e.g., as
described below), boosting a T cell-mediated immune response, and suppressing a T cell-mediated immune response. Additional preferred indications include inflammation and inflammatory disorders. Highly
preferred indications include blood disorders (e.g., as described below under “Immune Activity”, “Blood-Related Disorders”, and/or “Cardiovascular Disorders”), and infection (e.g., viral infections, tuberculosis,
infections associated with chronic granulomatosus disease and malignant osteoporosis, and/or an infectious disease as described below under “Infectious Disease”). An additional preferred indication is
idiopathic pulmonary fibrosis. Preferred indications include anemia, pancytopenia, leukopenia, thrombocytopenia, acute lymphocytic anemia (ALL), plasmacytomas, multiple myeloma, arthritis, AIDS,
granulomatous disease, inflammatory bowel disease, sepsis, neutropenia, neutrophilia, psoriasis, suppression of immune reactions to transplanted organs and tissues, hemophilia, hypercoagulation, diabetes
mellitus, endocarditis, meningitis, Lyme Disease, and asthma and allergy.
Biological Activity: #39: Protection from Endothelial Cell Apoptosis.
Exemplary Assay: Caspase Apoptosis Rescue. Assays for caspase apoptosis rescue are well known in the art and may be used or routinely modified to assess the ability of the polypeptides of the invention
(including antibodies and agonists or antagonists of the invention) to inhibit caspase protease-mediated apoptosis. Exemplary assays for caspase apoptosis that may be used or routinely modified to test caspase
apoptosis rescue of polypeptides of the invention (including antibodies and agonists or antagonists of the invention) include the assays disclosed in Romeo et al., Cardiovasc Res 45(3): 788-794 (2000); Messmer
et al., Br J Pharmacol 127(7): 1633-1640 (1999); and J Atheroscler Thromb 3(2): 75-80 (1996); the contents of each of which are herein incorporated by reference in its entirety. Endothelial cells that may be
used according to these assays are publicly available (e.g., through commercial sources). Exemplary endothelial cells that may be used according to these assays include bovine aortic endothelial cells (bAEC),
which are an example of endothelial cells which line blood vessels and are involved in functions that include, but are not limited to, angiogenesis, vascular permeability, vascular tone, and immune cell
extravasation.
Preferred Indication: A highly preferred embodiment of the invention includes a method for stimulating endothelial cell growth. An alternative highly preferred embodiment of the invention includes a
method for inhibiting endothelial cell growth. A highly preferred embodiment of the invention includes a method for stimulating endothelial cell proliferation. An alternative highly preferred embodiment of
the invention includes a method for inhibiting endothelial cell proliferation. A highly preferred embodiment of the invention includes a method for stimulating endothelial cell growth. An alternative highly
preferred embodiment of the invention includes a method for inhibiting endothelial cell growth. A highly preferred embodiment of the invention includes a method for stimulating apoptosis of endothelial
cells. An alternative highly preferred embodiment of the invention includes a method for inhibiting (e.g., decreasing) apoptosis of endothelial cells. A highly preferred embodiment of the invention includes a
method for stimulating angiogenisis. An alternative highly preferred embodiment of the invention includes a method for inhibiting angiogenesis. A highly preferred embodiment of the invention includes a
method for reducing cardiac hypertrophy. An alternative highly preferred embodiment of the invention includes a method for inducing cardiac hypertrophy. Highly preferred indications include neoplastic
diseases (e.g., as described below under “Hyperproliferative Disorders”), and disorders of the cardiovascular system (e.g., heart disease, congestive heart failure, hypertension, aortic stenosis, cardiomyopathy,
valvular regurgitation, left ventricular dysfunction, atherosclerosis and atherosclerotic vascular disease, diabetic nephropathy, intracardiac shunt, cardiac hypertrophy, myocardial infarction, chronic
hemodynamic overload, and/or as described below under “Cardiovascular Disorders”). Highly preferred indications include cardiovascular, endothelial and/or angiogenic disorders (e.g., systemic disorders that
affect vessels such as diabetes mellitus, as well as diseases of the vessels themselves, such as of the arteries, capillaries, veins and/or lymphatics). Highly preferred are indications that stimulate angiogenesis
and/or cardiovascularization. Highly preferred are indications that inhibit angiogenesis and/or cardiovascularization. Highly preferred indications include antiangiogenic activity to treat solid tumors,
leukemias, and Kaposi''s sarcoma, and retinal disorders. Highly preferred indications include neoplasms and cancer, such as, Kaposi''s sarcoma, hemangioma (capillary and cavernous), glomus tumors,
telangiectasia, bacillary angiomatosis, hemangioendothelioma, angiosarcoma, haemangiopericytoma, lymphangioma, lymphangiosarcoma. Highly preferred indications also include cancers such as, prostate,
breast, lung, colon, pancreatic, esophageal, stomach, brain, liver, and urinary cancer. Preferred indications include benign dysproliferative disorders and pre-neoplastic conditions, such as, for example,
hyperplasia, metaplasia, and/or dysplasia. Highly preferred indications also include arterial disease, such as, atherosclerosis, hypertension, coronary artery disease, inflammatory vasculitides, Reynaud''s
disease and Reynaud''s phenomenom, aneurysms, restenosis; venous and lymphatic disorders such as thrombophlebitis, lymphangitis, and lymphedema; and other vascular disorders such as peripheral vascular
disease, and cancer. Highly preferred indications also include trauma such as wounds, burns, and injured tissue (e.g., vascular injury such as, injury resulting from balloon angioplasty, and atheroschlerotic
lesions), implant fixation, scarring, ischemia reperfusion injury, rheumatoid arthritis, cerebrovascular disease, renal diseases such as acute renal failure, and osteoporosis. Additional highly preferred
indications include stroke, graft rejection, diabetic or other retinopathies, thrombotic and coagulative disorders, vascularitis, lymph angiogenesis, sexual disorders, age-related macular degeneration, and treatment/
prevention of endometriosis and related conditions. Additional highly preferred indications include fibromas, heart disease, cardiac arrest, heart valve disease, and vascular disease. Preferred indications
include blood disorders (e.g., as described below under “Immune Activity”, “Blood-Related Disorders”, and/or “Cardiovascular Disorders”). Preferred indications include autoimmune diseases (e.g., rheumatoid
arthritis, systemic lupus erythematosis, multiple sclerosis and/or as described below) and immunodeficiencies (e.g., as described below). Additional preferred indications include inflammation and inflammatory
disorders (such as acute and chronic inflammatory diseases, e.g., inflammatory bowel disease and Crohn's disease), and pain management.
Biological Activity: #40: Activation of Hepatocyte ERK Signaling Pathway
Exemplary Assay: Kinase assay. Kinase assays, for example an Elk-1 kinase assay, for ERK signal transduction that regulate cell proliferation or differentiation are well known in the art and may be used or
routinely modified to assess the ability of polypeptides of the invention (including antibodies and agonists or antagonists of the invention) to promote or inhibit cell proliferation, activation, and differentiation.
Exemplary assays for ERK kinase activity that may be used or routinely modified to test ERK kinase-induced activity of polypeptides of the invention (including antibodies and agonists or antagonists of the
invention) include the assays disclosed in Forrer et al., Biol Chem 379(8-9): 1101-1110 (1998); Kyriakis JM, Biochem Soc Symp 64: 29-48 (1999); Chang and Karin, Nature 410(6824): 37-40 (2001); and Cobb MH,
Prog Biophys Mol Biol 71(3-4): 479-500 (1999); the contents of each of which are herein incorporated by reference in its entirety. Rat liver hepatoma cells that may be used according to these assays are
publicly available (e.g., through the ATCC). Exemplary rat liver hepatoma cells that may be used according to these assays include H4IIe cells, which are known to respond to glucocorticoids, insulin, or cAMP
derivatives.
Preferred Indication: A highly preferred embodiment of the invention includes a method for stimulating hepatocyte cell proliferation. An alternative highly preferred embodiment of the invention includes a
method for inhibiting hepatocyte cell proliferation. A highly preferred embodiment of the invention includes a method for stimulating hepatocyte cell differentiation. An alternative highly preferred
embodiment of the invention includes a method for inhibiting hepatocyte cell differentiation. A highly preferred embodiment of the invention includes a method for activating hepatocyte cells. An alternative
highly preferred embodiment of the invention includes a method for inhibiting the activation of and/or inactivating hepatocyte cells. Highly preferred indications include disorders of the liver and/or endocrine
disorders (e.g., as described below under “Endocrine Disorders”). Preferred indications include neoplastic diseases (e.g., as described below under “Hyperproliferative Disorders”), blood disorders (e.g., as
described below under “Immune Activity”, “Cardiovascular Disorders”, and/or “Blood-Related Disorders”), immune disorders (e.g., as described below under “Immune Activity”), neural disorders (e.g., as
described below under “Neural Activity and Neurological Diseases”), and infection (e.g., as described below under “Infectious Disease”). A highly preferred indication is diabetes mellitus. An
additional highly preferred indication is a complication associated with diabetes (e.g., diabetic retinopathy, diabetic nephropathy, kidney disease (e.g., renal failure, nephropathy and/or other diseases and
disorders as described in the “Renal Disorders” section below), diabetic neuropathy, nerve disease and nerve damage (e.g., due to diabetic neuropathy), blood vessel blockage, heart disease, stroke, impotence
(e.g., due to diabetic neuropathy or blood vessel blockage), seizures, mental confusion, drowsiness, nonketotic hyperglycemic-hyperosmolar coma, cardiovascular disease (e.g., heart disease, atherosclerosis,
microvascular disease, hypertension, stroke, and other diseases and disorders as described in the “Cardiovascular Disorders” section below), dyslipidemia, endocrine disorders (as described in the “Endocrine
Disorders” section below), neuropathy, vision impairment (e.g., diabetic retinopathy and blindness), ulcers and impaired wound healing, infection (e.g., infectious diseases and disorders as described in the
“Infectious Diseases” section below, especially of the urinary tract and skin), carpal tunnel syndrome and Dupuytren's contracture). An additional highly preferred indication is obesity and/or complications
associated with obesity. Additional highly preferred indications include weight loss or alternatively, weight gain. Additional highly preferred indications are complications associated with insulin resistance.
Additonal highly preferred indications are disorders of the musculoskeletal systems including myopathies, muscular dystrophy, and/or as described herein. Additional highly preferred indications
include, hepatitis, jaundice, gallstones, cirrhosis of the liver, degenerative or necrotic liver disease, alcoholic liver diseases, fibrosis, liver regeneration, metabolic disease, dyslipidemia and chlolesterol
metabolism. Additional highly preferred indications include neoplasms and cancers, such as, hepatocarcinomas, other liver cancers, and colon and pancreatic cancer. Preferred indications also
include prostate, breast, lung, esophageal, stomach, brain, and urinary cancer. Other preferred indications include benign dysproliferative disorders and pre-neoplastic conditions, such as, for example,
hyperplasia, metaplasia, and/or dysplasia.
Biological Activity: #41: Inhibition of adipocyte ERK signaling pathway.
Exemplary Assay: Kinase assay: measures the phosphorylation of Elk-1, an indication of activation of extracellular signal regulated kinase (ERK). ERK pathway regulates cell growth, proliferation and
differentiation. Cells were pretreated with SID supernatants for 15-18 hours, and then 100 nM of insulin was added to stimulate ERK kinase. Phosphorylation of Elk-1 was measured after a 20 minute
incubation. Pre-adipocytes that may be used according to these assays are publicly available (e.g., through the ATCC) and/or may be routinely generated. Exemplary mouse adipocyte cells that may be used
according to these assays include 3T3-L1 cells. 3T3-L1 is an adherent mouse preadipocyte cell line that is a continuous substrain of 3T3 fibroblast cells developed through clonal isolation and undergo a pre-
adipocyte to adipose-like conversion under appropriate differentiation conditions known in the art. Cells were differentiated to an adipose-like state before being used in the screen. See Green et al., Cell 3: 127-133
(1974), the contents of which are herein incorporated by reference in its entirety.
Preferred Indication:
Biological Activity: #42: Calcium flux in immune cells (such as monocytes)
Exemplary Assay: Assays for measuring calcium flux are well-known in the art and may be used or routinely modified to assess the ability of polypeptides of the invention (including antibodies and agonists or
antagonists of the invention) to mobilize calcium. Cells normally have very low concentrations of cytosolic calcium compared to much higher extracellular calcium. Extracellular factors can cause an influx of
calcium, leading to activation of calcium responsive signaling pathways and alterations in cell functions. Exemplary assays that may be used or routinely modified to measure calcium flux in immune cells (such
as monocytes) include assays disclosed in: Chan, CC, et al., J Pharmacol Exp Ther, 269(3): 891-896 (1994); Andersson, K, et al., Cytokine, 12(12): 1784-1787 (2000); Scully, SP, et al., J Clin Invest, 74(2) 589-599
(1984); and, Sullivan, E, et al., Methods Mol Biol, 114: 125-133 (1999), the contents of each of which is herein incorporated by reference in its entirety. Cells that may be used according to these assays are
publicly available (e.g., through the ATCC) and/or may be routinely generated. Exemplary cells that may be used according to these assays include the THP-1 monocyte cell line.
Preferred Indication: Preferred embodiments of the invention include using polypeptides of the invention (or antibodies, agonists, or antagonists thereof) in detection, diagnosis, prevention, and/or treatment of
Infection, Inflammation, Atherosclerosis, Hypersensitivity, and Leukemias
Biological Activity: #43: Production of RANTES in endothelial cells (such as human umbilical vein endothelial cells (HUVEC))
Exemplary Assay: RANTES FMAT. Assays for immunomodulatory proteins that induce chemotaxis of T cells, monocytes, and eosinophils are well known in the art and may be used or routinely modified to
assess the ability of polypeptides of the invention (including antibodies and agonists or antagonists of the invention) to mediate immunomodulation, induce chemotaxis, and/or mediate humoral or cell-mediated
immunity. Exemplary assays that test for immunomodulatory proteins evaluate the production of cytokines, such as RANTES, and the induction of chemotactic responses in immune cells. Such assays that may
be used or routinely modified to test immunomodulatory activity of polypeptides of the invention (including antibodies and agonists or antagonists of the invention) include the assays disclosed in Miraglia et al.,
J Biomolecular Screening 4: 193-204 (1999); Rowland et al., “Lymphocytes: a practical approach” Chapter 6: 138-160 (2000): Cocchi et al., Science 270(5243): 1811-1815 (1995); and Robinson et al., Clin Exp
Immunol 101(3): 398-407 (1995), the contents of each of which are herein incorporated by reference in its entirety. Endothelial cells that may be used according to these assays are publicly available (e.g.,
through the ATCC). Exemplary endothelial cells that may be used according to these assays include human umbilical vein endothelial cells (HUVEC), which are endothelial cells which line venous blood
vessels, and are involved in functions that include, but are not limited to, angiogenesis, vascular permeability, vascular tone, and immune cell extravasation.
Preferred Indication:
Biological Activity: #44: Myoblast cell proliferation
Exemplary Assay: Assays for muscle cell proliferation are well known in the art and may be used or routinely modified to assess the ability of polypeptides of the invention (including antibodies and agonists or
antagonists of the invention) to stimulate or inhibit myoblast cell proliferation. Exemplary assays for myoblast cell proliferation that may be used or routinely modified to test activity of polypeptides and
antibodies of the invention (including agonists or antagonists of the invention) include, for example, assays disclosed in: Soeta, C., et al. “Possible role for the c-ski gene in the proliferation of myogenic cells in
regenerating skeletal muscles of rats” Dev Growth Differ Apr; 43(2): 155-64 (2001); Ewton DZ, et al., “IGF binding proteins-4, -5 and -6 may play specialized roles during L6 myoblast proliferation and
differentiation” J Endocrinol Mar; 144(3): 539-53 (1995); and, Pampusch MS, et al., “Effect of transforming growth factor beta on proliferation of L6 and embryonic porcine myogenic cells” J Cell Physiol
Jun; 143(3): 524-8 (1990); the contents of each of which are herein incorporated by reference in their entirety. Exemplary myoblast cells that may be used according to these assays include the rat myoblast L6 cell
line. Rat myoblast L6 cells are an adherent rat myoblast cell line, isolated from primary cultures of rat thigh muscle, that fuse to form multinucleated myotubes and striated fibers after culture in differentiation
media.
Preferred Indication: Highly preferred indications include diabetes, myopathy, muscle cell atrophy, cancers of muscle (such as, rhabdomyoma, and rhabdosarcoma), cardiovascular disorders (such as congestive
heart failure, cachexia, myxomas, fibromas, congenital cardiovascular abnormalities, heart disease, cardiac arrest, heart valve disease, vascular disease, and also as described below under “Cardiovascular
Disorders”), stimulating myoblast proliferation, and inhibiting myoblast proliferation.
Biological Activity: #45: Production of MCP-1
Exemplary Assay: MCP-1 FMAT. Assays for immunomodulatory proteins that are produced by a large variety of cells and act to induce chemotaxis and activation of monocytes and T cells are well known in
the art and may be used or routinely modified to assess the ability of polypeptides of the invention (including antibodies and agonists or antagonists of the invention) to mediate immunomodulation, induce
chemotaxis, and modulate immune cell activation. Exemplary assays that test for immunomodulatory proteins evaluate the production of cell surface markers, such as monocyte chemoattractant protein (MCP),
and the activation of monocytes and T cells. Such assays that may be used or routinely modified to test immunomodulatory and differentiation activity of polypeptides of the invention (including antibodies and
agonists or antagonists of the invention) include assays disclosed in Miraglia et al., J Biomolecular Screening 4: 193-204(1999); Rowland et al., “Lymphocytes: a practical approach” Chapter 6: 138-160 (2000);
Satthaporn and Eremin, J R Coll Surg Ednb 45(1): 9-19 (2001); and Verhasselt et al., J Immunol 158: 2919-2925 (1997), the contents of each of which are herein incorporated by reference in its entirety. Human
dendritic cells that may be used according to these assays may be isolated using techniques disclosed herein or otherwise known in the art. Human dendritic cells are antigen presenting cells in suspension
culture, which, when activated by antigen and/or cytokines, initiate and upregulate T cell proliferation and functional activities.
Preferred Indication: A highly preferred embodiment of the invention includes a method for stimulating (e.g., increasing) MCP-1 production. An alternative highly preferred embodiment of the invention
includes a method for inhibiting (e.g., reducing) MCP-1 production. A highly preferred indication is infection (e.g., an infectious disease as described below under “Infectious Disease”). Additional highly
preferred indications include inflammation and inflammatory disorders. Preferred indications include blood disorders (e.g., as described below under “Immune Activity”, “Blood-Related Disorders”, and/or
“Cardiovascular Disorders”). Highly preferred indications include autoimmune diseases (e.g., rheumatoid arthritis, systemic lupus erythematosis, multiple sclerosis and/or as described below) and
immunodeficiencies (e.g., as described below). Preferred indications also include anemia, pancytopenia, leukopenia, thrombocytopenia, Hodgkin's disease, acute lymphocytic anemia (ALL), plasmacytomas,
multiple myeloma, Burkitt's lymphoma, arthritis, AIDS, granulomatous disease, inflammatory bowel disease, sepsis, neutropenia, neutrophilia, psoriasis, suppression of immune reactions to transplanted organs
and tissues, hemophilia, hypercoagulation, diabetes mellitus, endocarditis, meningitis (bacterial and viral), Lyme Disease, asthma, and allergy Preferred indications also include neoplastic diseases (e.g.,
leukemia, lymphoma, and/or as described below under “Hyperproliferative Disorders”). Highly preferred indications include neoplasms and cancers, such as, leukemia, lymphoma, prostate, breast, lung, colon,
pancreatic, esophageal, stomach, brain, liver, and urinary cancer. Other preferred indications include benign dysproliferative disorders and pre-neoplastic conditions, such as, for example, hyperplasia,
metaplasia, and/or dysplasia.
Biological Activity: #46: Activation of transcription through serum response element in pre-adipocytes.
Exemplary Assay: Assays for the activation of transcription through the Serum Response Element (SRE) are well-known in the art and may be used or routinely modified to assess the ability of polypeptides of
the invention (including antibodies and agonists or antagonists of the invention) to regulate the serum response factors and modulate the expression of genes involved in growth. Exemplary assays for
transcription through the SRE that may be used or routinely modified to test SRE activity of the polypeptides of the invention (including antibodies and agonists or antagonists of the invention) include assays
disclosed in Berger et al., Gene 66: 1-10 (1998); Cullen and Malm, Methods in Enzymol 216: 362-368 (1992); Henthorn et al., Proc Natl Acad Sci USA 85: 6342-6346 (1988); and Black et al., Virus Genes
12(2): 105-117 (1997), the content of each of which are herein incorporated by reference in its entirety. Pre-adipocytes that may be used according to these assays are publicly available (e.g., through the ATCC)
and/or may be routinely generated. Exemplary mouse adipocyte cells that may be used according to these assays include 3T3-L1 cells. 3T3-L1 is an adherent mouse preadipocyte cell line that is a continuous
substrain of 3T3 fibroblast cells developed through clonal isolation and undergo a pre-adipocyte to adipose-like conversion under appropriate differentiation conditions known in the art.
Preferred Indication: A highly preferred indication is obesity and/or complications associated with obesity. Additional highly preferred indications include weight loss or alternatively, weight gain. An
additional highly preferred indication is diabetes mellitus. An additional highly preferred indication is a complication associated with diabetes (e.g., diabetic retinopathy, diabetic nephropathy, kidney disease
(e.g., renal failure, nephropathy and/or other diseases and disorders as described in the “Renal Disorders” section below), diabetic neuropathy, nerve disease and nerve damage (e.g., due to diabetic neuropathy),
blood vessel blockage, heart disease, stroke, impotence (e.g., due to diabetic neuropathy or blood vessel blockage), seizures, mental confusion, drowsiness, nonketotic hyperglycemic-hyperosmolar coma,
cardiovascular disease (e.g., heart disease, atherosclerosis, microvascular disease, hypertension, stroke, and other diseases and disorders as described in the “Cardiovascular Disorders” section below),
dyslipidemia, endocrine disorders (as described in the “Endocrine Disorders” section below), neuropathy, vision impairment (e.g., diabetic retinopathy and blindness), ulcers and impaired wound healing, and
infection (e.g., infectious diseases and disorders as described in the “Infectious Diseases” section below). Additional highly preferred indications are complications associated with insulin resistance.
Biological Activity: #47: Activation of transcription through NFAT response element in immune cells (such as mast cells).
Exemplary Assay: This reporter assay measures activation of the NFAT signaling pathway in HMC-1 human mast cell line. Activation of NFAT in mast cells has been linked to cytokine and chemokine
production. Assays for the activation of transcription through the Nuclear Factor of Activated T cells (NFAT) response element are well-known in the art and may be used or routinely modified to assess the
ability of polypeptides of the invention (including antibodies and agonists or antagonists of the invention) to regulate NFAT transcription factors and modulate expression of genes involved in immunomodulatory
functions. Exemplary assays for transcription through the NFAT response element that may be used or routinely modified to test NFAT-response element activity of polypeptides of the invention (including
antibodies and agonists or antagonists of the invention) include assays disclosed in Berger et al., Gene 66: 1-10 (1998); Cullen and Malm, Methods in Enzymol 216: 362-368 (1992); Henthorn et al., Proc Natl
Acad Sci USA 85: 6342-6346 (1988); De Boer et al., Int J Biochem Cell Biol 31(10): 1221-1236 (1999); Ali et al., J Immunol 165(12): 7215-7223 (2000); Hutchinson and McCloskey, J Biol Chem 270(27): 16333-16338
(1995), and Turner et al., J Exp Med 188: 527-537 (1998), the contents of each of which are herein incorporated by reference in its entirety. Mast cells that may be used according to these assays are
publicly available (e.g., through the ATCC). Exemplary human mast cells that may be used according to these assays include the HMC-1 cell line, which is an immature human mast cell line established from the
peripheral blood of a patient with mast cell leukemia, and exhibits many characteristics of immature mast cells.
Preferred Indication: Highly preferred indications include allergy, asthma, and rhinitis. Additional preferred indications include infection (e.g., an infectious disease as described below under “Infectious
Disease”), and inflammation and inflammatory disorders. Preferred indications also include blood disorders (e.g., as described below under “Immune Activity”, “Blood-Related Disorders”, and/or
“Cardiovascular Disorders”). Preferred indications include autoimmune diseases (e.g., rheumatoid arthritis, systemic lupus erythematosis, multiple sclerosis and/or as described below) and immunodeficiencies
(e.g., as described below). Preferred indications include neoplastic diseases (e.g., leukemia, lymphoma, melanoma, prostate, breast, lung, colon, pancreatic, esophageal, stomach, brain, liver, and urinary tract
cancers and/or as described below under “Hyperproliferative Disorders”). Other preferred indications include benign dysproliferative disorders and pre-neoplastic conditions, such as, for example, hyperplasia,
metaplasia, and/or dysplasia. Preferred indications include anemia, pancytopenia, leukopenia, thrombocytopenia, leukemias, Hodgkin's disease, acute lymphocytic anemia (ALL), plasmacytomas, multiple
myeloma, Burkitt's lymphoma, arthritis, AIDS, granulomatous disease, inflammatory bowel disease, sepsis, neutropenia, neutrophilia, psoriasis, suppression of immune reactions to transplanted organs and
tissues, hemophilia, hypercoagulation, diabetes mellitus, endocarditis, meningitis, and Lyme Disease.
Biological Activity: #48: Activation of transcription through NFKB response element in immune cells (such as mast cells).
Exemplary Assay: This reporter assay measures activation of the NFkB signaling pathway in HMC-1 human mast cell line. Activation of NFkB in mast cells has been linked to production of certain cytokines,
such as IL-6 and IL-9. Assays for the activation of transcription through the NFKB response element are well-known in the art and may be used or routinely modified to assess the ability of polypeptides of the
invention (including antibodies and agonists or antagonists of the invention) to regulate NFKB transcription factors and modulate expression of immunomodulatory genes. Exemplary assays for transcription
through the NFKB response element that may be used or rountinely modified to test NFKB-response element activity of polypeptides of the invention (including antibodies and agonists or antagonists of the
invention) include assays disclosed in Berger et al., Gene 66: 1-10 (1998); Cullen and Malm, Methods in Enzymol 216: 362-368 (1992); Henthorn et al., Proc Natl Acad Sci USA 85: 6342-6346 (1988); Stassen et
al, J Immunol 166(7): 4391-8 (2001); and Marquardt and Walker, J Allergy Clin Immunol 105(3): 500-5 (2000), the contents of each of which are herein incorporated by reference in its entirety. Mast cells that
may be used according to these assays are publicly available (e.g., through the ATCC). Exemplary human mast cells that may be used according to these assays include the HMC-1 cell line, which is an immature
human mast cell line established from the peripheral blood of a patient with mast cell leukemia, and exhibits many characteristics of immature mast cells.
Preferred Indication: Highly preferred indication includes allergy, asthma, and rhinitis. Additional highly preferred indications include infection (e.g., an infectious disease as described below under “Infectious
Disease”), and inflammation and inflammatory disorders. Preferred indications include immunological and hempatopoietic disorders (e.g., as described below under “Immune Activity”, and “Blood-Related
Disorders”). Preferred indications also include autoimmune diseases (e.g., rheumatoid arthritis, systemic lupus erythematosis, multiple sclerosis and/or as described below) and immunodeficiencies (e.g., as
described below). Preferred indications also include neoplastic diseases (e.g., leukemia, lymphoma, melanoma, and/or as described below under “Hyperproliferative Disorders”). Preferred indications include
neoplasms and cancer, such as, for example, leukemia, lymphoma, melanoma, and prostate, breast, lung, colon, pancreatic, esophageal, stomach, brain, liver, urinary tract cancers and as described below under
“Hyperproliferative Disorders”.
Biological Activity: #49: Production of VCAM in endothelial cells (such as human umbilical vein endothelial cells (HUVEC))
Exemplary Assay: Assays for measuring expression of VCAM are well-known in the art and may be used or routinely modified to assess the ability of polypeptides of the invention (including antibodies and
agonists or antagonists of the invention) to regulate VCAM expression. For example, FMAT may be used to meaure the upregulation of cell surface VCAM-1 expresssion in endothelial cells. Endothelial cells
are cells that line blood vessels, and are involved in functions that include, but are not limited to, angiogenesis, vascular permeability, vascular tone, and immune cell extravasation. Exemplary endothelial cells
that may be used according to these assays include human umbilical vein endothelial cells (HUVEC), which are available from commercial sources. The expression of VCAM (CD106), a membrane-associated
protein, can be upregulated by cytokines or other factors, and contributes to the extravasation of lymphocytes, leucocytes and other immune cells from blood vessels; thus VCAM expression plays a role in
promoting immune and inflammatory responses.
Preferred Indication: Highly preferred indications include inflammation (acute and chronic), restnosis, atherosclerosis, asthma and allergy. Highly preferred indications include inflammation and inflammatory
disorders, immunological disorders, neoplastic disorders (e.g. cancer/tumorigenesis), and cardiovascular disorders (such as described below under “Immune Activity”, “Blood-Related Disorders”,
“Hyperproliferative Disorders” and/or “Cardiovascular Disorders”). Highly preferred indications include neoplasms and cancers such as, for example, leukemia, lymphoma, melanoma, renal cell carcinoma, and
prostate, breast, lung, colon, pancreatic, esophageal, stomach, brain, liver and urinary cancer. Other preferred indications include benign dysproliferative disorders and pre-neoplastic conditions, such as, for
example, hyperplasia, metaplasia, and/or dysplasia.
Biological Activity: #50: Calcium flux in chondrocytes
Exemplary Assay: Assays for measuring calcium flux are well-known in the art and may be used or routinely modified to assess the ability of polypeptides of the invention (including antibodies and agonists or
antagonists of the invention) to mobilize calcium. Cells normally have very low concentrations of cytosolic calcium compared to much higher extracellular calcium. Extracellular factors can cause an influx of
calcium, leading to activation of calcium responsive signaling pathways and alterations in cell functions. Exemplary assays that may be used or routinely modified to measure calcium flux in chondrocytes
include assays disclosed in: Asada S, et al., Inflamm Res, 50(1): 19-23 (2001); Schwartz Z, et al., J Bone Miner Res, 6(7): 709-718 (1991); Iannotti JP, et al., J Bone Joint Surg Am, 67(1): 113-120 (1985); Sullivan E.,
et al., Methods Mol Biol 1999; 114: 125-133 (1999), the contents of each of which is herein incorporated by reference in its entirety. Cells that may be used according to these assays are publicly available
(e.g., through the ATCC) and/or may be routinely generated. Exemplary cells that may be used according to these assays include bovine chondrocytes.
Preferred Indication: Preferred embodiments of the invention include using polypeptides of the invention (or antibodies, agonists, or antagonists thereof) in detection, diagnosis, prevention, and/or treatment of
Bone and Cartilage Diseases, including but not limited to Arthritis, Cartilige repair, Bone Repair, Osteoporosis, and related tumors including chondrosarcomas, chondroblastomas, and chondromas.
Biological Activity: #51: Activation of transcription through NFKB response element in immune cells (such as basophils).
Exemplary Assay: This reporter assay measures activation of the NFkB signaling pathway in Ku812 human basophil cell line. Assays for the activation of transcription through the NFKB response element are
well-known in the art and may be used or routinely modified to assess the ability of polypeptides of the invention (including antibodies and agonists or antagonists of the invention) to regulate NFKB transcription
factors and modulate expression of immunomodulatory genes. Exemplary assays for transcription through the NFKB response element that may be used or rountinely modified to test NFKB-response element
activity of polypeptides of the invention (including antibodies and agonists or antagonists of the invention) include assays disclosed in Berger et al., Gene 66: 1-10 (1998); Cullen and Malm, Methods in Enzymol
216: 362-368 (1992); Henthorn et al., Proc Natl Acad Sci USA 85: 6342-6346 (1988); Marone et al, Int Arch Allergy Immunol 114(3): 207-17 (1997), the contents of each of which are herein incorporated by
reference in its entirety. Basophils that may be used according to these assays are publicly available (e.g., through the ATCC). Exemplary human basophil cell lines that may be used according to these assays
include Ku812, originally established from a patient with chronic myelogenous leukemia. It is an immature prebasophilic cell line that can be induced to differentiate into mature basophils.
Preferred Indication: Highly preferred indication includes allergy, asthma, and rhinitis. Additional highly preferred indications include infection (e.g., an infectious disease as described below under “Infectious
Disease”), and inflammation and inflammatory disorders. Preferred indications include immunological and hempatopoietic disorders (e.g., as described below under “Immune Activity”, and “Blood-Related
Disorders”). Preferred indications also include autoimmune diseases (e.g., rheumatoid arthritis, systemic lupus erythematosis, multiple sclerosis and/or as described below) and immunodeficiencies (e.g., as
described below). Preferred indications also include neoplastic diseases (e.g., leukemia, lymphoma, melanoma, and/or as described below under “Hyperproliferative Disorders”). Preferred indications include
neoplasms and cancer, such as, for example, leukemia, lymphoma, melanoma, and prostate, breast, lung, colon, pancreatic, esophageal, stomach, brain, liver, urinary tract cancers and as described below under
“Hyperproliferative Disorders”.
Biological Activity: #52: Activation of transcription through GAS response element in immune cells (such as eosinophils).
Exemplary Assay: Assays for the activation of transcription through the Gamma Interferon Activation Site (GAS) response element are well-known in the art and may be used or routinely modified to assess the
ability of polypeptides of the invention (including antibodies and agonists or antagonists of the invention) to modulate gene expression (commonly via STAT transcription factors) involved in a wide variety of
cell functions. Exemplary assays for transcription through the GAS response element that may be used or routinely modified to test GAS-response element activity of polypeptides of the invention (including
antibodies and agonists or antagonists of the invention) include assays disclosed in Berger et al., Gene 66: 1-10 (1998); Cullen and Malm, Methods in Enzymol 216: 362-368 (1992); Henthorn et al., Proc Natl
Acad Sci USA 85: 6342-6346 (1988); Matikainen et al., Blood 93(6): 1980-1991 (1999); and Henttinen et al., J Immunol 155(10): 4582-4587 (1995); the contents of each of which are herein incorporated by
reference in its entirety. Moreover, exemplary assays that may be used or routinely modified to assess the ability of polypeptides of the invention (including antibodies and agonists or antagonists of the
invention) to activate or inhibit activation of immune cells include assays disclosed and/or cited in: Mayumi M., “EoL-1, a human eosinophilic cell line” Leuk Lymphoma; Jun; 7(3): 243-50 (1992); Bhattacharya S,
“Granulocyte macrophage colony-stimulating factor and interleukin-5 activate STAT5 and induce CIS1 mRNA in human peripheral blood eosinophils” Am J Respir Cell Mol Biol; Mar; 24(3): 312-6 (2001);
and, Du J, et al., “Engagement of the CrkL adapter in interleukin-5 signaling in eosinophils” J Biol Chem; Oct 20; 275(42): 33167-75 (2000); the contents of each of which are herein incorporated by reference in
its entirety. Exemplary cells that may be used according to these assays include eosinophils. Eosinophils are a type of immune cell important in the late stage of allergic reactions; they are recruited to tissues
and mediate the inflammtory response of late stage allergic reaction. Increases in GAS mediated transcription in eosinophils is typically a result of STAT activation, normally a direct consequence of interleukin
or other cytokine receptor stimulation (e.g. IL3, IL5 or GMCSF).
Preferred Indication: Highly preferred indications include asthma, allergy, hypersensitivity reactions, inflammation, and inflammatory disorders. Additional highly preferred indications include immune and
hematopoietic disorders (e.g., as described below under “Immune Activity”, and “Blood-Related Disorders”), autoimmune diseases (e.g., rheumatoid arthritis, systemic lupus erythematosis, Crohn''s disease,
multiple sclerosis and/or as described below), immunodeficiencies (e.g., as described below), boosting an eosinophil-mediated immune response and, alternatively, suppressing an eosinophil-mediated immune
response.
Biological Activity: #53: Activation of transcription through NFKB response element in immune cells (such as EOL1 cells).
Exemplary Assay: Assays for the activation of transcription through the NFKB response element are well-known in the art and may be used or routinely modified to assess the ability of polypeptides of the
invention (including antibodies and agonists or antagonists of the invention) to regulate NFKB transcription factors and modulate expression of immunomodulatory genes. Exemplary assays for transcription
through the NFKB response element that may be used or rountinely modified to test NFKB-response element activity of polypeptides of the invention (including antibodies and agonists or antagonists of the
invention) include assays disclosed in Berger et al., Gene 66: 1-10 (1998); Cullen and Malm, Methods in Enzymol 216: 362-368 (1992); Henthorn et al., Proc Natl Acad Sci USA 85: 6342-6346 (1988); Valle
Blazquez et al, Immunology 90(3): 455-460 (1997); Aramburau et al., J Exp Med 82(3): 801-810 (1995); and Fraser et al., 29(3): 838-844 (1999), the contents of each of which are herein incorporated by reference
in its entirety. For example, a reporter assay (which measures increases in transcription inducible from a NFkB responsive element in EOL-1 cells) may link the NFKB element to a repeorter gene and binds to
the NFKB transcription factor, which is upregulated by cytokines and other factors. Exemplary immune cells that may be used according to these assays include eosinophils such as the human EOL-1 cell line of
eosinophils. Eosinophils are a type of immune cell important in the allergic responses; they are recruited to tissues and mediate the inflammtory response of late stage allergic reaction. Eol-1 is a human
eosinophil cell line.
Preferred Indication: Highly preferred indications include asthma, allergy, hypersensitivity reactions, and inflammation. Preferred indications include infection (e.g., an infectious disease as described below
under “Infectious Disease”), immunological disorders, inflammation and inflammatory disorders (e.g., as described below under “Immune Activity”, and “Blood-Related Disorders”). Preferred indications
include autoimmune diseases (e.g., rheumatoid arthritis, systemic lupus erythematosis, multiple sclerosis and/or as described below) and immunodeficiencies (e.g., as described below).
Biological Activity: #54: Activation of transcription through STAT6 response element in immune cells (such as mast cells).
Exemplary Assay: Assays for the activation of transcription through the Signal Transducers and Activators of Transcription (STAT6) response element in immune cells (such as in the human HMC-1 mast cell
line) are well-known in the art and may be used or routinely modified to assess the ability of polypeptides of the invention (including antibodies and agonists or antagonists of the invention) to regulate STAT6
transcription factors and modulate the expression of multiple genes. Exemplary assays for transcription through the STAT6 response element that may be used or routinely modified to test STAT6 response
element activity of the polypeptides of the invention (including antibodies and agonists or antagonists of the invention) include assays disclosed in Berger et al., Gene 66: 1-10 (1998); Cullen and Malm, Methods
in Enzymol 216: 362-368 (1992); Henthorn et al., Proc Natl Acad Sci USA 85: 6342-6346 (1988); Sherman, Immunol Rev 179: 48-56 (2001); Malaviya and Uckun, J Immunol 168: 421-426 (2002); Masuda et al., J
Biol Chem 275(38): 29331-29337 (2000); and Masuda et al., J Biol Chem 276: 26107-26113 (2001), the contents of each of which are herein incorporated by reference in its entirety. Mast cells that may be used
according to these assays are publicly available (e.g., through the ATCC). Exemplary human mast cells that may be used according to these assays include the HMC-1 cell line, which is an immature human mast
cell line established from the peripheral blood of a patient with mast cell leukemia, and exhibits many characteristics of immature mast cells.
Preferred Indication: Highly preferred indications include allergy, asthma, and rhinitis. Additional highly preferred indications include infection (e.g., an infectious disease as described below under “Infectious
Disease”), and inflammation and inflammatory disorders. Preferred indications also include hematopoietic and immunological disorders (e.g., as described below under “Immune Activity”, “Blood-Related
Disorders”, and/or “Cardiovascular Disorders”), autoimmune diseases (e.g., rheumatoid arthritis, systemic lupus erythematosis, multiple sclerosis and/or as described below), and immunodeficiencies (e.g., as
described below). Preferred indications include neoplastic diseases (e.g., leukemia, lymphoma, melanoma, and/or as described below under “Hyperproliferative Disorders”). Preferred indications include
neoplasms and cancer, such as, for example, leukemia, lymphoma, melanoma, and prostate, breast, lung, colon, pancreatic, esophageal, stomach, brain, liver and urinary cancer. Other preferred indications
include benign dysproliferative disorders and pre-neoplastic conditions, such as, for example, hyperplasia, metaplasia, and/or dysplasia. Preferred indications include hematopoietic and immunological disorders
such as arthritis, AIDS, granulomatous disease, inflammatory bowel disease, sepsis, neutropenia, neutrophilia, psoriasis, suppression of immune reactions to transplanted organs and tissues, hemophilia,
hypercoagulation, diabetes mellitus, endocarditis, meningitis, and Lyme Disease.
Biological Activity: #55: Production of IL-10 and activation of T-cells.
Exemplary Assay: Assays for production of IL-10 and activation of T-cells are well known in the art and may be used or routinely modified to assess the ability of polypeptides of the invention (including
antibodies and agonists or antagonists of the invention) to stimulate or inhibit production of IL-10 and/or activation of T-cells. Exemplary assays that may be used or routinely modified to assess the ability of
polypeptides and antibodies of the invention (including agonists or antagonists of the invention) to modulate IL-10 production and/or T-cell proliferation include, for example, assays such as disclosed and/or
cited in: Robinson, DS, et al., “Th-2 cytokines in allergic disease” Br Med Bull; 56 (4): 956-968 (2000), and Cohn, et al., “T-helper type 2 cell-directed therapy for asthma” Pharmacology & Therapeutics; 88:
187-196 (2000); the contents of each of which are herein incorporated by reference in their entirety. Exemplary cells that may be used according to these assays include Th2 cells. IL10 secreted from Th2 cells
may be measured as a marker of Th2 cell activation. Th2 cells are a class of T cells that secrete IL4, IL10, IL13, IL5 and IL6. Factors that induce differentiation and activation of Th2 cells play a major role in
the initiation and pathogenesis of allergy and asthma. Primary T helper 2 cells are generated via in vitro culture under Th2 polarizing conditions using peripheral blood lymphocytes isolated from cord blood.
Preferred Indication: Highly preferred indications include allergy and asthma. Additional highly preferred indications include immune and hematopoietic disorders (e.g., as described below under “Immune
Activity”, and “Blood-Related Disorders”), autoimmune diseases (e.g., rheumatoid arthritis, systemic lupus erythematosis, Crohn''s disease, multiple sclerosis and/or as described below), immunodeficiencies
(e.g., as described below), boosting a T cell-mediated immune response, and suppressing a T cell-mediated immune response.
Biological Activity: #56: Regulation of viability or proliferation of immune cells (such as human eosinophil EOL-1 cells).
Exemplary Assay: Assays for the regulation (i.e. increases or decreases) of viability and proliferation of cells in vitro are well-known in the art and may be used or routinely modified to assess the ability of
polypeptides of the invention (including antibodies and agonists or antagonists of the invention) to regulate viability and proliferation of eosinophil cells and cell lines. For example, the CellTiter-Gloo
Luminescent Cell Viability Assay (Promega Corp., Madison, WI, USA) can be used to measure the number of viable cells in culture based on quantitation of the ATP present which signals the presence of
metabolically active cells. Eosinophils are a type of immune cell important in allergic responses; they are recruited to tissues and mediate the inflammatory response of late stage allergic reaction. Eosinophil cell
lines that may be used according to these assays are publicly available and/or may be routinely generated. Exemplary eosinosphil cells that may be used according to these assays include EOL-1 cells.
Preferred Indication: Highly preferred indications include eosinophilia, asthma, allergy, hypersensitivity reactions, inflammation, and inflammatory disorders. Additional highly preferred indications include
immune and hematopoietic disorders (e.g., as described below under “Immune Activity”, and “Blood-Related Disorders”), autoimmune diseases (e.g., rheumatoid arthritis, systemic lupus erythematosis, Crohn''s
disease, multiple sclerosis and/or as described below), immunodeficiencies (e.g., as described below). Highly preferred indications also include boosting or inhibiting immune cell proliferation. Preferred
indications include neoplastic diseases (e.g., leukemia, lymphoma, and/or as described below under “Hyperproliferative Disorders”). Highly preferred indications include boosting an eosinophil-mediated
immune response, and suppressing an eosinophil-mediated immune response.
Biological Activity: #57: Regulation of transcription through the FAS promoter element in hepatocytes
Exemplary Assay: Assays for the regulation of transcription through the FAS promoter element are well-known in the art and may be used or routinely modified to assess the ability of polypeptides of the
invention (including antibodies and agonists or antagonists of the invention) to activate the FAS promoter element in a reporter construct and to regulate transcription of FAS, a key enzyme for lipogenesis. FAS
promoter is regulated by many transcription factors including SREBP. Insulin increases FAS gene transcription in livers of diabetic mice. This stimulation of transcription is also somewhat glucose dependent.
Exemplary assays that may be used or routinely modified to test for FAS promoter element activity (in hepatocytes) by polypeptides of the invention (including antibodies and agonists or antagonists of the
invention) include assays disclosed in Xiong, S., et al., Proc Natl Acad Sci U.S.A., 97(8): 3948-53 (2000); Roder, K., et al., Eur J Biochem, 260(3): 743-51 (1999); Oskouian B, et al., Biochem J, 317 (Pt 1): 257-65
(1996); Berger, et al., Gene 66: 1-10 (1988); and, Cullen, B., et al., Methods in Enzymol. 216: 362-368 (1992), the contents of each of which is herein incorporated by reference in its entirety. Hepatocytes that
may be used according to these assays, such as H4IIE cells, are publicly available (e.g., through the ATCC) and/or may be routinely generated. Exemplary hepatocytes that may be used according to these assays
include rat liver hepatoma cell line(s) inducible with glucocorticoids, insulin, or cAMP derivatives.
Preferred Indication: A highly preferred indication is diabetes mellitus. An additional highly preferred indication is a complication associated with diabetes (e.g., diabetic retinopathy, diabetic
nephropathy, kidney disease (e.g., renal failure, nephropathy and/or other diseases and disorders as described in the “Renal Disorders” section below), diabetic neuropathy, nerve disease and nerve damage (e.g.,
due to diabetic neuropathy), blood vessel blockage, heart disease, stroke, impotence (e.g., due to diabetic neuropathy or blood vessel blockage), seizures, mental confusion, drowsiness, nonketotic hyperglycemic-
hyperosmolar coma, cardiovascular disease (e.g., heart disease, atherosclerosis, microvascular disease, hypertension, stroke, and other diseases and disorders as described in the “Cardiovascular Disorders” section
below), dyslipidemia, endocrine disorders (as described in the “Endocrine Disorders” section below), neuropathy, vision impairment (e.g., diabetic retinopathy and blindness), ulcers and impaired wound healing,
and infection (e.g., infectious diseases and disorders as described in the “Infectious Diseases” section below, especially of the urinary tract and skin), carpal tunnel syndrome and Dupuytren's contracture).
An additional highly preferred indication is obesity and/or complications associated with obesity. Additional highly preferred indications include weight loss or alternatively, weight gain. Aditional
highly preferred indications are complications associated with insulin resistance.
Biological Activity: #58: SEAP in HIB/CRE
Exemplary Assay:
Preferred Indication:
Biological Activity: #59: Production of RANTES in bronchial epithelium cells
Exemplary Assay: RANTES FMAT. Assays for immunomodulatory proteins that induce chemotaxis of T cells, monocytes, and eosinophils are well known in the art and may be used or routinely modified to
assess the ability of polypeptides of the invention (including antibodies and agonists or antagonists of the invention) to mediate immunomodulation, induce chemotaxis, and/or mediate humoral or cell-mediated
immunity. Exemplary assays that test for immunomodulatory proteins evaluate the production of cytokines, such as RANTES, and the induction of chemotactic responses in immune cells. Such assays that may
be used or routinely modified to test immunomodulatory activity of polypeptides of the invention (including antibodies and agonists or antagonists of the invention) include the assays disclosed in Miraglia et al.,
J Biomolecular Screening 4: 193-204 (1999); Rowland et al., “Lymphocytes: a practical approach” Chapter 6: 138-160 (2000): Cocchi et al., Science 270(5243): 1811-1815 (1995); and Robinson et al., Clin Exp
Immunol 101(3): 398-407 (1995), the contents of each of which are herein incorporated by reference in its entirety. Epithelial cells were isolated from bronchia/trachea immediately postmortem from humans who
were free of known respiratory diseases. See Wu et al., Am Rev Respir Dis. 132(2): 311-20 (1985), the contents of which are herein incorporated by reference in its entirety.
Preferred Indication:
Biological Activity: #60: Activation of Endothelial Cell ERK Signaling Pathway.
Exemplary Assay: Kinase assay. Kinase assays, for example an Elk-1 kinase assay, for ERK signal transduction that regulate cell proliferation or differentiation are well known in the art and may be used or
routinely modified to assess the ability of polypeptides of the invention (including antibodies and agonists or antagonists of the invention) to promote or inhibit cell proliferation, activation, and differentiation.
Exemplary assays for ERK kinase activity that may be used or routinely modified to test ERK kinase-induced activity of polypeptides of the invention (including antibodies and agonists or antagonists of the
invention) include the assays disclosed in Forrer et al., Biol Chem 379(8-9): 1101-1110 (1998); Berra et al., Biochem Pharmacol 60(8): 1171-1178 (2000); Gupta et al., Exp Cell Res 247(2): 495-504 (1999); Chang
and Karin, Nature 410(6824): 37-40 (2001); and Cobb MH, Prog Biophys Mol Biol 71(3-4): 479-500 (1999); the contents of each of which are herein incorporated by reference in its entirety. Endothelial cells that
may be used according to these assays are publicly available (e.g., through the ATCC). Exemplary endothelial cells that may be used according to these assays include human umbilical vein endothelial cells
(HUVEC), which are endothelial cells which line venous blood vessels, and are involved in functions that include, but are not limited to, angiogenesis, vascular permeability, vascular tone, and immune cell
extravasation.
Preferred Indication: A highly preferred embodiment of the invention includes a method for stimulating endothelial cell growth. An alternative highly preferred embodiment of the invention includes a
method for inhibiting endothelial cell growth. A highly preferred embodiment of the invention includes a method for stimulating endothelial cell proliferation. An alternative highly preferred embodiment of
the invention includes a method for inhibiting endothelial cell proliferation. A highly preferred embodiment of the invention includes a method for stimulating apoptosis of endothelial cells. An alternative
highly preferred embodiment of the invention includes a method for inhibiting (e.g., decreasing) apoptosis of endothelial cells. A highly preferred embodiment of the invention includes a method for
stimulating (e.g., increasing) endothelial cell activation. An alternative highly preferred embodiment of the invention includes a method for inhibiting the activation of (e.g., decreasing) and/or inactivating
endothelial cells. A highly preferred embodiment of the invention includes a method for stimulating endothelial cell differentiation. An alternative highly preferred embodiment of the invention includes a
method for inhibiting endothelial cell differentiation. A highly preferred embodiment of the invention includes a method for stimulating angiogenisis. An alternative highly preferred embodiment of the
invention includes a method for inhibiting angiogenesis. A highly preferred embodiment of the invention includes a method for reducing cardiac hypertrophy. An alternative highly preferred embodiment of
the invention includes a method for inducing cardiac hypertrophy. Highly preferred indications include neoplastic diseases (e.g., as described below under “Hyperproliferative Disorders”), and disorders of the
cardiovascular system (e.g., heart disease, congestive heart failure, hypertension, aortic stenosis, cardiomyopathy, valvular regurgitation, left ventricular dysfunction, atherosclerosis and atherosclerotic vascular
disease, diabetic nephropathy, intracardiac shunt, cardiac hypertrophy, myocardial infarction, chronic hemodynamic overload, and/or as described below under “Cardiovascular Disorders”). Highly preferred
indications include cardiovascular, endothelial and/or angiogenic disorders (e.g., systemic disorders that affect vessels such as diabetes mellitus, as well as diseases of the vessels themselves, such as of the
arteries, capillaries, veins and/or lymphatics). Highly preferred are indications that stimulate angiogenesis and/or cardiovascularization. Highly preferred are indications that inhibit angiogenesis and/or
cardiovascularization. Highly preferred indications include antiangiogenic activity to treat solid tumors, leukemias, and Kaposi''s sarcoma, and retinal disorders. Highly preferred indications include neoplasms
and cancer, such as, Kaposi''s sarcoma, hemangioma (capillary and cavernous), glomus tumors, telangiectasia, bacillary angiomatosis, hemangioendothelioma, angiosarcoma, haemangiopericytoma,
lymphangioma, lymphangiosarcoma. Highly preferred indications also include cancers such as, prostate, breast, lung, colon, pancreatic, esophageal, stomach, brain, liver, and urinary cancer. Preferred
indications include benign dysproliferative disorders and pre-neoplastic conditions, such as, for example, hyperplasia, metaplasia, and/or dysplasia. Highly preferred indications also include arterial disease,
such as, atherosclerosis, hypertension, coronary artery disease, inflammatory vasculitides, Reynaud''s disease and Reynaud''s phenomenom, aneurysms, restenosis; venous and lymphatic disorders such as
thrombophlebitis, lymphangitis, and lymphedema; and other vascular disorders such as peripheral vascular disease, and cancer. Highly preferred indications also include trauma such as wounds, burns, and
injured tissue (e.g., vascular injury such as, injury resulting from balloon angioplasty, and atheroschlerotic lesions), implant fixation, scarring, ischemia reperfusion injury, rheumatoid arthritis, cerebrovascular
disease, renal diseases such as acute renal failure, and osteoporosis. Additional highly preferred indications include stroke, graft rejection, diabetic or other retinopathies, thrombotic and coagulative disorders,
vascularitis, lymph angiogenesis, sexual disorders, age-related macular degeneration, and treatment/prevention of endometriosis and related conditions. Additional highly preferred indications include fibromas,
heart disease, cardiac arrest, heart valve disease, and vascular disease. Preferred indications include blood disorders (e.g., as described below under “Immune Activity”, “Blood-Related Disorders”, and/or
“Cardiovascular Disorders”). Preferred indications include autoimmune diseases (e.g., rheumatoid arthritis, systemic lupus erythematosis, multiple sclerosis and/or as described below) and immunodeficiencies
(e.g., as described below). Additional preferred indications include inflammation and inflammatory disorders (such as acute and chronic inflammatory diseases, e.g., inflammatory bowel disease and Crohn's
disease), and pain management.
Biological Activity: #61: Regulation of apoptosis in pancreatic beta cells.
Exemplary Assay: Caspase Apoptosis. Assays for caspase apoptosis are well known in the art and may be used or routinely modified to assess the ability of polypeptides of the invention (including antibodies
and agonists or antagonists of the invention) to promote caspase protease-mediated apoptosis. Apoptosis in pancreatic beta is associated with induction and progression of diabetes. Exemplary assays for
caspase apoptosis that may be used or routinely modified to test capase apoptosis activity of polypeptides of the invention (including antibodies and agonists or antagonists of the invention) include the assays
disclosed in: Loweth, AC, et al., FEBS Lett, 400(3): 285-8 (1997); Saini, KS, et al., Biochem Mol Biol Int, 39(6): 1229-36 (1996); Krautheim, A., et al., Br J Pharmacol, 129(4): 687-94 (2000); Chandra J, et al.,
Diabetes, 50 Suppl 1: S44-7 (2001); Suk K, et al., J Immunol, 166(7): 4481-9 (2001); Tejedo J, et al., FEBS Lett, 459(2): 238-43 (1999); Zhang, S., et al., FEBS Lett, 455(3): 315-20 (1999); Lee et al., FEBS Lett
485(2-3): 122-126 (2000); Nor et al., J Vasc Res 37(3): 209-218 (2000); and Karsan and Harlan, J Atheroscler Thromb 3(2): 75-80 (1996); the contents of each of which are herein incorporated by reference in its
entirety. Pancreatic cells that may be used according to these assays are publicly available (e.g., through the ATCC) and/or may be routinely generated. Exemplary pancreatic cells that may be used according to
these assays include RIN-m. RIN-m is a rat adherent pancreatic beta cell insulinoma cell line derived from a radiation induced transplantable rat islet cell tumor. The cells produce and secrete islet polypeptide
hormones, and produce insulin, somatostatin, and possibly glucagon. ATTC: #CRL-2057 Chick et al. Proc. Natl. Acad. Sci. 1977 74: 628; AF et al. Proc. Natl. Acad. Sci. 1980 77: 3519.
Preferred Indication: A highly preferred indication is diabetes mellitus. An additional highly preferred indication is a complication associated with diabetes (e.g., diabetic retinopathy, diabetic
nephropathy, kidney disease (e.g., renal failure, nephropathy and/or other diseases and disorders as described in the “Renal Disorders” section below), diabetic neuropathy, nerve disease and nerve damage (e.g.,
due to diabetic neuropathy), blood vessel blockage, heart disease, stroke, impotence (e.g., due to diabetic neuropathy or blood vessel blockage), seizures, mental confusion, drowsiness, nonketotic hyperglycemic-
hyperosmolar coma, cardiovascular disease (e.g., heart disease, atherosclerosis, microvascular disease, hypertension, stroke, and other diseases and disorders as described in the “Cardiovascular Disorders” section
below), dyslipidemia, endocrine disorders (as described in the “Endocrine Disorders” section below), neuropathy, vision impairment (e.g., diabetic retinopathy and blindness), ulcers and impaired wound healing,
and infection (e.g., infectious diseases and disorders as described in the “Infectious Diseases” section below, especially of the urinary tract and skin), carpal tunnel syndrome and Dupuytren's contracture).
An additional highly preferred indication is obesity and/or complications associated with obesity. Additional highly preferred indications include weight loss or alternatively, weight gain. Aditional
highly preferred indications are complications associated with insulin resistance.
Biological Activity: #62: Activation of transcription through GAS response element in epithelial cells (such as HELA cells).
Exemplary Assay: Assays for the activation of transcription through the Gamma Interferon Activation Site (GAS) response element are well-known in the art and may be used or routinely modified to assess the
ability of polypeptides of the invention (including antibodies and agonists or antagonists of the invention) to regulate STAT transcription factors and modulate gene expression involved in a wide variety of cell
functions. Exemplary assays for transcription through the GAS response element that may be used or routinely modified to test GAS-response element activity of polypeptides of the invention (including
antibodies and agonists or antagonists of the invention) include assays disclosed in: You M, et al, J Biol Chem, 272(37): 23376-23381(1997); Min W, et al., Circ Res, 83(8): 815-823 (1998); Berger et al., Gene
66: 1-10 (1998); Cullen and Malm, Methods in Enzymol 216: 362-368 (1992); Henthorn et al., Proc Natl Acad Sci USA 85: 6342-6346 (1988); Matikainen et al., Blood 93(6): 1980-1991 (1999); and Henttinen et
al., J Immunol 155(10): 4582-4587 (1995), the contents of each of which are herein incorporated by reference in its entirety. Epithelial cells that may be used according to these assays are publicly available (e.g.,
through the ATCC). Exemplary epithelial cells that may be used according to these assays include the HELA cell line.
Preferred Indication: Preferred embodiments of the invention include using polypeptides of the invention (or antibodies, agonists, or antagonists thereof) in detection, diagnosis, prevention, and/or treatment of
Cancer, Wound Healing, and Inflamation. Highly preferred indications include neoplastic diseases (e.g., as described below under “Hyperproliferative Disorders”). Highly preferred indications include
neoplasms and cancers, such as, for example, melanoma, and prostate, breast, lung, colon, pancreatic, esophageal, stomach, brain, liver and urinary cancer. Other preferred indications include benign
dysproliferative disorders and pre-neoplastic conditions, such as, for example, hyperplasia, metaplasia, and/or dysplasia. Preferred indications include include inflammation and inflammatory disorders.
Biological Activity: #63: Regulation of apoptosis in pancreatic beta cells.
Exemplary Assay: Caspase Apoptosis. Assays for caspase apoptosis are well known in the art and may be used or routinely modified to assess the ability of polypeptides of the invention (including antibodies
and agonists or antagonists of the invention) to promote caspase protease-mediated apoptosis. Apoptosis in pancreatic beta is associated with induction and progression of diabetes. Exemplary assays for
caspase apoptosis that may be used or routinely modified to test capase apoptosis activity of polypeptides of the invention (including antibodies and agonists or antagonists of the invention) include the assays
disclosed in: Loweth, AC, et al., FEBS Lett, 400(3): 285-8 (1997); Saini, KS, et al., Biochem Mol Biol Int, 39(6): 1229-36 (1996); Krautheim, A., et al., Br J Pharmacol, 129(4): 687-94 (2000); Chandra J, et al.,
Diabetes, 50 Suppl 1: S44-7 (2001); Suk K, et al., J Immunol, 166(7): 4481-9 (2001); Tejedo J, et al., FEBS Lett, 459(2): 238-43 (1999); Zhang, S., et al., FEBS Lett, 455(3): 315-20 (1999); Lee et al., FEBS Lett
485(2-3): 122-126 (2000); Nor et al., J Vasc Res 37(3): 209-218 (2000); and Karsan and Harlan, J Atheroscler Thromb 3(2): 75-80 (1996); the contents of each of which are herein incorporated by reference in its
entirety. Pancreatic cells that may be used according to these assays are publicly available (e.g., through the ATCC) and/or may be routinely generated. Exemplary pancreatic cells that may be used according to
these assays include RIN-m. RIN-m is a rat adherent pancreatic beta cell insulinoma cell line derived from a radiation induced transplantable rat islet cell tumor. The cells produce and secrete islet polypeptide
hormones, and produce insulin, somatostatin, and possibly glucagon. ATTC: #CRL-2057 Chick et al. Proc. Natl. Acad. Sci. 1977 74: 628; AF et al. Proc. Natl. Acad. Sci. 1980 77: 3519.
Preferred Indication: A highly preferred indication is diabetes mellitus. An additional highly preferred indication is a complication associated with diabetes (e.g., diabetic retinopathy, diabetic
nephropathy, kidney disease (e.g., renal failure, nephropathy and/or other diseases and disorders as described in the “Renal Disorders” section below), diabetic neuropathy, nerve disease and nerve damage (e.g.,
due to diabetic neuropathy), blood vessel blockage, heart disease, stroke, impotence (e.g., due to diabetic neuropathy or blood vessel blockage), seizures, mental confusion, drowsiness, nonketotic hyperglycemic-
hyperosmolar coma, cardiovascular disease (e.g., heart disease, atherosclerosis, microvascular disease, hypertension, stroke, and other diseases and disorders as described in the “Cardiovascular Disorders” section
below), dyslipidemia, endocrine disorders (as described in the “Endocrine Disorders” section below), neuropathy, vision impairment (e.g., diabetic retinopathy and blindness), ulcers and impaired wound healing,
and infection (e.g., infectious diseases and disorders as described in the “Infectious Diseases” section below, especially of the urinary tract and skin), carpal tunnel syndrome and Dupuytren's contracture).
An additional highly preferred indication is obesity and/or complications associated with obesity. Additional highly preferred indications include weight loss or alternatively, weight gain. Aditional
highly preferred indications are complications associated with insulin resistance.
Biological Activity: #64: Activation of Skeletal Mucle Cell PI3 Kinase Signalling Pathway
Exemplary Assay: Kinase assay. Kinase assays, for example an GSK-3 kinase assay, for PI3 kinase signal transduction that regulate glucose metabolism and cell survivial are well-known in the art and may be
used or routinely modified to assess the ability of polypeptides of the invention (including antibodies and agonists or antagonists of the invention) to promote or inhibit glucose metabolism and cell survival.
Exemplary assays for PI3 kinase activity that may be used or routinely modified to test PI3 kinase-induced activity of polypeptides of the invention (including antibodies and agonists or antagonists of the
invention) include assays disclosed in Forrer et al., Biol Chem 379(8-9): 1101-1110 (1998); Nikoulina et al., Diabetes 49(2): 263-271 (2000); and Schreyer et al., Diabetes 48(8): 1662-1666 (1999), the contents of
each of which are herein incorporated by reference in its entirety. Rat myoblast cells that may be used according to these assays are publicly available (e.g., through the ATCC). Exemplary rat myoblast cells that
may be used according to these assays include L6 cells. L6 is an adherent rat myoblast cell line, isolated from primary cultures of rat thigh muscle, that fuses to form multinucleated myotubes and striated fibers
after culture in differentiation media.
Preferred Indication: A highly preferred embodiment of the invention includes a method for increasing muscle cell survival An alternative highly preferred embodiment of the invention includes a method
for decreasing muscle cell survival. A preferred embodiment of the invention includes a method for stimulating muscle cell proliferation. In a specific embodiment, skeletal muscle cell proliferation is
stimulated. An alternative highly preferred embodiment of the invention includes a method for inhibiting muscle cell proliferation. In a specific embodiment, skeletal muscle cell proliferation is inhibited. A
preferred embodiment of the invention includes a method for stimulating muscle cell differentiation. In a specific embodiment, skeletal muscle cell differentiation is stimulated. An alternative highly preferred
embodiment of the invention includes a method for inhibiting muscle cell differentiation. In a specific embodiment, skeletal muscle cell differentiation is inhibited. Highly preferred indications include
disorders of the musculoskeletal system. Preferred indications include neoplastic diseases (e.g., as described below under “Hyperproliferative Disorders”), endocrine disorders (e.g., as described below under
“Endocrine Disorders”), neural disorders (e.g., as described below under “Neural Activity and Neurological Diseases”), blood disorders (e.g., as described below under “Immune Activity”, “Cardiovascular
Disorders”, and/or “Blood-Related Disorders”), immune disorders (e.g., as described below under “Immune Activity”), and infection (e.g., as described below under “Infectious Disease”). A highly preferred
indication is diabetes mellitus. An additional highly preferred indication is a complication associated with diabetes (e.g., diabetic retinopathy, diabetic nephropathy, kidney disease (e.g., renal failure,
nephropathy and/or other diseases and disorders as described in the “Renal Disorders” section below), diabetic neuropathy, nerve disease and nerve damage (e.g, due to diabetic neuropathy), blood vessel
blockage, heart disease, stroke, impotence (e.g., due to diabetic neuropathy or blood vessel blockage), seizures, mental confusion, drowsiness, nonketotic hyperglycemic-hyperosmolar coma, cardiovascular
disease (e.g., heart disease, atherosclerosis, microvascular disease, hypertension, stroke, and other diseases and disorders as described in the “Cardiovascular Disorders” section below), dyslipidemia, endocrine
disorders (as described in the “Endocrine Disorders” section below), neuropathy, vision impairment (e.g., diabetic retinopathy and blindness), ulcers and impaired wound healing, infections (e.g., infectious
diseases and disorders as described in the “Infectious Diseases” section below, especially of the urinary tract and skin), carpal tunnel syndrome and Dupuytren's contracture). An additional highly preferred
indication is obesity and/or complications associated with obesity. Additional highly preferred indications include weight loss or alternatively, weight gain. Additional highly preferred indications are
complications associated with insulin resistance. Additonal highly preferred indications are disorders of the musculoskeletal system including myopathies, muscular dystrophy, and/or as described herein.
Additional highly preferred indications include: myopathy, atrophy, congestive heart failure, cachexia, myxomas, fibromas, congenital cardiovascular abnormalities, heart disease, cardiac arrest, heart valve
disease, and vascular disease. Highly preferred indications include neoplasms and cancer, such as, rhabdomyoma, rhabdosarcoma, stomach, esophageal, prostate, and urinary cancer. Preferred indications also
include breast, lung, colon, pancreatic, brain, and liver cancer. Other preferred indications include benign dysproliferative disorders and pre-neoplastic conditions, such as, hyperplasia, metaplasia, and/or
dysplasia.
Biological Activity: #65: Regulation of apoptosis in pancreatic beta cells.
Exemplary Assay: Caspase Apoptosis. Assays for caspase apoptosis are well known in the art and may be used or routinely modified to assess the ability of polypeptides of the invention (including antibodies
and agonists or antagonists of the invention) to promote caspase protease-mediated apoptosis. Apoptosis in pancreatic beta is associated with induction and progression of diabetes. Exemplary assays for
caspase apoptosis that may be used or routinely modified to test capase apoptosis activity of polypeptides of the invention (including antibodies and agonists or antagonists of the invention) include the assays
disclosed in: Loweth, AC, et al., FEBS Lett, 400(3): 285-8 (1997); Saini, KS, et al., Biochem Mol Biol Int, 39(6): 1229-36 (1996); Krautheim, A., et al., Br J Pharmacol, 129(4): 687-94 (2000); Chandra J, et al.,
Diabetes, 50 Suppl 1: S44-7 (2001); Suk K, et al., J Immunol, 166(7): 4481-9 (2001); Tejedo J, et al., FEBS Lett, 459(2): 238-43 (1999); Zhang, S., et al., FEBS Lett, 455(3): 315-20 (1999); Lee et al., FEBS Lett
485(2-3): 122-126 (2000); Nor et al., J Vasc Res 37(3): 209-218 (2000); and Karsan and Harlan, J Atheroscler Thromb 3(2): 75-80 (1996); the contents of each of which are herein incorporated by reference in its
entirety. Pancreatic cells that may be used according to these assays are publicly available (e.g., through the ATCC) and/or may be routinely generated. Exemplary pancreatic cells that may be used according to
these assays include RIN-m. RIN-m is a rat adherent pancreatic beta cell insulinoma cell line derived from a radiation induced transplantable rat islet cell tumor. The cells produce and secrete islet polypeptide
hormones, and produce insulin, somatostatin, and possibly glucagon. ATTC: #CRL-2057 Chick et al. Proc. Natl. Acad. Sci. 1977 74: 628; AF et al. Proc. Natl. Acad. Sci. 1980 77: 3519.
Preferred Indication: A highly preferred indication is diabetes mellitus. An additional highly preferred indication is a complication associated with diabetes (e.g., diabetic retinopathy, diabetic
nephropathy, kidney disease (e.g., renal failure, nephropathy and/or other diseases and disorders as described in the “Renal Disorders” section below), diabetic neuropathy, nerve disease and nerve damage (e.g.,
due to diabetic neuropathy), blood vessel blockage, heart disease, stroke, impotence (e.g., due to diabetic neuropathy or blood vessel blockage), seizures, mental confusion, drowsiness, nonketotic hyperglycemic-
hyperosmolar coma, cardiovascular disease (e.g., heart disease, atherosclerosis, microvascular disease, hypertension, stroke, and other diseases and disorders as described in the “Cardiovascular Disorders” section
below), dyslipidemia, endocrine disorders (as described in the “Endocrine Disorders” section below), neuropathy, vision impairment (e.g., diabetic retinopathy and blindness), ulcers and impaired wound healing,
and infection (e.g., infectious diseases and disorders as described in the “Infectious Diseases” section below, especially of the urinary tract and skin), carpal tunnel syndrome and Dupuytren's contracture).
An additional highly preferred indication is obesity and/or complications associated with obesity. Additional highly preferred indications include weight loss or alternatively, weight gain. Aditional
highly preferred indications are complications associated with insulin resistance.
Biological Activity: #66: Production of IL-4
Exemplary Assay: IL-4 FMAT. Assays for immunomodulatory proteins secreted by TH2 cells that stimulate B cells, T cells, macrophages and mast cells and promote polarization of CD4+ cells into TH2 cells
are well known in the art and may be used or routinely modified to assess the ability of polypeptides of the invention (including antibodies and agonists or antagonists of the invention) to mediate
immunomodulation, stimulate immune cells, modulate immune cell polarization, and/or mediate humoral or cell-mediated immunity. Exemplary assays that test for immunomodulatory proteins evaluate the
production of cytokines, such as IL-4, and the stimulation of immune cells, such as B cells, T cells, macrophages and mast cells. Such assays that may be used or routinely modified to test immunomodulatory
activity of polypeptides of the invention (including antibodies and agonists or antagonists of the invention) include the assays disclosed in Miraglia et al., J Biomolecular Screening 4: 193-204 (1999); Rowland et
al., “Lymphocytes: a practical approach” Chapter 6: 138-160 (2000); Gonzalez et al., J Clin Lab Anal 8(5): 277-283 (1194); Yssel et al., Res Immunol 144(8): 610-616 (1993); Bagley et al., Nat Immunol 1(3): 257-261
(2000); and van der Graaff et al., Rheumatology (Oxford) 38(3): 214-220 (1999), the contents of each of which are herein incorporated by reference in its entirety. Human T cells that may be used according
to these assays may be isolated using techniques disclosed herein or otherwise known in the art. Human T cells are primary human lymphocytes that mature in the thymus and express a T cell receptor and CD3,
CD4, or CD8. These cells mediate humoral or cell-mediated immunity and may be preactivated to enhance responsiveness to immunomodulatory factors.
Preferred Indication: A highly preferred embodiment of the invention includes a method for stimulating (e.g., increasing) IL-4 production. An alternative highly preferred embodiment of the invention
includes a method for inhibiting (e.g., reducing) IL-4 production. A highly preferred indication includes asthma. A highly preferred indication includes allergy. A highly preferred indication includes
rhinitis. Additional highly preferred indications include inflammation and inflammatory disorders. Highly preferred indications include neoplastic diseases (e.g., leukemia, lymphoma, melanoma, and/or
as described below under “Hyperproliferative Disorders”). Preferred indications include neoplasms and cancers, such as, for example, leukemia, lymphoma, melanoma, and prostate, breast, lung, colon,
pancreatic, esophageal, stomach, brain, liver and urinary cancer. Other preferred indications include benign dysproliferative disorders and pre-neoplastic conditions, such as, for example, hyperplasia, metaplasia,
and/or dysplasia. Preferred indications include blood disorders (e.g., as described below under “Immune Activity”, “Blood-Related Disorders”, and/or “Cardiovascular Disorders”). Preferred indications
include autoimmune diseases (e.g., rheumatoid arthritis, systemic lupus erythematosis, multiple sclerosis and/or as described below) and immunodeficiencies (e.g., as described below). Preferred indications
include anemia, pancytopenia, leukopenia, thrombocytopenia, Hodgkin's disease, acute lymphocytic anemia (ALL), plasmacytomas, multiple myeloma, Burkitt's lymphoma, arthritis, AIDS, granulomatous
disease, inflammatory bowel disease, sepsis, neutropenia, neutrophilia, psoriasis, suppression of immune reactions to transplanted organs and tissues, hemophilia, hypercoagulation, diabetes mellitus,
endocarditis, meningitis, and Lyme Disease. An additonal preferred indication is infection (e.g., an infectious disease as described below under “Infectious Disease”).
Biological Activity: #67: Production of TNF alpha by dendritic cells
Exemplary Assay: TNFa FMAT. Assays for immunomodulatory proteins produced by activated macrophages, T cells, fibroblasts, smooth muscle, and other cell types that exert a wide variety of inflammatory
and cytotoxic effects on a variety of cells are well known in the art and may be used or routinely modified to assess the ability of polypeptides of the invention (including antibodies and agonists or antagonists of
the invention) to mediate immunomodulation, modulate inflammation and cytotoxicity. Exemplary assays that test for immunomodulatory proteins evaluate the production of cytokines such as tumor necrosis
factor alpha (TNFa), and the induction or inhibition of an inflammatory or cytotoxic response. Such assays that may be used or routinely modified to test immunomodulatory activity of polypeptides of the
invention (including antibodies and agonists or antagonists of the invention) include assays disclosed in Miraglia et al., J Biomolecular Screening 4: 193-204(1999); Rowland et al., “Lymphocytes: a practical
approach” Chapter 6: 138-160 (2000); Verhasselt et al., Eur J Immunol 28(11): 3886-3890 (1198); Dahlen et al., J Immunol 160(7): 3585-3593 (1998); Verhasselt et al., J Immunol 158: 2919-2925 (1997); and
Nardelli et al., J Leukoc Biol 65: 822-828 (1999), the contents of each of which are herein incorporated by reference in its entirety. Human dendritic cells that may be used according to these assays may be
isolated using techniques disclosed herein or otherwise known in the art. Human dendritic cells are antigen presenting cells in suspension culture, which, when activated by antigen and/or cytokines, initiate and
upregulate T cell proliferation and functional activities.
Preferred Indication: A highly preferred embodiment of the invention includes a method for inhibiting (e.g., decreasing) TNF alpha production. An alternative highly preferred embodiment of the invention
includes a method for stimulating (e.g., increasing) TNF alpha production. Highly preferred indications include blood disorders (e.g., as described below under “Immune Activity”, “Blood-Related Disorders”,
and/or “Cardiovascular Disorders”), Highly preferred indications include autoimmune diseases (e.g., rheumatoid arthritis, systemic lupus erythematosis, Crohn''s disease, multiple sclerosis and/or as described
below), immunodeficiencies (e.g., as described below), boosting a T cell-mediated immune response, and suppressing a T cell-mediated immune response. Additional highly preferred indications include
inflammation and inflammatory disorders, and treating joint damage in patients with rheumatoid arthritis. An additional highly preferred indication is sepsis. Highly preferred indications include neoplastic
diseases (e.g., leukemia, lymphoma, and/or as described below under “Hyperproliferative Disorders”). Additionally, highly preferred indications include neoplasms and cancers, such as, leukemia, lymphoma,
melanoma, glioma (e.g., malignant glioma), solid tumors, and prostate, breast, lung, colon, pancreatic, esophageal, stomach, brain, liver and urinary cancer. Other preferred indications include benign
dysproliferative disorders and pre-neoplastic conditions, such as, for example, hyperplasia, metaplasia, and/or dysplasia. Preferred indications include anemia, pancytopenia, leukopenia, thrombocytopenia,
Hodgkin's disease, acute lymphocytic anemia (ALL), plasmacytomas, multiple myeloma, Burkitt's lymphoma, arthritis, AIDS, granulomatous disease, inflammatory bowel disease, neutropenia, neutrophilia,
psoriasis, suppression of immune reactions to transplanted organs and tissues, hemophilia, hypercoagulation, diabetes mellitus, endocarditis, meningitis, Lyme Disease, cardiac reperfusion injury, and asthma and
allergy. An additional preferred indication is infection (e.g., an infectious disease as described below under “Infectious Disease”).
Biological Activity: #68: Activation of transcription through GAS response element in immune cells (such as monocytes).
Exemplary Assay: Assays for the activation of transcription through the Gamma Interferon Activation Site (GAS) response element are well-known in the art and may be used or routinely modified to assess the
ability of polypeptides of the invention (including antibodies and agonists or antagonists of the invention) to regulate STAT transcription factors and modulate gene expression involved in a wide variety of cell
functions. Exemplary assays for transcription through the GAS response element that may be used or routinely modified to test GAS-response element activity of polypeptides of the invention (including
antibodies and agonists or antagonists of the invention) include assays disclosed in: Gustafson KS, et al., J Biol Chem, 271(33): 20035-20046 (1996); Eilers A, et al., Immunobiology, 193(2-4): 328-333 (1995);
Berger et al., Gene 66: 1-10 (1998); Cullen and Malm, Methods in Enzymol 216: 362-368 (1992); Henthorn et al., Proc Natl Acad Sci USA 85: 6342-6346 (1988); Matikainen et al., Blood 93(6): 1980-1991 (1999);
and Henttinen et al., J Immunol 155(10): 4582-4587 (1995), the contents of each of which are herein incorporated by reference in its entirety. Exemplary immune cells that may be used according to these assays
are publicly available (e.g., through the ATCC). Exemplary immune cells that may be used according to these assays include the U937 cell line, which is a monocytic cell line.
Preferred Indication: Preferred embodiments of the invention include using polypeptides of the invention (or antibodies, agonists, or antagonists thereof) in detection, diagnosis, prevention, and/or treatment of
Inflammation, Infection, Cancer, Hypersensitivity, and Atherosclerosis.
Biological Activity: #69: Activation of transcription through NFKB response element in immune cells (such as the Jurkat human T cell line).
Exemplary Assay: Assays for the activation of transcription through the NFKB response element are well-known in the art and may be used or routinely modified to assess the ability of polypeptides of the
invention (including antibodies and agonists or antagonists of the invention) to regulate NFKB transcription factors and modulate expression of immunomodulatory genes. Exemplary assays for transcription
through the NFKB response element that may be used or rountinely modified to test NFKB-response element activity of polypeptides of the invention (including antibodies and agonists or antagonists of the
invention) include assays disclosed in Berger et al., Gene 66: 1-10 (1998); Cullen and Malm, Methods in Enzymol 216: 362-368 (1992); Henthorn et al., Proc Natl Acad Sci USA 85: 6342-6346(1988); Valle
Blazquez et al, Immunology 90(3): 455-460 (1997); Aramburau et al., J Exp Med 82(3): 801-810 (1995); and Fraser et al., 29(3): 838-844 (1999), the contents of each of which are herein incorporated by reference
in its entirety. T cells that may be used according to these assays are publicly available (e.g., through the ATCC). T cells that may be used according to these assays are publicly available (e.g., through the
ATCC). Exemplary human T cells that may be used according to these assays include the JURKAT cell line, which is a suspension culture of leukemia cells that produce IL-2 when stimulated.
Preferred Indication: Highly preferred indications include inflammation and inflammatory disorders. Highly preferred indications include immunological and hematopoietic disorders (e.g., as described below
under “Immune Activity”, “Blood-Related Disorders”, and/or “Cardiovascular Disorders”). Highly preferred indications include autoimmune diseases (e.g., rheumatoid arthritis, systemic lupus erythematosis,
multiple sclerosis and/or as described below), and immunodeficiencies (e.g., as described below). An additional highly preferred indication is infection (e.g., AIDS, and/or an infectious disease as described
below under “Infectious Disease”). Highly preferred indications include neoplastic diseases (e.g., melanoma, leukemia, lymphoma, and/or as described below under “Hyperproliferative Disorders”). Highly
preferred indications include neoplasms and cancers, such as, melanoma, renal cell carcinoma, leukemia, lymphoma, and prostate, breast, lung, colon, pancreatic, esophageal, stomach, brain, liver and urinary
cancer. Other preferred indications include benign dysproliferative disorders and pre-neoplastic conditions, such as, for example, hyperplasia, metaplasia, and/or dysplasia. Preferred indications also include
anemia, pancytopenia, leukopenia, thrombocytopenia, Hodgkin's disease, acute lymphocytic anemia (ALL), plasmacytomas, multiple myeloma, Burkitt's lymphoma, arthritis, AIDS, granulomatous disease,
inflammatory bowel disease, sepsis, neutropenia, neutrophilia, psoriasis, hemophilia, hypercoagulation, diabetes mellitus, endocarditis, meningitis, Lyme Disease, suppression of immune reactions to transplanted
organs, asthma and allergy.
Biological Activity: #70: Activation of Transcription
Exemplary Assay: Assays for activation of transcription are well-known in the art and may be used and routinely modified to assess ability of polypeptides of the invention to inhibit or activate transcription. An
example of such an assay follows: Cells were pretreated with SID supernatants or controls for 15-18 hours. SEAP activity was measured after 48 hours. LS174T is an epithelial colon adenocarcinoma cell line.
Its tumourigenicity in nude mice make cell line LS174T a model for studies on the mechanism of synthesis and secretion of specific tumoral markers in colon cancer. See, Patan et al., Circ Res, 89(8): 732-39
(2001), the contents of which are herein incorporated by reference in its entirety.
Preferred Indication:
Biological Activity: #71: Production of RANTES in bronchial epithelium cells
Exemplary Assay: RANTES FMAT. Assays for immunomodulatory proteins that induce chemotaxis of T cells, monocytes, and eosinophils are well known in the art and may be used or routinely modified to
assess the ability of polypeptides of the invention (including antibodies and agonists or antagonists of the invention) to mediate immunomodulation, induce chemotaxis, and/or mediate humoral or cell-mediated
immunity. Exemplary assays that test for immunomodulatory proteins evaluate the production of cytokines, such as RANTES, and the induction of chemotactic responses in immune cells. Such assays that may
be used or routinely modified to test immunomodulatory activity of polypeptides of the invention (including antibodies and agonists or antagonists of the invention) include the assays disclosed in Miraglia et al.,
J Biomolecular Screening 4: 193-204 (1999); Rowland et al., “Lymphocytes: a practical approach” Chapter 6: 138-160 (2000): Cocchi et al., Science 270(5243): 1811-1815 (1995); and Robinson et al., Clin Exp
Immunol 101(3): 398-407 (1995), the contents of each of which are herein incorporated by reference in its entirety. Epithelial cells were isolated from bronchia/trachea immediately postmortem from humans who
were free of known respiratory diseases. See Wu et al., Am Rev Respir Dis. 132(2): 311-20 (1985), the contents of which are herein incorporated by reference in its entirety.
Preferred Indication:
Biological Activity: #72: Proliferation of immune cells (such as the HMC-1 human mast cell line)
Exemplary Assay: Assays for the regulation (i.e. increases or decreases) of viability and proliferation of cells in vitro are well-known in the art and may be used or routinely modified to assess the ability of
polypeptides of the invention (including antibodies and agonists or antagonists of the invention) to regulate viability and proliferation of eosinophil cells and cell lines. For example, the CellTiter-Gloo
Luminescent Cell Viability Assay (Promega Corp., Madison, WI, USA) can be used to measure the number of viable cells in culture based on quantitation of the ATP present which signals the presence of
metabolically active cells. Mast cells are found in connective and mucosal tissues throughout the body. Mast cell activation (via immunoglobulin E-antigen, promoted by T helper cell type 2 cytokines) is an
important component of allergic disease. Dysregulation of mast cell apoptosis may play a role in allergic disease and mast cell tumor survival. Mast cell lines that may be used according to these assays are
publicly available and/or may be routinely generated. Exemplary mast cells that may be used according to these assays include HMC-1, which is an immature human mast cell line established from the peripheral
blood of a patient with mast cell leukemia, and exhibits many characteristics of immature mast cells.
Preferred Indication: Highly preferred indications include asthma, allergy, mastocytosis (a rare, heterogeneous disorder characterized by excessive accumulation of mast cells, and their proliferation and action
in the skin, central nervous system, and other organs). Preferred indications also include hematopoietic and immunological disorders (e.g., as described below under “Immune Activity”, and “Blood-Related
Disorders”), infection (e.g., as described below under “Infectious Disease”), autoimmune diseases (e.g., rheumatoid arthritis, systemic lupus erythematosis, multiple sclerosis and/or as described below), and
immunodeficiencies (e.g., as described below).
Biological Activity: #73: Activation of transcription through NFAT response in immune cells (such as T-cells).
Exemplary Assay: Assays for the activation of transcription through the Nuclear Factor of Activated T cells (NFAT) response element are well-known in the art and may be used or routinely modified to assess
the ability of polypeptides of the invention (including antibodies and agonists or antagonists of the invention) to regulate NFAT transcription factors and modulate expression of genes involved in
immunomodulatory functions. Exemplary assays for transcription through the NFAT response element that may be used or routinely modified to test NFAT-response element activity of polypeptides of the
invention (including antibodies and agonists or antagonists of the invention) include assays disclosed in Berger et al., Gene 66: 1-10 (1998); Cullen and Malm, Methods in Enzymol 216: 362-368 (1992); Henthorn
et al., Proc Natl Acad Sci USA 85: 6342-6346 (1988); Serfling et al., Biochim Biophys Acta 1498(1): 1-18 (2000); De Boer et al., Int J Biochem Cell Biol 31(10): 1221-1236 (1999); Fraser et al., Eur J Immunol
29(3): 838-844 (1999); and Yeseen et al., J Biol Chem 268(19): 14285-14293 (1993), the contents of each of which are herein incorporated by reference in its entirety. T cells that may be used according to these
assays are publicly available (e.g., through the ATCC). Exemplary human T cells that may be used according to these assays include the JURKAT cell line, which is a suspension culture of leukemia cells that
produce IL-2 when stimulated.
Preferred Indication: Highly preferred indications include blood disorders (e.g., as described below under “Immune Activity”, “Blood-Related Disorders”, and/or “Cardiovascular Disorders”). Highly
preferred indications include autoimmune diseases (e.g., rheumatoid arthritis, systemic lupus erythematosis, multiple sclerosis and/or as described below), immunodeficiencies (e.g., as described below), boosting
a T cell-mediated immune response, and suppressing a T cell-mediated immune response. Additional highly preferred indications include inflammation and inflammatory disorders. An additional highly
preferred indication is infection (e.g., an infectious disease as described below under “Infectious Disease”). Preferred indications include neoplastic diseases (e.g., leukemia, lymphoma, and/or as described
below under “Hyperproliferative Disorders”). Preferred indications include neoplasms and cancers, such as, for example, leukemia, lymphoma, and prostate, breast, lung, colon, pancreatic, esophageal, stomach,
brain, liver and urinary cancer. Other preferred indications include benign dysproliferative disorders and pre-neoplastic conditions, such as, for example, hyperplasia, metaplasia, and/or dysplasia. Preferred
indications also include anemia, pancytopenia, leukopenia, thrombocytopenia, Hodgkin's disease, acute lymphocytic anemia (ALL), plasmacytomas, multiple myeloma, Burkitt's lymphoma, arthritis, AIDS,
granulomatous disease, inflammatory bowel disease, sepsis, neutropenia, neutrophilia, psoriasis, suppression of immune reactions to transplanted organs and tissues, hemophilia, hypercoagulation, diabetes
mellitus, endocarditis, meningitis, Lyme Disease, asthma and allergy.
Biological Activity: #74: Production of IL-5
Exemplary Assay: IL-5 FMAT. Assays for immunomodulatory proteins secreted by TH2 cells, mast cells, basophils, and eosinophils that stimulate eosinophil function and B cell Ig production and promote
polarization of CD4+ cells into TH2 cells are well known in the art and may be used or routinely modified to assess the ability of polypeptides of the invention (including antibodies and agonists or antagonists of
the invention) to mediate immunomodulation, stimulate immune cell function, modulate B cell Ig production, modulate immune cell polarization, and/or mediate humoral or cell-mediated immunity. Exemplary
assays that test for immunomodulatory proteins evaluate the production of cytokines, such as IL-5, and the stimulation of eosinophil function and B cell Ig production. Such assays that may be used or routinely
modified to test immunomodulatory activity of polypeptides of the invention (including antibodies and agonists or antagonists of the invention) include the assays disclosed in Miraglia et al., J Biomolecular
Screening 4: 193-204 (1999); Rowland et al., “Lymphocytes: a practical approach” Chapter 6: 138-160 (2000); Ohshima et al., Blood 92(9): 3338-3345 (1998); Jung et al., Eur J Immunol 25(8): 2413-2416 (1995);
Mori et al., J Allergy Clin Immunol 106(1 Pt 2): 558-564 (2000); and Koning et al., Cytokine 9(6): 427-436 (1997), the contents of each of which are herein incorporated by reference in its entirety. Human T cells
that may be used according to these assays may be isolated using techniques disclosed herein or otherwise known in the art. Human T cells are primary human lymphocytes that mature in the thymus and express
a T cell receptor and CD3, CD4, or CD8. These cells mediate humoral or cell-mediated immunity and may be preactivated to enhance responsiveness to immunomodulatory factors.
Preferred Indication: A highly preferred embodiment of the invention includes a method for inhibiting (e.g., reducing) IL-5 production. An alternative highly preferred embodiment of the invention includes
a method for stimulating (e.g., increasing) IL-5 production. A highly preferred embodiment of the invention includes a method for stimulating (e.g., increasing) immunoglobulin production. An alternative
highly preferred embodiment of the invention includes a method for inhibiting (e.g., decreasing) immunoglobulin production. A highly preferred indication includes allergy. A highly preferred indication
includes asthma. A highly preferred indication includes rhinitis. An additional highly preferred indication is infection (e.g., an infectious disease as described below under “Infectious Disease”), and
inflammation and inflammatory disorders. Preferred indications include blood disorders (e.g., as described below under “Immune Activity”, “Blood-Related Disorders”, and/or “Cardiovascular Disorders”).
Preferred indications include autoimmune diseases (e.g., rheumatoid arthritis, systemic lupus erythematosis, multiple sclerosis and/or as described below) and immunodeficiencies (e.g., as described below).
Preferred indications include neoplastic diseases (e.g., leukemia, lymphoma, melanoma, and/or as described below under “Hyperproliferative Disorders”). Preferred indications include neoplasms and cancers,
such as, leukemia, lymphoma, melanoma, and prostate, breast, lung, colon, pancreatic, esophageal, stomach, brain, liver and urinary cancer. Other preferred indications include benign dysproliferative disorders
and pre-neoplastic conditions, such as, for example, hyperplasia, metaplasia, and/or dysplasia. Preferred indications include anemia, pancytopenia, leukopenia, thrombocytopenia, leukemias, Hodgkin's disease,
acute lymphocytic anemia (ALL), plasmacytomas, multiple myeloma, Burkitt's lymphoma, arthritis, AIDS, granulomatous disease, inflammatory bowel disease, sepsis, neutropenia, neutrophilia, psoriasis,
immune reactions to transplanted organs and tissues, hemophilia, hypercoagulation, diabetes mellitus, endocarditis, meningitis, and Lyme Disease.
Biological Activity: #75: Production of MIP1alpha
Exemplary Assay: MIP-1alpha FMAT. Assays for immunomodulatory proteins produced by activated dendritic cells that upregulate monocyte/macrophage and T cell chemotaxis are well known in the art and
may be used or routinely modified to assess the ability of polypeptides of the invention (including antibodies and agonists or antagonists of the invention) to mediate immunomodulation, modulate chemotaxis,
and modulate T cell differentiation. Exemplary assays that test for immunomodulatory proteins evaluate the production of chemokines, such as macrophage inflammatory protein 1 alpha (MIP-1a), and the
activation of monocytes/macrophages and T cells. Such assays that may be used or routinely modified to test immunomodulatory and chemotaxis activity of polypeptides of the invention (including antibodies
and agonists or antagonists of the invention) include assays disclosed in Miraglia et al., J Biomolecular Screening 4: 193-204(1999); Rowland et al., “Lymphocytes: a practical approach” Chapter 6: 138-160
(2000); Satthaporn and Eremin, J R Coll Surg Ednb 45(1): 9-19 (2001); Drakes et al., Transp Immunol 8(1): 17-29 (2000); Verhasselt et al., J Immunol 158: 2919-2925 (1997); and Nardelli et al., J Leukoc Biol
65: 822-828 (1999), the contents of each of which are herein incorporated by reference in its entirety. Human dendritic cells that may be used according to these assays may be isolated using techniques disclosed
herein or otherwise known in the art. Human dendritic cells are antigen presenting cells in suspension culture, which, when activated by antigen and/or cytokines, initiate and upregulate T cell proliferation and
functional activities.
Preferred Indication: A highly preferred embodiment of the invention includes a method for stimulating MIP1a production. An alternative highly preferred embodiment of the invention includes a method
for inhibiting (e.g., reducing) MIP1a production. A highly preferred indication is infection (e.g., an infectious disease as described below under “Infectious Disease”). Preferred indications include blood
disorders (e.g., as described below under “Immune Activity”, “Blood-Related Disorders”, and/or “Cardiovascular Disorders”). Highly preferred indications include autoimmune diseases (e.g., rheumatoid arthritis,
systemic lupus erythematosis, multiple sclerosis and/or as described below) and immunodeficiencies (e.g., as described below). Additional highly preferred indications include inflammation and inflammatory
disorders. Preferred indications also include anemia, pancytopenia, leukopenia, thrombocytopenia, Hodgkin's disease, acute lymphocytic anemia (ALL), plasmacytomas, multiple myeloma, Burkitt's
lymphoma, arthritis, AIDS, granulomatous disease, inflammatory bowel disease, sepsis, neutropenia, neutrophilia, psoriasis, suppression of immune reactions to transplanted organs and tissues, hemophilia,
hypercoagulation, diabetes mellitus, endocarditis, meningitis, Lyme Disease, asthma, and allergy. Preferred indications also include neoplastic diseases (e.g., leukemia, lymphoma, and/or as described below
under “Hyperproliferative Disorders”). Highly preferred indications include neoplasms and cancers, such as, leukemia, lymphoma, prostate, breast, lung, colon, pancreatic, esophageal, stomach, brain, liver, and
urinary cancer. Other preferred indications include benign dysproliferative disorders and pre-neoplastic conditions, such as, for example, hyperplasia, metaplasia, and/or dysplasia.
Biological Activity: #76: Activation of transcription through the EGR (Early Growth Response) element in immune cells (such as B-cells).
Exemplary Assay: Assays for the activation of transcription through the EGR response element are well-known in the art and may be used or routinely modified to assess the ability of polypeptides of the
invention (including antibodies and agonists or antagonists of the invention) to regulate EGR transcription factors and modulate expression of immunomodulatory genes. Exemplary assays for transcription
through the EGR response element that may be used or routinely modified to test EGR response element activity of polypeptides of the invention (including antibodies and agonists or antagonists of the
invention) include assays disclosed in: Richards JD, et al., J Immunol, 166(6): 3855-3864 (2001); Dinkel, A, et al., J Exp Med, 188(12): 2215-2224 (1998); and, Newton, JS, et al., Eur J Immunol 1996
Apr; 26(4): 811-816 (1996), the contents of each of which are herein incorporated by reference in its entirety. Immune cells that may be used according to these assays are publicly available (e.g., through the
ATCC). Exemplary epithelial cells that may be used according to these assays include the Raji cell line.
Preferred Indication: Preferred embodiments of the invention include using polypeptides of the invention (or antibodies, agonists, or antagonists thereof) in detection, diagnosis, prevention, and/or treatment of
Cancer, Autoimmunity, Allergy and Asthma.
Biological Activity: #77: SEAP in HIB/CRE
Exemplary Assay:
Preferred Indication:
Biological Activity: #78: SEAP in 293/ISRE
Exemplary Assay:
Preferred Indication:
Biological Activity: #79: SEAP in Jurkat-AP1
Exemplary Assay:
Preferred Indication:
Biological Activity: #80: IL-10 in Human T-cell 2B9
Exemplary Assay:
Preferred Indication:
Biological Activity: #81: IL-13 in HMC
Exemplary Assay:
Preferred Indication:
Biological Activity: #82: IL-10 in Human T-cell 2B9
Exemplary Assay:
Preferred Indication:
Biological Activity: #82: IL-10 in Human T-cell 2B9
Exemplary Assay:
Preferred Indication:
Biological Activity: #83: Caspase (+paclitaxel) in SW480
Exemplary Assay:
Preferred Indication:
Biological Activity: #84: IL-8 in Normal Human Bronchial Epitheliae
Exemplary Assay:
Preferred Indication:
Biological Activity: #85: Production of IL-8 by by endothelial cells (such as Human Umbilical Cord Endothelial Cells).
Exemplary Assay: Assays measuring production of IL-8 are well known in the art and may be used or routinely modified to assess the ability of polypeptides of the invention (including antibodies and agonists
or antagonists of the invention) to regulate production and/or secretion of IL-8. For example, FMAT may be used or routinely modified to assess the ability of polypeptides of the invention (including antibodies
and agonists or antagonists of the invention) to regulate production and/or secretion of IL-8 from endothelial cells (such as human umbilical vein endothelial cells (HUVEC)). HUVECs are endothelial cells
which line venous blood vessels, and are involved in functions that include, but are not limited to, angiogenesis, vascular permeability, vascular tone, and immune cell extravasation. Endothelial cells play a
pivotal role in the initiation and perpetuation of inflammation and secretion of IL-8 may play an important role in recruitment and activation of immune cells such as neutrophils, macrophages, and lymphocytes.
Preferred Indication: Highly preferred indications include immunological and inflammatory disorders (e.g., such as allergy, asthma, leukemia, etc. and as described below under “Immune Activity”, and “Blood-
Related Disorders”). Highly preferred indications also includie autoimmune disorders (e.g., rheumatoid arthritis, systemic lupus erythematosis, Crohn''s disease, multiple sclerosis and/or as described below),
neoplastic disorders (e.g., organ cancers such as lung, liver, colon cancer, and/or as described below under “Hyperproliferative Disorders”), and cardiovascular disorders (e.g. such as described below under
“Cardiovascular Disorders”). Preferred indications include thrombosis, bacteremia and sepsis syndrome and consequent complications (such as acute respiratory distress syndrome and systemic ischemia-
reperfusion resulting from septic shock), restnosis and atherosclerosis.
Biological Activity: #86: CD69 in Human T cells
Exemplary Assay:
Preferred Indication:
Biological Activity: #87: SEAP in Molt4/SRE
Exemplary Assay:
Preferred Indication:
Biological Activity: #88: SEAP in NK16/STAT6
Exemplary Assay:
Preferred Indication:
Biological Activity: #89: SEAP in Jurkat/IL4 promoter (antiCD3 co-stim)
Exemplary Assay:
Preferred Indication:
Biological Activity: #90: IL-2 in Human T-cell 293T
Exemplary Assay:
Preferred Indication:
Biological Activity: #91: MCP-1 in Eol-1
Exemplary Assay:
Preferred Indication:
Biological Activity: #92: Caspase (+camptothecin) in SW480
Exemplary Assay:
Preferred Indication:
Biological Activity: #93: SEAP in UMR-106
Exemplary Assay:
Preferred Indication:
Biological Activity: #94: IL-2 in Human T cells
Exemplary Assay:
Preferred Indication:
Biological Activity: #95: SEAP in ATP-3T3-L1
Exemplary Assay:
Preferred Indication:
Biological Activity: #96: Glucose Production in H4IIE
Exemplary Assay:
Preferred Indication:
Biological Activity: #96: Glucose Production in H4IIE
Exemplary Assay:
Preferred Indication:
Biological Activity: #97: SEAP in SW480
Exemplary Assay:
Preferred Indication:
Biological Activity: #98: SEAP in OE-33
Exemplary Assay:
Preferred Indication:
Biological Activity: #99: CD152 in Human T cells
Exemplary Assay:
Preferred Indication:
Biological Activity: #100: Activation of transcription through NFKB response element in neuronal cells (such as SKNMC cells).
Exemplary Assay: Assays for the activation of transcription through the NFKB response element are well-known in the art and may be used or routinely modified to assess the ability of polypeptides of the
invention (including antibodies and agonists or antagonists of the invention) to regulate NFKB transcription factors and modulate expression of neuronal genes. Exemplary assays for transcription through the
NFKB response element that may be used or routinely modified to test NFKB-response element activity of polypeptides of the invention (including antibodies and agonists or antagonists of the invention) include
assays disclosed in: Gill JS, et al., Neurobiol Dis, 7(4): 448-461 (2000); Tamatani M, et al., J Biol Chem, 274(13): 8531-8538 (1999); Berger et al., Gene 66: 1-10 (1998); Cullen and Malm, Methods in Enzymol
216: 362-368 (1992); Henthorn et al., Proc Natl Acad Sci USA 85: 6342-6346 (1988); Valle Blazquez et al, Immunology 90(3): 455-460 (1997); Aramburau et al., J Exp Med 82(3): 801-810 (1995); and Fraser et
al., 29(3): 838-844 (1999), the contents of each of which are herein incorporated by reference in its entirety. Neuronal cells that may be used according to these assays are publicly available (e.g., through the
ATCC). Exemplary neuronal cells that may be used according to these assays include the SKNMC neuronal cell line.
Preferred Indication: Preferred embodiments of the invention include using polypeptides of the invention (or antibodies, agonists, or antagonists thereof) in detection, diagnosis, prevention, and/or treatment of
Neurological Diseases and Disorders (e.g. Alzheimer''s Disease, Parkinson''s Disease, Brain Cancer, Seizures).
Biological Activity: #101: Hexosaminidase in RBL-2H3
Exemplary Assay:
Preferred Indication:
Biological Activity: #102: IL-4 in HMC
Exemplary Assay:
Preferred Indication:
Biological Activity: #103: ICAM in Normal Human Bronchial Epitheliae
Exemplary Assay:
Preferred Indication:
Biological Activity: #104: SEAP in OE-21
Exemplary Assay:
Preferred Indication:
Biological Activity: #105: MIP-1a in HMC
Exemplary Assay:
Preferred Indication:
Biological Activity: #106: IL-6 in HUVEC
Exemplary Assay:
Preferred Indication:
Biological Activity: #107: CXCR4 in SW480
Exemplary Assay:
Preferred Indication:
Biological Activity: #108: CXCR4 in HT1080
Exemplary Assay:
Preferred Indication:
Biological Activity: #109: IgG in Human B cells
Exemplary Assay:
Preferred Indication:
Biological Activity: #110: SEAP in Alk Phos C2C12
Exemplary Assay:
Preferred Indication:
Biological Activity: #111: IgG in Human B cells SAC
Exemplary Assay:
Preferred Indication:
Biological Activity: #112: SEAP in Jurkat/IL4 promoter
Exemplary Assay:
Preferred Indication:
Biological Activity: #113: SEAP in Ku812/NFkB (TNF synergy)
Exemplary Assay:
Preferred Indication:
Biological Activity: #114: TNFa in Human T-cell 2B9
Exemplary Assay:
Preferred Indication:
Biological Activity: #115: Activation of transcription through NFKB response element in neuronal cells (such as SKNMC cells).
Exemplary Assay: Assays for the activation of transcription through the NFKB response element are well-known in the art and may be used or routinely modified to assess the ability of polypeptides of the
invention (including antibodies and agonists or antagonists of the invention) to regulate NFKB transcription factors and modulate expression of neuronal genes. Exemplary assays for transcription through the
NFKB response element that may be used or routinely modified to test NFKB-response element activity of polypeptides of the invention (including antibodies and agonists or antagonists of the invention) include
assays disclosed in: Gill JS, et al., Neurobiol Dis, 7(4): 448-461 (2000); Tamatani M, et al., J Biol Chem, 274(13): 8531-8538 (1999); Berger et al., Gene 66: 1-10 (1998); Cullen and Malm, Methods in Enzymol
216: 362-368 (1992); Henthorn et al., Proc Natl Acad Sci USA 85: 6342-6346 (1988); Valle Blazquez et al, Immunology 90(3): 455-460 (1997); Aramburau et al., J Exp Med 82(3): 801-810 (1995); and Fraser et
al., 29(3): 838-844 (1999), the contents of each of which are herein incorporated by reference in its entirety. Neuronal cells that may be used according to these assays are publicly available (e.g., through the
ATCC). Exemplary neuronal cells that may be used according to these assays include the SKNMC neuronal cell line.
Preferred Indication: Preferred embodiments of the invention include using polypeptides of the invention (or antibodies, agonists, or antagonists thereof) in detection, diagnosis, prevention, and/or treatment of
Neurological Diseases and Disorders (e.g. Alzheimer''s Disease, Parkinson''s Disease, Brain Cancer, Seizures).
Biological Activity: #116: MCP-1 in HUVEC
Exemplary Assay:
Preferred Indication:
Biological Activity: #117: IL-8 in SW480
Exemplary Assay:
Preferred Indication:
Biological Activity: #118: TNFa in Human T-cell 293T
Exemplary Assay:
Preferred Indication:
Biological Activity: #119: IFNg in Human T-cell 293T
Exemplary Assay:
Preferred Indication:
Biological Activity: #120: ICAM in OE19
Exemplary Assay:
Preferred Indication:
Biological Activity: #121: IFNg in Human T-cell 2B9
Exemplary Assay:
Preferred Indication:
Biological Activity: #122: IL-13 in Human T cells
Exemplary Assay:
Preferred Indication:
Biological Activity: #123: IL-10 in Human T-cell 293T
Exemplary Assay:
Preferred Indication:
Biological Activity: #124: Activation of Natural Killer Cell ERK Signaling Pathway.
Exemplary Assay: Kinase assay. Kinase assays, for example an Elk-1 kinase assay, for ERK signal transduction that regulate cell proliferation or differentiation are well known in the art and may be used or
routinely modified to assess the ability of polypeptides of the invention (including antibodies and agonists or antagonists of the invention) to promote or inhibit cell proliferation, activation, and differentiation.
Exemplary assays for ERK kinase activity that may be used or routinely modified to test ERK kinase-induced activity of polypeptides of the invention (including antibodies and agonists or antagonists of the
invention) include the assays disclosed in Forrer et al., Biol Chem 379(8-9): 1101-1110 (1998); Kyriakis JM, Biochem Soc Symp 64: 29-48 (1999); Chang and Karin, Nature 410(6824): 37-40 (2001); and Cobb MH,
Prog Biophys Mol Biol 71(3-4): 479-500 (1999); the contents of each of which are herein incorporated by reference in its entirety. Natural killer cells that may be used according to these assays are publicly
available (e.g., through the ATCC). Exemplary natural killer cells that may be used according to these assays include the human natural killer cell lines (for example, NK-YT cells which have cytolytic and
cytotoxic activity) or primary NK cells.
Preferred Indication: A highly preferred embodiment of the invention includes a method for stimulating natural killer cell proliferation. An alternative highly preferred embodiment of the invention includes
a method for inhibiting natural killer cell proliferation. A highly preferred embodiment of the invention includes a method for stimulating natural killer cell differentiation. An alternative highly preferred
embodiment of the invention includes a method for inhibiting natural killer cell differentiation. Highly preferred indications include neoplastic diseases (e.g., as described below under “Hyperproliferative
Disorders”), blood disorders (e.g., as described below under “Immune Activity”, “Cardiovascular Disorders”, and/or “Blood-Related Disorders”), immune disorders (e.g., as described below under “Immune
Activity”) and infections (e.g., as described below under “Infectious Disease”). Preferred indications include blood disorders (e.g., as described below under “Immune Activity”, “Blood-Related Disorders”,
and/or “Cardiovascular Disorders”). Highly preferred indications include autoimmune diseases (e.g., rheumatoid arthritis, systemic lupus erythematosis, multiple sclerosis and/or as described below) and
immunodeficiencies (e.g., as described below). Additional highly preferred indications include inflammation and inflammatory disorders. Highly preferred indications also include cancers such as, kidney,
melanoma, prostate, breast, lung, colon, pancreatic, esophageal, stomach, brain, liver, urinary cancer, lymphoma and leukemias. Other preferred indications include benign dysproliferative disorders and pre-
neoplastic conditions, such as, for example, hyperplasia, metaplasia, and/or dysplasia. Other highly preferred indications include, pancytopenia, leukopenia, leukemias, Hodgkin's disease, acute lymphocytic
anemia (ALL), arthritis, asthma, AIDS, granulomatous disease, inflammatory bowel disease, sepsis, psoriasis, immune reactions to transplanted organs and tissues, endocarditis, meningitis, Lyme Disease, and
allergies.
Biological Activity: #125: Activation of transcription through NFKB response element in immune cells (such as B-cells).
Exemplary Assay: Assays for the activation of transcription through the NFKB response element are well-known in the art and may be used or routinely modified to assess the ability of polypeptides of the
invention (including antibodies and agonists or antagonists of the invention) to regulate NFKB transcription factors and modulate expression of immunomodulatory genes. Exemplary assays for transcription
through the NFKB response element that may be used or rountinely modified to test NFKB-response element activity of polypeptides of the invention (including antibodies and agonists or antagonists of the
invention) include assays disclosed in: Gri G, et al., Biol Chem, 273(11): 6431-6438 (1998); Pyatt DW, et al., Cell Biol Toxicol 2000; 16(1): 41-51 (2000); Berger et al., Gene 66: 1-10 (1998); Cullen and Malm,
Methods in Enzymol 216: 362-368 (1992); Henthorn et al., Proc Natl Acad Sci USA 85: 6342-6346 (1988); Valle Blazquez et al, Immunology 90(3): 455-460 (1997); Aramburau et al., J Exp Med 82(3): 801-810
(1995); and Fraser et al., 29(3): 838-844 (1999), the contents of each of which are herein incorporated by reference in its entirety. Immune cells that may be used according to these assays are publicly available
(e.g., through the ATCC). Exemplary immune cells that may be used according to these assays include the Reh B-cell line.
Preferred Indication: Preferred embodiments of the invention include using polypeptides of the invention (or antibodies, agonists, or antagonists thereof) in detection, diagnosis, prevention, and/or treatment of
Cancer, Autoimmunity, Allergy and Asthma
Biological Activity: #126: Regulation of proliferation and/or differentiation in immune cells (such as mast cells).
Exemplary Assay: Kinase assays, for example an Elk-1 kinase assay for ERK signal transduction that regulates cell proliferation or differentiation, are well known in the art and may be used or routinely
modified to assess the ability of polypeptides of the invention (including antibodies and agonists or antagonists of the invention) to promote or inhibit cell proliferation, activation, and differentiation. Exemplary
assays for ERK kinase activity that may be used or routinely modified to test ERK kinase-induced activity of polypeptides of the invention (including antibodies and agonists or antagonists of the invention)
include the assays disclosed in: Ali H, et al., J Immunol, 165(12): 7215-7223 (2000); Tam SY, et al., Blood, 90(5): 1807-1820 (1997); Forrer et al., Biol Chem 379(8-9): 1101-1110 (1998); Berra et al., Biochem
Pharmacol 60(8): 1171-1178 (2000); Gupta et al., Exp Cell Res 247(2): 495-504 (1999); Chang and Karin, Nature 410(6824): 37-40 (2001); and Cobb MH, Prog Biophys Mol Biol 71(3-4): 479-500 (1999); the
contents of each of which are herein incorporated by reference in its entirety. Exemplary immune cells that may be used according to these assays include human mast cells such as the HMC-1 cell line.
Preferred Indication: Preferred embodiments of the invention include using polypeptides of the invention (or antibodies, agonists, or antagonists thereof) in detection, diagnosis, prevention, and/or treatment of
asthma, allergy, hypersensitivity and inflammation.
Biological Activity: #127: SEAP in HepG2/Squale-synthetase(stimulation)
Exemplary Assay:
Preferred Indication:
Biological Activity: #128: HLA-DR in Human T cells
Exemplary Assay:
Preferred Indication:

Table 1E

[0105] Polynucleotides encoding polypeptides of the present invention can be used in assays to test for one or more biological activities. One such biological activity which may be tested includes the ability of polynucleotides and polypeptides of the invention to stimulate up-regulation or down-regulation of expression of particular genes and proteins. Hence, if polynucleotides and polypeptides of the present invention exhibit activity in altering particular gene and protein expression patterns, it is likely that these polynucleotides and polypeptides of the present invention may be involved in, or capable of effecting changes in, diseases associated with the altered gene and protein expression profiles. Hence, polynucleotides, polypeptides, or antibodies of the present invention could be used to treat said associated diseases.

[0106] TaqMan® assays may be performed to assess the ability of polynucleotides (and polypeptides they encode) to alter the expression pattern of particular “target” genes. TaqMan® reactions are performed to evaluate the ability of a test agent to induce or repress expression of specific genes in different cell types. TaqMan® gene expression quantification assays (“TaqMan® assays”) are well known to, and routinely performed by, those of ordinary skill in the art. TaqMan® assays are performed in a two step reverse transcription/polymerase chain reaction (RT-PCR). In the first (RT) step, cDNA is reverse transcribed from total RNA samples using random hexamer primers. In the second (PCR) step, PCR products are synthesized from the cDNA using gene specific primers.

[0107] To quantify gene expression the Taqman® PCR reaction exploits the 5′ nuclease activity of AmpliTaq Gold® DNA Polymerase to cleave a Taqman® probe (distinct from the primers) during PCR. The Taqman® probe contains a reporter dye at the 5′-end of the probe and a quencher dye at the 3′ end of the probe. When the probe is intact, the proximity of the reporter dye to the quencher dye results in suppression of the reporter fluorescence. During PCR, if the target of interest is present, the probe specifically anneals between the forward and reverse primer sites. AmpliTaq Fold DNA Polymerase then cleaves the probe between the reporter and quencher when the probe hybridizes to the target, resulting in increased fluorescence of the reporter (see FIG. 2). Accumulation of PCR products is detected directly by monitoring the increase in fluorescence of the reporter dye.

[0108] After the probe fragments are displaced from the target, polymerization of the strand continues. The 3′-end of the probe is blocked to prevent extension of the probe during PCR. This process occurs in every cycle and does not interfere with the exponential accumulation of product. The increase in fluorescence signal is detected only if the target sequence is complementary to the probe and is amplified during PCR. Because of these requirements, any nonspecific amplification is not detected.

[0109] For test sample preparation, vector controls or constructs containing the coding sequence for the gene of interest are transfected into cells, such as for example 293T cells, and supernatants collected after 48 hours. For cell treatment and RNA isolation, multiple primary human cells or human cell lines are used; such cells may include but are not limited to, Normal Human Dermal Fibroblasts, Aortic Smooth Muscle, Human Umbilical Vein Endothelial Cells, HepG2, Daudi, Jurkat, U937, Caco, and THP-1 cell lines. Cells are plated in growth media and growth is arrested by culturing without media change for 3 days, or by switching cells to low serum media and incubating overnight. Cells are treated for 1, 6, or 24 hours with either vector control supernatant or sample supernatant (or purified/partially purified protein preparations in buffer). Total RNA is isolated; for example, by using Trizol extraction or by using the Ambion RNAqueous™-4PCR RNA isolation system. Expression levels of multiple genes are analyzed using TAQMAN, and expression in the test sample is compared to control vector samples to identify genes induced or repressed. Each of the above described techniques are well known to, and routinely performed by, those of ordinary skill in the art.

[0110] Table 1E indicates particular disease classes for which polynucleotides, polypeptides, or antibodies of the present invention may be used in detecting, diagnosing, preventing, treating and/or ameliorating said diseases and disorders based on “target” gene expression patterns which may be up- or down-regulated by polynucleotides (and the encoded polypeptides) corresponding to each indicated cDNA Clone ID (shown in Table 1E, Column 2).

[0111] Thus, in preferred embodiments, the present invention encompasses a method of detecting, diagnosing, preventing, treating, and/or ameliorating a disease or disorder listed in the “Disease Class” column of Table 1E; comprising administering to a patient in which such detection, diagnosis, prevention, or treatment is desired a protein, nucleic acid, or antibody of the invention (or fragment or variant thereof) in an amount effective to detect, diagnose, prevent, treat, or ameliorate the disease or disorder. The first and second columns of Table 1D show the “Gene No.” and “cDNA Clone ID No.”, respectively, indicating certain nucleic acids and proteins (or antibodies against the same) of the invention (including polynucleotide, polypeptide, and antibody fragments or variants thereof) that may be used in detecting, diagnosing, preventing, treating, or ameliorating the disease(s) or disorder(s) indicated in the corresponding row in the “Disease Class” Column of Table 1E.

[0112] In another embodiment, the present invention also encompasses methods of detecting, diagnosing, preventing, treating, or ameliorating a disease or disorder listed in the “Disease Class” Column of Table 1E; comprising administering to a patient combinations of the proteins, nucleic acids, or antibodies of the invention (or fragments or variants thereof), sharing similar indications as shown in the corresponding rows in the “Disease Class” Column of Table 1E.

[0113] The “Disease Class” Column of Table 1E provides a categorized descriptive heading for diseases, disorders, and/or conditions (more fully described below) that may be detected, diagnosed, prevented, treated, or ameliorated by a protein, nucleic acid, or antibody of the invention (or fragment or variant thereof).

[0114] The “Cell Line” and “Exemplary Targets” Columns of Table 1E indicate particular cell lines and target genes, respectively, which may show altered gene expression patterns (i.e., up- or down-regulation of the indicated target gene) in Taqman assays, performed as described above, utilizing polynucleotides of the cDNA Clone ID shown in the corresponding row. Alteration of expression patterns of the indicated “Exemplary Target” genes is correlated with a particular “Disease Class” as shown in the corresponding row. The Column of Table 1E

[0115] The “Exemplary Accessions” Column indicates GenBank Accessions (available online through the National Center for Biotechnology Information (NCBI) at www.ncbi.nlm.nih.gov) which correspond to the “Exemplary Targets” shown in the adjacent row.

[0116] The recitation of “Cancer” in the “Disease Class” Column indicates that the corresponding nucleic acid and protein, or antibody against the same, of the invention (or fragment or variant thereof) may be used for example, to detect, diagnose, prevent, treat, and/or ameliorate neoplastic diseases and/or disorders (e.g., leukemias, cancers, etc., as described below under “Hyperproliferative Disorders”).

[0117] The recitation of “Immune” in the “Disease Class” column indicates that the corresponding nucleic acid and protein, or antibody against the sane, of the invention (or fragment or variant thereof), may be used for example, to detect, diagnose, prevent, treat, and/or ameliorate diseases and/or disorders relating to neoplastic diseases (e.g., as described below under “Hyperproliferative Disorders”), blood disorders (e.g., as described below under “Immune Activity” “Cardiovascular Disorders” and/or “Blood-Related Disorders”), and infections (e.g., as described below under “Infectious Disease”).

[0118] The recitation of “Angiogenesis” in the “Disease Class” column indicates that the corresponding nucleic acid and protein, or antibody against the sane, of the invention (or fragment or variant thereof), may be used for example, to detect, diagnose, treat, prevent, and/or ameliorate diseases and/or disorders relating to neoplastic diseases (e.g., as described below under “Hyperproliferative Disorders”), diseases and/or disorders of the cardiovascular system (e.g., as described below under “Cardiovascular Disorders”), diseases and/or disorders involving cellular and genetic abnormalities (e.g., as described below under “Diseases at the Cellular Level”), diseases and/or disorders involving angiogenesis (e.g., as described below under “Anti-Angiogenesis Activity”), to promote or inhibit cell or tissue regeneration (e.g., as described below under “Regeneration”), or to promote wound healing (e.g., as described below under “Wound Healing and Epithelial Cell Proliferation”).

[0119] Moreover, highly preferred indications include diagnosis, prevention, treatment, and/or amelioration of diseases and disorders involving angiogenesis, wound healing, neoplasia (particularly including, but not limited to, tumor metastases), and cardiovascular diseases and disorders; as described herein under the headings “Hyperproliferative Disorders,” “Regeneration,” “Anti-Angiogenesis Activity,” “Diseases at the Cellular Level,” and “Wound Healing and Epithelial Cell Proliferation.”

[0120] The recitation of “Diabetes” in the “Disease Class” column indicates that the corresponding nucleic acid and protein, or antibody against the same, of the invention (or fragment or variant thereof), may be used for example, to detect, diagnose, treat, prevent, and/or ameliorate diabetes (including diabetes mellitus types I and II), as well as diseases and/or disorders associated with, or consequential to, diabetes (e.g. as described below under “Endocrine Disorders,” “Renal Disorders,” and “Gastrointestinal Disorders”).

TABLE 1E

| | | Disease | | Exemplary | |
|---|---|---|---|---|---|
| Gene No. | cDNA CloneID | Class | Cell Line | Targets | Exemplary Accessions |
| 7 | HAGDG59 | Angiogenesis | AOSMC - AOSMC cells are aortic smooth muscle cells | Vegf1 | gb\|AF024710\|AF024710 |
| 7 | HAGDG59 | Angiogenesis | HEK293 - The HEK293 cell line is a human embryonal kidney epithelial cell line available through the ATCC as cell | TSP-1 | gb\|X04665\|HSTHROMR |
| | | | line number CRL-1573 | | |
| 7 | HAGDG59 | Angiogenesis | HUVEC - HUVEC cells are human umbilical vein endothelial cells | Vegf1 | gb\|AF024710\|AF024710 |
| 7 | HAGDG59 | Angiogenesis | SK-N-MC neuroblastoma - The SK-N-MC neuroblastoma cell line is a cell line derived from human brain tissue | Cycloox | gb\|AF024710\|AF024710 |
| | | | available through the ATCC as cell line number HTB-10 | Vegf1 | |
| 40 | HCHNF25 | Angiogenesis | Caco-2 - The Caco-2 cell line is a human colorectal adenocarcinoma cell line available through the ATCC as cell line | ICAM | gb\|X06990\|HSICAM1 |
| | | | number HTB-37 | VCAM | gb\|A30922\|A30922 |
| 40 | HCHNF25 | Angiogenesis | Daudi - The Daudi cell line is a human B lymphoblast cell line available through the ATCC as cell line number CCL-213 | Vegf1 | gb\|AF024710\|AF024710 |
| 40 | HCHNF25 | Angiogenesis | HUVEC - HUVEC cells are human umbilical vein endothelial cells | Vegf1 | gb\|AF024710\|AF024710 |
| 40 | HCHNF25 | Angiogenesis | Jurkat - The Jurkat cell line is a human T lymphocyte cell line available through the ATCC as cell line number TIB-152 | VCAM | gb\|A30922\|A30922 |
| 40 | HCHNF25 | Angiogenesis | NHDF - NHDF cells are normal human dermal fibroblasts | PAI | gb\|X12701\|HSENDPAI |
| 40 | HCHNF25 | Angiogenesis | THP1 - The THP-1 cell line is a human monocyte cell line available through the ATCC as cell line number TIB-202 | Vegf1 | gb\|AF024710\|AF024710 |
| 40 | HCHNF25 | Angiogenesis | U937 - The U937 cell line is a human monocyte cell line available through the ATCC as cell line number CRL-1593.2 | VCAM | gb\|A30922\|A30922 |
| 55 | HDPBQ71 | Angiogenesis | AOSMC - AOSMC cells are aortic smooth muscle cells | Flt1 | gb\|AF063657\|AF063657 |
| | | | | VCAM | gb\|A30922\|A30922 |
| 55 | HDPBQ71 | Angiogenesis | Caco-2 - The Caco-2 cell line is a human colorectal adenocarcinoma cell line available through the ATCC as cell line | Vegf1 | gb\|AF024710\|AF024710 |
| | | | number HTB-37 | | |
| 55 | HDPBQ71 | Angiogenesis | Daudi - The Daudi cell line is a human B lymphoblast cell line available through the ATCC as cell line number CCL-213 | ICAM | gb\|X06990\|HSICAM1 |
| 55 | HDPBQ71 | Angiogenesis | HEK293 - The HEK293 cell line is a human embryonal kidney epithelial cell line available through the ATCC as cell | Cycloox | gb\|AF063657\|AF063657 |
| | | | line number CRL-1573 | Flt1 | gb\|X85761\|HSNOS2E3 |
| | | | | iNOS | |
| 55 | HDPBQ71 | Angiogenesis | HUVEC - HUVEC cells are human umbilical vein endothelial cells | Flt1 | gb\|AF063657\|AF063657 |
| | | | | TSP-1 | gb\|X04665\|HSTHROMR |
| | | | | VCAM | gb\|A30922\|A30922 |
| 55 | HDPBQ71 | Angiogenesis | Jurkat - The Jurkat cell line is a human T lymphocyte cell line available through the ATCC as cell line number TIB-152 | Flt1 | gb\|AF063657\|AF063657 |
| | | | | Vegf1 | gb\|AF024710\|AF024710 |
| 55 | HDPBQ71 | Angiogenesis | Liver | VCAM | gb\|A30922\|A30922 |
| 55 | HDPBQ71 | Angiogenesis | NHDF - NHDF cells are normal human dermal fibroblasts | TSP-1 | gb\|X04665\|HSTHROMR |
| | | | | Vegf1 | gb\|AF024710\|AF024710 |
| 55 | HDPBQ71 | Angiogenesis | T cell | ICAM | gb\|X06990\|HSICAM1 |
| | | | | Vegf1 | gb\|AF024710\|AF024710 |
| 55 | HDPBQ71 | Angiogenesis | THP1 - The THP-1 cell line is a human monocyte cell line available through the ATCC as cell line number TIB-202 | VCAM | gb\|A30922\|A30922 |
| 55 | HDPBQ71 | Angiogenesis | U937 - The U937 cell line is a human monocyte cell line available through the ATCC as cell line number CRL-1593.2 | VCAM | gb\|A30922\|A30922 |
| 99 | HFCCQ50 | Angiogenesis | TF-1- The TF-1 cell line is a human erythroblast cell line available through the ATCC as cell line number CRL-2003 | TSP-1 | gb\|X04665\|HSTHROMR |
| 99 | HFCCQ50 | Angiogenesis | U937- The U937 cell line is a human monocyte cell line available through the ATCC as cell line number CRL-1593.2 | ICAM | gb\|X06990\|HSICAM1 |
| 107 | HFVAB79 | Angiogenesis | U937- The U937 cell line is a human monocyte cell line available through the ATCC as cell line number CRL-1593.2 | ICAM | gb\|X06990\|HSICAM1 |
| 132 | HJACG02 | Angiogenesis | Adipocytes-3/12/01 | ICAM | gb\|X06990\|HSICAM1 |
| | | | | PAI | gb\|X12701\|HSENDPAI |
| | | | | Vegf1 | gb\|AF024710\|AF024710 |
| 132 | HJACG02 | Angiogenesis | AOSMC - AOSMC cells are aortic smooth muscle cells | VCAM | gb\|A30922\|A30922 |
| 132 | HJACG02 | Angiogenesis | Daudi - The Daudi cell line is a human B lymphoblast cell line available through the ATCC as cell line number CCL-213 | ICAM | gb\|X06990\|HSICAM1 |
| | | | | VCAM | gb\|A30922\|A30922 |
| 132 | HJACG02 | Angiogenesis | HUVEC - HUVEC cells are human umbilical vein endothelial cells | ICAM | gb\|X06990\|HSICAM1 |
| | | | | TSP-1 | gb\|X04665\|HSTHROMR |
| | | | | Vegf1 | gb\|AF024710\|AF024710 |
| 142 | HKACD58 | Angiogenesis | AOSMC - AOSMC cells are aortic smooth muscle cells | VCAM | gb\|A30922\|A30922 |
| | | | | Vegf1 | gb\|AF024710\|AF024710 |
| 142 | HKACD58 | Angiogenesis | HEK293 - The HEK293 cell line is a human embryonal kidney epithelial cell line available through the ATCC as cell | TSP-1 | gb\|X04665\|HSTHROMR |
| | | | line number CRL-1573 | Vegf1 | gb\|AF024710\|AF024710 |
| 142 | HKACD58 | Angiogenesis | HUVEC - HUVEC cells are human umbilical vein endothelial cells | ICAM | gb\|X06990\|HSICAM1 |
| 142 | HKACD58 | Angiogenesis | NHDF - NHDF cells are normal human dermal fibroblasts | VCAM | gb\|A30922\|A30922 |
| 221 | HNHFO29 | Angiogenesis | U937- The U937 cell line is a human monocyte cell line available through the ATCC as cell line number CRL-1593.2 | Flt1 | gb\|AF063657\|AF063657 |
| | | | | ICAM | gb\|X06990\|HSICAM1 |
| | | | | PAI | gb\|X12701\|HSENDPAI |
| 275 | HSDSB09 | Angiogenesis | AOSMC - AOSMC cells are aortic smooth muscle cells | VCAM | gb\|A30922\|A30922 |
| 275 | HSDSB09 | Angiogenesis | Caco-2 - The Caco-2 cell line is a human colorectal adenocarcinoma cell line available through the ATCC as cell line | ICAM | gb\|X06990\|HSICAM1 |
| | | | number HTB-37 | Vegf1 | gb\|AF024710\|AF024710 |
| 275 | HSDSB09 | Angiogenesis | HEK293 - The HEK293 cell line is a human embryonal kidney epithelial cell line available through the ATCC as cell | Cycloox | gb\|A30922\|A30922 |
| | | | line number CRL-1573 | VCAM | |
| 275 | HSDSB09 | Angiogenesis | HUVEC - HUVEC cells are human umbilical vein endothelial cells | ICAM | gb\|X06990\|HSICAM1 |
| | | | | Vegf1 | gb\|AF024710\|AF024710 |
| 275 | HSDSB09 | Angiogenesis | Jurkat - The Jurkat cell line is a human T lymphocyte cell line available through the ATCC as cell line number TIB-152 | Flt1 | gb\|AF063657\|AF063657 |
| 275 | HSDSB09 | Angiogenesis | Molt4 - The Molt4 cell line is a human T cell line available through the ATCC as cell line number CRL-1582 | iNOS | gb\|X85761\|HSNOS2E3 |
| 275 | HSDSB09 | Angiogenesis | NHDF - NHDF cells are normal human dermal fibroblasts | Vegf1 | gb\|AF024710\|AF024710 |
| 275 | HSDSB09 | Angiogenesis | SUPT - SUPT cells are human T-cells | VCAM | gb\|A30922\|A30922 |
| 275 | HSDSB09 | Angiogenesis | THP1 - The THP-1 cell line is a human monocyte cell line available through the ATCC as cell line number TIB-202 | ICAM | gb\|X06990\|HSICAM1 |
| | | | | TSP-1 | gb\|X04665\|HSTHROMR |
| | | | | VCAM | gb\|A30922\|A30922 |
| | | | | Vegf1 | gb\|AF024710\|AF024710 |
| 334 | HWHGZ51 | Angiogenesis | AOSMC - AOSMC cells are aortic smooth muscle cells | TSP-1 | gb\|X04665\|HSTHROMR |
| 334 | HWHGZ51 | Angiogenesis | Daudi - The Daudi cell line is a human B lymphoblast cell line available through the ATCC as cell line number CCL-213 | ICAM | gb\|X06990\|HSICAM1 |
| | | | | PAI | gb\|X12701\|HSENDPAI |
| 334 | HWHGZ51 | Angiogenesis | H9 - The H9 cell line is a human T lymphocyte cell line available through the ATCC as cell line number HTB-176 | VCAM | gb\|A30922\|A30922 |
| 334 | HWHGZ51 | Angiogenesis | HEK293 - The HEK293 cell line is a human embryonal kidney epithelial cell line available through the ATCC as cell | Flt1 | gb\|AF063657\|AF063657 |
| | | | line number CRL-1573 | iNOS | gb\|X85761\|HSNOS2E3 |
| 334 | HWHGZ51 | Angiogenesis | HUVEC - HUVEC cells are human umbilical vein endothelial cells | Vegf1 | gb\|AF024710\|AF024710 |
| 334 | HWHGZ51 | Angiogenesis | Liver | Flt1 | gb\|AF063657\|AF063657 |
| | | | | ICAM | gb\|X06990\|HSICAM1 |
| | | | | PAI | gb\|X12701\|HSENDPAI |
| | | | | VCAM | gb\|A30922\|A30922 |
| 334 | HWHGZ51 | Angiogenesis | Molt4 - The Molt4 cell line is a human T cell line available through the ATCC as cell #CRL-1582 | VCAM | gb\|A30922\|A30922 |
| 334 | HWHGZ51 | Angiogenesis | NHDF - NHDF cells are normal human dermal fibroblasts | Vegf1 | gb\|AF024710\|AF024710 |
| 334 | HWHGZ51 | Angiogenesis | THP1 - The THP-1 cell line is a human monocyte cell line available through the ATCC as cell line number TIB-202 | Vegf1 | gb\|AF024710\|AF024710 |
| 334 | HWHGZ51 | Angiogenesis | U937 - The U937 cell line is a human monocyte cell line available through the ATCC as cell line number CRL-1593.2 | ICAM | gb\|X06990\|HSICAM1 |
| | | | | Vegf1 | gb\|AF024710\|AF024710 |

[0121] Table 2 further characterizes certain encoded polypeptides of the invention, by providing the results of comparisons to protein and protein family databases. The first column provides a unique clone identifier, “Clone ID NO:”, corresponding to a cDNA clone disclosed in Table 1A and/or Table 1B. The second column provides the unique contig identifier, “Contig ID:” which allows correlation with the information in Table 1B. The third column provides the sequence identifier, “SEQ ID NO:”, for the contig polynucleotide sequences. The fourth column provides the analysis method by which the homology/identity disclosed in the Table was determined. The fifth column provides a description of the PFAM/NR hit identified by each analysis. Column six provides the accession number of the PFAM/NR hit disclosed in the fifth column. Column seven, score/percent identity, provides a quality score or the percent identity, of the hit disclosed in column five. Comparisons were made between polypeptides encoded by polynucleotides of the invention and a non-redundant protein database (herein referred to as “NR”), or a database of protein families (herein referred to as “PFAM”), as described below.

[0122] The NR database, which comprises the NBRF PIR database, the NCBI GenPept database, and the SIB SwissProt and TrEMBL databases, was made non-redundant using the computer program nrdb2 (Warren Gish, Washington University in Saint Louis). Each of the polynucleotides shown in Table 1B (e.g., SEQ ID NO:X or the ‘Query’ sequence) was used to search against the NR database. The computer program BLASTX was used to compare a 6-frame translation of the Query sequence to the NR database (for information about the BLASTX algorithm please see Altshul et al., J. Mol. Biol. 215:403-410 (1990), and Gish and States, States, Nat. Genet. 3:266-272 (1993). A description of the sequence that is most similar to the Query sequence (the highest scoring ‘Subject’) is shown in column five of Table 2 and the database accession number for that sequence is provided in column six. The highest scoring ‘Subject’ is reported in Table 2 if (a) the estimated probability that the match occurred by chance alone is less than 1.0e-07, and (b) the match was not to a known repetitive element. BLASTX returns alignments of short polypeptide segments of the Query and Subject sequences which share a high degree of similarity; these segments are known as High-Scoring Segment Pairs or HSPs. Table 2 reports the degree of similarity between the Query and the Subject for each HSP as a percent identity in Column 7. The percent identity is determined by dividing the number of exact matches between the two aligned sequences in the HSP, dividing by the number of Query amino acids in the HSP and multiplying by 100. The polynucleotides of SEQ ID NO:X which encode the polypeptide sequence that generates an HSP are delineated by columns 8 and 9 of Table 2.

[0123] The PFAM database, PFAM version 2.1, (Sonnhammer, Nucl. Acids Res., 26:320-322, 1998)) consists of a series of multiple sequence alignments; one alignment for each protein family. Each multiple sequence alignment is converted into a probability model called a Hidden Markov Model, or HMM, that represents the position-specific variation among the sequences that make up the multiple sequence alignment (see, e.g., Durbin, et al., Biological sequence analysis: probabilistic models of proteins and nucleic acids, Cambridge University Press, 1998 for the theory of HMMs). The program HMMER version 1.8 (Sean Eddy, Washington University in Saint Louis) was used to compare the predicted protein sequence for each Query sequence (SEQ ID NO:Y in Table 1B) to each of the HMMs derived from PFAM version 2.1. A HMM derived from PFAM version 2.1 was said to be a significant match to a polypeptide of the invention if the score returned by HMMER 1.8 was greater than 0.8 times the HMMER 1.8 score obtained with the most distantly related known member of that protein family. The description of the PFAM family which shares a significant match with a polypeptide of the invention is listed in column 5 of Table 2, and the database accession number of the PFAM hit is provided in column 6. Column 7 provides the score returned by HMMER version 1.8 for the alignment. Columns 8 and 9 delineate the polynucleotides of SEQ ID NO:X which encode the polypeptide sequence which show a significant match to a PFAM protein family.

[0124] As mentioned, columns 8 and 9 in Table 2, “NT From” and “NT To”, delineate the polynucleotides of “SEQ ID NO:X” that encode a polypeptide having a significant match to the PFAM/NR database as disclosed in the fifth column. In one embodiment, the invention provides a protein comprising, or alternatively consisting of, a polypeptide encoded by the polynucleotides of SEQ ID NO:X delineated in columns 8 and 9 of Table 2. Also provided are polynucleotides encoding such proteins, and the complementary strand thereto.

[0125] The nucleotide sequence SEQ ID NO:X and the translated SEQ ID NO:Y are sufficiently accurate and otherwise suitable for a variety of uses well known in the art and described further below. For instance, the nucleotide sequences of SEQ ID NO:X are useful for designing nucleic acid hybridization probes that will detect nucleic acid sequences contained in SEQ ID NO:X or the cDNA contained in ATCC Deposit No:Z. These probes will also hybridize to nucleic acid molecules in biological samples, thereby enabling immediate applications in chromosome mapping, linkage analysis, tissue identification and/or typing, and a variety of forensic and diagnostic methods of the invention. Similarly, polypeptides identified from SEQ ID NO:Y may be used to generate antibodies which bind specifically to these polypeptides, or fragments thereof, and/or to the polypeptides encoded by the cDNA clones identified in, for example, Table 1A and/or 1B.

[0126] Nevertheless, DNA sequences generated by sequencing reactions can contain sequencing errors. The errors exist as misidentified nucleotides, or as insertions or deletions of nucleotides in the generated DNA sequence. The erroneously inserted or deleted nucleotides cause frame shifts in the reading frames of the predicted amino acid sequence. In these cases, the predicted amino acid sequence diverges from the actual amino acid sequence, even though the generated DNA sequence may be greater than 99.9% identical to the actual DNA sequence (for example, one base insertion or deletion in an open reading frame of over 1000 bases).

[0127] Accordingly, for those applications requiring precision in the nucleotide sequence or the amino acid sequence, the present invention provides not only the generated nucleotide sequence identified as SEQ ID NO:X, and a predicted translated amino acid sequence identified as SEQ ID NO:Y, but also a sample of plasmid DNA containing cDNA ATCC Deposit No:Z (e.g., as set forth in columns 2 and 3 of Table 1A and/or as set forth, for example, in Table 1B, 6, and 7). The nucleotide sequence of each deposited clone can readily be determined by sequencing the deposited clone in accordance with known methods. Further, techniques known in the art can be used to verify the nucleotide sequences of SEQ ID NO:X. The predicted amino acid sequence can then be verified from such deposits. Moreover, the amino acid sequence of the protein encoded by a particular clone can also be directly determined by peptide sequencing or by expressing the protein in a suitable host cell containing the deposited human cDNA, collecting the protein, and determining its sequence.

TABLE 2

| | | SEQ ID | | | PFam/NR | Score/ | | |
|---|---|---|---|---|---|---|---|---|
| cDNA | | NO: | Analysis | | Accession | Percent | NT | NT |
| Clone ID | Contig ID: | X | Method | PFam/NR Description | Number | Identity | From | To |
| H2CBU83 | 884134 | 11 | WUblastx.64 | (Q9NYD1) G-PROTEIN-COUPLED | Q9NYD1 | 100% | 10 | 777 |
| | | | | RECEPTOR 48. | | | | |
| H2CBU83 | 745366 | 348 | WUblastx.64 | (Q9NYD1) G-PROTEIN-COUPLED | Q9NYD1 | 98% | 291 | 776 |
| | | | | RECEPTOR 48. | | 44% | 151 | 204 |
| | | | | | | 100% | 10 | 297 |
| HACBD91 | 637482 | 14 | WUblastx.64 | NADH dehydrogenase (ubiquinone) | pir\|JE0383\|JE0383 | 100% | 211 | 357 |
| | | | | (EC 1.6.5.3) chain NDUFB4 - human | | 95% | 1306 | 1368 |
| HAGAQ26 | 561996 | 15 | WUblastx.64 | (Q9UKG4) NA+/SULFATE | Q9UKG4 | 99% | 414 | 1001 |
| | | | | COTRANSPORTER SUT-1. | | 93% | 2 | 433 |
| HAGBZ81 | 456414 | 16 | WUblastx.64 | (Q9H291) JUNCTATE. | Q9H291 | 85% | 183 | 329 |
| | | | | | | 77% | 26 | 199 |
| HAGDG59 | 534165 | 17 | HMMER 2.1.1 | PFAM: short chain dehydrogenase | PF00106 | 182.2 | 232 | 795 |
| | | | WUblastx.64 | (Q9UKU4) RETINAL SHORT-CHAIN | Q9UKU4 | 100% | 124 | 1023 |
| | | | | DEHYDROGENASE/REDUCTASE | | | | |
| | | | | RETSDR2. | | | | |
| HAJAN23 | 1352364 | 23 | WUblastx.64 | (Q9HCC0) NON-BIOTIN | Q9HCC0 | 100% | 109 | 1797 |
| | | | | CONTAINING SUBUNIT OF 3- | | | | |
| | | | | METHYLCROTONYL-COA | | | | |
| | | | | CARBOX | | | | |
| HAJAN23 | 872551 | 350 | HMMER 2.1.1 | PFAM: Carboxyl transferase domain | PF01039 | 126.6 | 294 | 617 |
| | | | WUblastx.64 | (Q9HCC0) NON-BIOTIN | Q9HCC0 | 91% | 120 | 665 |
| | | | | CONTAINING SUBUNIT OF 3- | | 96% | 557 | 1807 |
| | | | | METHYLCROTONYL-COA | | | | |
| | | | | CARBOX | | | | |
| HAJBR69 | 638516 | 24 | WUblastx.64 | (Q9JIG5) UBIQUITIN SPECIFIC | Q9JIG5 | 69% | 677 | 48 |
| | | | | PROTEASE (FRAGMENT). | | | | |
| HAMFE15 | 905695 | 25 | HMMER 2.1.1 | PFAM: Diacylglycerol kinase catalytic | PF00781 | 22.9 | 1807 | 1956 |
| | | | | domain (presumed) | | | | |
| | | | WUblastx.64 | (Q9NP48) PUTATIVE LIPID KINASE | Q9NP48 | 93% | 1495 | 2757 |
| | | | | (CDNA FLJ10842 FIS, CLONE | | | | |
| | | | | NT2RP4001343 | | | | |
| HAMFE15 | 823350 | 351 | WUblastx.64 | (Q9NP48) PUTATIVE LIPID KINASE | Q9NP48 | 93% | 1503 | 2756 |
| | | | | (CDNA FLJ10842 FIS, CLONE | | | | |
| | | | | NT2RP4001343 | | | | |
| HAMGG68 | 731859 | 26 | WUblastx.64 | (Q9NX85) CDNA FLJ20378 FIS, | Q9NX85 | 71% | 984 | 859 |
| | | | | CLONE KAIA0536. | | 44% | 1454 | 1401 |
| | | | | | | 57% | 1457 | 1416 |
| | | | | | | 70% | 1458 | 1429 |
| | | | | | | 56% | 726 | 658 |
| | | | | | | 64% | 857 | 636 |
| HAMGR28 | 892971 | 27 | WUblastx.64 | (AAH07438) Similar to RIKEN cDNA | AAH07438 | 100% | 59 | 823 |
| | | | | 2610511E22 gene. | | | | |
| HAMGR28 | 748223 | 352 | WUblastx.64 | (AAH07438) Similar to RIKEN cDNA | AAH07438 | 100% | 569 | 766 |
| | | | | 2610511E22 gene. | | 100% | 1 | 567 |
| HAPOM49 | 769555 | 28 | WUblastx.64 | (Q9BZM1) GROUP XII SECRETED | Q9BZM1 | 99% | 251 | 817 |
| | | | | PHOSPHOLIPASE A2. | | | | |
| HAPOM49 | 722386 | 353 | WUblastx.64 | (Q9BZM1) GROUP XII SECRETED | Q9BZM1 | 100% | 251 | 451 |
| | | | | PHOSPHOLIPASE A2. | | 100% | 454 | 816 |
| HAPPW30 | 1352278 | 29 | WUblastx.64 | (Q8WUJ1) Hypothetical 28.7 kDa | Q8WUJ1 | 100% | 59 | 850 |
| | | | | protein. | | | | |
| HAPPW30 | 684272 | 354 | WUblastx.64 | (Q8WUJ1) Hypothetical 28.7 kDa | Q8WUJ1 | 100% | 54 | 263 |
| | | | | protein. | | 36% | 982 | 1056 |
| | | | | | | 100% | 266 | 844 |
| HATBR65 | 635514 | 30 | WUblastx.64 | (Q96NR6) CDNA FLJ30278 fis, clone | Q96NR6 | 42% | 750 | 806 |
| | | | | BRACE2002755. | | 64% | 617 | 751 |
| HAUAI83 | 639009 | 33 | WUblastx.64 | (BAB27250) 13 days embryo liver | BAB27250 | 88% | 160 | 399 |
| | | | | cDNA, RIKEN full-1e | | 90% | 25 | 84 |
| | | | | | | 100% | 489 | 557 |
| HAUAI83 | 383592 | 355 | WUblastx.64 | (BAB27250) 13 days embryo liver | BAB27250 | 100% | 406 | 723 |
| | | | | cDNA, RIKEN full-1e | | | | |
| HBGBA69 | 1352289 | 35 | WUblastx.64 | (Q8WVV8) Hypothetical 22.4 kDa | Q8WVV8 | 100% | 220 | 843 |
| | | | | protein (Fragment). | | | | |
| HBGBA69 | 709658 | 356 | WUblastx.64 | (Q8WVV8) Hypothetical 22.4 kDa | Q8WVV8 | 78% | 158 | 226 |
| | | | | protein (Fragment). | | 100% | 211 | 780 |
| HBIAE26 | 514418 | 36 | WUblastx.64 | (AAK55521) PRO0764. | AAK55521 | 83% | 1009 | 974 |
| | | | | | | 65% | 983 | 744 |
| HBINS58 | 1352386 | 37 | WUblastx.64 | (Q9D6W7) 2310047N01RIK | Q9D6W7 | 81% | 57 | 578 |
| | | | | PROTEIN. | | | | |
| HBINS58 | 961712 | 357 | WUblastx.64 | (Q9D6W7) 2310047N01RIK | Q9D6W7 | 80% | 71 | 589 |
| | | | | PROTEIN. | | | | |
| HBINS58 | 892924 | 358 | WUblastx.64 | (Q9D6W7) 2310047N01RIK | Q9D6W7 | 79% | 100 | 579 |
| | | | | PROTEIN. | | | | |
| HBJNC59 | 1125802 | 38 | WUblastx.64 | complement subcomponent C1q chain | pir\|S14350\|C1HUQA | 100% | 66 | 800 |
| | | | | A precursor [validated] - human | | | | |
| HBJNC59 | 899397 | 359 | HMMER 2.1.1 | PFAM: Collagen triple helix repeat (20 | PF01391 | 30.1 | 144 | 245 |
| | | | | copies) | | | | |
| | | | WUblastx.64 | (Q9H2L7) DC33. | Q9H2L7 | 79% | 77 | 907 |
| HBJNC59 | 902207 | 360 | HMMER 2.1.1 | PFAM: C1q domain | PF00386 | 250.2 | 409 | 786 |
| | | | WUblastx.64 | complement subcomponent C1q chain | pir\|S14350\|C1HUQA | 100% | 64 | 798 |
| | | | | A precursor [validated] - human | | | | |
| HBOEG69 | 793786 | 40 | WUblastx.64 | (Q9NS11) LIPOPOLYSACCHARIDE | Q9NS11 | 71% | 424 | 314 |
| | | | | SPECIFIC RESPONSE-68 PROTEIN. | | 100% | 345 | 196 |
| HCACU58 | 625923 | 41 | WUblastx.64 | (Q9NX85) CDNA FLJ20378 FIS, | Q9NX85 | 69% | 548 | 820 |
| | | | | CLONE KAIA0536. | | | | |
| HCE2F54 | 634016 | 42 | HMMER 2.1.1 | PFAM: Histone-like transcription factor | PF00808 | 19 | 868 | 1005 |
| | | | | (CBF/NF-Y) and archaeal histone | | | | |
| | | | WUblastx.64 | (AAH07642) Unknown (protein for | AAH07642 | 82% | 298 | 1122 |
| | | | | IMAGE: 3534358) (Fra | | | | |
| HCE3G69 | 728432 | 43 | WUblastx.64 | (Q9H0K7) HYPOTHETICAL 12.4 KDA | Q9H0K7 | 100% | 1294 | 1647 |
| | | | | PROTEIN (UNKNOWN) | | | | |
| | | | | (PROTEIN FOR MGC: 303 | | | | |
| HCE3G69 | 494346 | 361 | WUblastx.64 | (Q9H0K7) HYPOTHETICAL 12.4 KDA | Q9H0K7 | 100% | 1295 | 1648 |
| | | | | PROTEIN (UNKNOWN) | | | | |
| | | | | (PROTEIN FOR MGC: 303 | | | | |
| HCE5F43 | 612796 | 44 | WUblastx.64 | (Q9H8M7) CDNA FLJ13397 FIS, | Q9H8M7 | 100% | 9 | 53 |
| | | | | CLONE PLACE1001351. | | 100% | 56 | 928 |
| HCEFB80 | 1143407 | 45 | WUblastx.64 | (Q96FR3) Unknown (protein for | Q96FR3 | 100% | 1785 | 1979 |
| | | | | MGC: 18083). | | | | |
| HCEFB80 | 1046853 | 362 | WUblastx.64 | (Q96FR3) Unknown (protein for | Q96FR3 | 100% | 1777 | 1971 |
| | | | | MGC: 18083). | | | | |
| HCEWE20 | 543370 | 47 | WUblastx.64 | (Q9P1J1) PRO1546. | Q9P1J1 | 76% | 501 | 551 |
| | | | | | | 79% | 601 | 717 |
| HCGMD59 | 636078 | 49 | WUblastx.64 | catalase (EC 1.11.1.6) - Campylobacter | pir\|I40767\|I40767 | 97% | 296 | 186 |
| | | | | jejuni | | | | |
| HCHNF25 | 1352270 | 50 | WUblastx.64 | (AAL76113) Androgen-induced basic | AAL76113 | 99% | 3069 | 2188 |
| | | | | leucine zipper. | | 64% | 3371 | 2811 |
| | | | | | | 24% | 622 | 425 |
| HCHNF25 | 658672 | 363 | WUblastx.64 | (AAH00499) Jumping translocation | AAH00499 | 91% | 180 | 620 |
| | | | | breakpoint. | | | | |
| HCNDR47 | 1016919 | 51 | WUblastx.64 | (BAB84904) FLJ00149 protein | BAB84904 | 93% | 969 | 1154 |
| | | | | (Fragment). | | 42% | 180 | 263 |
| HCNDR47 | 863677 | 364 | WUblastx.64 | (Q24333) ELASTIN LIKE PROTEIN | Q24333 | 57% | 42 | 197 |
| | | | | (FRAGMENT). | | | | |
| HCNDR47 | 874128 | 365 | WUblastx.64 | (BAB84904) FLJ00149 protein | BAB84904 | 93% | 148 | 333 |
| | | | | (Fragment). | | | | |
| HCNSM70 | 637547 | 53 | HMMER 2.1.1 | PFAM: Immunoglobulin domain | PF00047 | 32 | 224 | 481 |
| | | | WUblastx.64 | (O60487) EPITHELIAL V-LIKE | O60487 | 98% | 107 | 751 |
| | | | | ANTIGEN PRECURSOR | | | | |
| | | | | (EPITHELIAL V-LIKE ANTIG | | | | |
| HCNSM70 | 589445 | 366 | WUblastx.64 | (O60487) EPITHELIAL V-LIKE | O60487 | 100% | 161 | 409 |
| | | | | ANTIGEN PRECURSOR | | 99% | 408 | 806 |
| | | | | (EPITHELIAL V-LIKE ANTIG | | | | |
| HCUCK44 | 720291 | 54 | WUblastx.64 | hypothetical protein DKFZp564J157.1 - | pir\|T34520\|T34520 | 97% | 21 | 524 |
| | | | | human (fragment) | | | | |
| HCUEO60 | 499242 | 55 | WUblastx.64 | (Q96MM0) CDNA FLJ32172 fis, clone | Q96MM0 | 79% | 1043 | 972 |
| | | | | PLACE6000555. | | 72% | 1222 | 1028 |
| HCUHK65 | 651313 | 56 | WUblastx.64 | (Q9H3W5) HYPOTHETICAL 79.4 KDA | Q9H3W5 | 100% | 11 | 316 |
| | | | | PROTEIN. | | | | |
| HCUHK65 | 880178 | 367 | HMMER 2.1.1 | PFAM: Leucine Rich Repeat | PF00560 | 92.1 | 1190 | 1261 |
| | | | WUblastx.64 | (Q9H3W5) HYPOTHETICAL 79.4 KDA | Q9H3W5 | 100% | 770 | 2893 |
| | | | | PROTEIN. | | | | |
| HCWDS72 | 707833 | 58 | WUblastx.64 | conserved hypothetical protein PA1527 | pir\|D83454\|D83454 | 77% | 318 | 4 |
| | | | | [imported] - Pseudomonas aeruginosa | | | | |
| | | | | (strain PAO1) | | | | |
| HCWGU37 | 1042325 | 59 | WUblastx.64 | (O60448) NEURONAL THREAD | O60448 | 43% | 2724 | 2371 |
| | | | | PROTEIN AD7C-NTP. | | 75% | 2373 | 2326 |
| | | | | | | 63% | 2776 | 2447 |
| | | | | | | 65% | 2758 | 2579 |
| HCWKC15 | 553621 | 60 | WUblastx.64 | (Q9NX85) CDNA FLJ20378 FIS, | Q9NX85 | 77% | 538 | 419 |
| | | | | CLONE KAIA0536. | | 56% | 710 | 663 |
| | | | | | | 63% | 708 | 532 |
| HDHEB60 | 499233 | 62 | WUblastx.64 | (Q9Y5Y5) PEROXISOMAL | Q9Y5Y5 | 81% | 277 | 1284 |
| | | | | BIOGENESIS FACTOR 16. | | | | |
| HDLAC10 | 692299 | 63 | WUblastx.64 | (Q9UBJ4) TRANSPOSASE-LIKE | Q9UBJ4 | 99% | 29 | 1378 |
| | | | | PROTEIN. | | | | |
| HDPBA28 | 1062783 | 64 | WUblastx.64 | (Q9UKY2) ADIPOCYTE-DERIVED | Q9UKY2 | 99% | 259 | 3081 |
| | | | | LEUCINE AMINOPEPTIDASE. | | | | |
| HDPBA28 | 866429 | 369 | HMMER 2.1.1 | PFAM: Peptidase family M1 | PF01433 | 613.6 | 228 | 1391 |
| | | | WUblastx.64 | (Q9UKY2) ADIPOCYTE-DERIVED | Q9UKY2 | 99% | 69 | 2891 |
| | | | | LEUCINE AMINOPEPTIDASE. | | | | |
| HDPBQ71 | 1160316 | 65 | WUblastx.64 | (Q9BRE2) HYPOTHETICAL 68.4 KDA | Q9BRE2 | 100% | 90 | 1928 |
| | | | | PROTEIN (FRAGMENT). | | | | |
| HDPBQ71 | 727200 | 370 | WUblastx.64 | (Q9BRE2) HYPOTHETICAL 68.4 KDA | Q9BRE2 | 99% | 21 | 1859 |
| | | | | PROTEIN (FRAGMENT). | | | | |
| HDPBQ71 | 886067 | 371 | WUblastx.64 | (Q9H2V9) CDA08. | Q9H2V9 | 100% | 1532 | 1999 |
| | | | | | | 65% | 169 | 264 |
| | | | | | | 44% | 182 | 322 |
| | | | | | | 21% | 1456 | 1551 |
| | | | | | | 93% | 186 | 1541 |
| HDPCL63 | 1019008 | 66 | WUblastx.64 | (Q9Y519) HYPOTHETICAL 42.3 KDA | Q9Y519 | 99% | 14 | 835 |
| | | | | PROTEIN. | | | | |
| HDPCL63 | 847045 | 372 | WUblastx.64 | (Q9Y519) HYPOTHETICAL 42.3 KDA | Q9Y519 | 97% | 2 | 730 |
| | | | | PROTEIN. | | | | |
| HDPFF39 | 588697 | 68 | WUblastx.64 | (O96005) CLEFT LIP AND PALATE | O96005 | 100% | 3 | 29 |
| | | | | TRANSMEMBRANE PROTEIN 1. | | 100% | 97 | 762 |
| HDPGT01 | 771583 | 71 | WUblastx.64 | (Q9Y2B3) LCAT-LIKE PROTEIN | Q9Y2B3 | 100% | 8 | 262 |
| | | | | (LLPL). | | 100% | 264 | 1244 |
| HDPJM30 | 879325 | 73 | WUblastx.64 | (O94759) LONG TRANSIENT | TRL2_HUMAN | 99% | 17 | 1633 |
| | | | | RECEPTOR POTENTIAL CHANNEL | | | | |
| | | | | 2 (LTRPC | | | | |
| HDPJM30 | 603517 | 374 | WUblastx.64 | (O94759) LONG TRANSIENT | TRL2_HUMAN | 89% | 416 | 1312 |
| | | | | RECEPTOR POTENTIAL CHANNEL | | 96% | 378 | 530 |
| | | | | 2 (LTRPC | | 98% | 1 | 378 |
| HDPMM88 | 972734 | 74 | HMMER 2.1.1 | PFAM: E1-E2 ATPase | PF00122 | 31 | 475 | 543 |
| | | | WUblastx.64 | (P98198) POTENTIAL | ATID_HUMAN | 68% | 106 | 2907 |
| | | | | PHOSPHOLIPID-TRANSPORTING | | 32% | 2917 | 2991 |
| | | | | ATPASE ID (EC | | | | |
| HDPMM88 | 906121 | 375 | WUblastx.64 | (Q96NQ7) CDNA FLJ30324 fis, clone | Q96NQ7 | 50% | 356 | 403 |
| | | | | BRACE2007138, weakly similar to | | 76% | 3 | 365 |
| | | | | PRO | | | | |
| HDPMM88 | 902299 | 376 | WUblastx.64 | (P98199) POTENTIAL | ATID_MOUSE | 73% | 2 | 172 |
| | | | | PHOSPHOLIPID-TRANSPORTING | | | | |
| | | | | ATPASE ID (EC | | | | |
| HDPMM88 | 885059 | 377 | WUblastx.64 | (AAH07837) Unknown (protein for | AAH07837 | 75% | 63 | 16 |
| | | | | IMAGE: 4111596) (Fra | | 69% | 598 | 62 |
| HDPMM88 | 874074 | 378 | WUblastx.64 | (P98198) POTENTIAL | ATID_HUMAN | 65% | 1023 | 1 |
| | | | | PHOSPHOLIPID-TRANSPORTING | | | | |
| | | | | ATPASE ID (EC | | | | |
| HDPNC61 | 637585 | 75 | WUblastx.64 | (Q8WY51) HC6. | Q8WY51 | 52% | 654 | 827 |
| | | | | | | 64% | 37 | 78 |
| HDPOJ08 | 731863 | 76 | WUblastx.64 | (Q9H7X1) CDNA FLJ14153 FIS, | Q9H7X1 | 84% | 524 | 904 |
| | | | | CLONE NT2RM1000092, WEAKLY | | 30% | 315 | 479 |
| | | | | SIMILAR TO MUL | | 99% | 12 | 524 |
| HDPOZ56 | 1352319 | 77 | WUblastx.64 | (BAB84923) FLJ00168 protein | BAB84923 | 100% | 28 | 1791 |
| | | | | (Fragment). | | | | |
| HDPOZ56 | 815653 | 381 | HMMER 2.1.1 | PFAM: Flavin containing amine | PF01593 | 431.1 | 307 | 1614 |
| | | | | oxidase | | | | |
| | | | WUblastx.64 | (BAB84923) FLJ00168 protein | BAB84923 | 99% | 40 | 1800 |
| | | | | (Fragment). | | | | |
| HDPOZ56 | 743479 | 382 | HMMER 2.1.1 | PFAM: Flavin containing amine | PF01593 | 185.2 | 200 | 949 |
| | | | | oxidase | | | | |
| | | | WUblastx.64 | (BAB84923) FLJ00168 protein | BAB84923 | 98% | 197 | 958 |
| | | | | (Fragment). | | 99% | 952 | 1647 |
| | | | | | | 100% | 2 | 202 |
| HDPPN86 | 1037893 | 78 | WUblastx.64 | (Q9BVN4) HYPOTHETICAL 59.4 KDA | Q9BVN4 | 77% | 5063 | 5194 |
| | | | | PROTEIN. | | 100% | 919 | 1308 |
| | | | | | | 97% | 1942 | 2175 |
| | | | | | | 42% | 4835 | 4891 |
| | | | | | | 47% | 4983 | 5045 |
| | | | | | | 98% | 4611 | 4799 |
| HDPPN86 | 895711 | 383 | WUblastx.64 | (Q9BVN4) HYPOTHETICAL 59.4 KDA | Q9BVN4 | 98% | 909 | 1817 |
| | | | | PROTEIN. | | | | |
| HDPSB18 | 1043263 | 79 | WUblastx.64 | (Q9NX17) CDNA FLJ20489 FIS, | Q9NX17 | 66% | 3407 | 3150 |
| | | | | CLONE KAT08285. | | 46% | 2573 | 2478 |
| HDPSB18 | 732097 | 386 | WUblastx.64 | (Q9NX17) CDNA FLJ20489 FIS, | Q9NX17 | 41% | 863 | 789 |
| | | | | CLONE KAT08285. | | 66% | 813 | 556 |
| HDPSH53 | 1309174 | 80 | WUblastx.64 | (Q9EPY0) CASPASE | Q9EPY0 | 59% | 262 | 456 |
| | | | | RECRUITMENT DOMAIN PROTEIN | | 88% | 1023 | 1184 |
| | | | | 9. | | | | |
| HDPSH53 | 1040056 | 387 | WUblastx.64 | (Q9H257) CASPASE RECRUITMENT | Q9H257 | 100% | 1131 | 1184 |
| | | | | DOMAIN PROTEIN 9. | | 92% | 301 | 423 |
| | | | | | | 25% | 1518 | 1610 |
| | | | | | | 100% | 1010 | 1129 |
| HDPSH53 | 882768 | 388 | WUblastx.64 | (AAH08877) Caspase recruitment | AAH08877 | 98% | 316 | 480 |
| | | | | domain protein 9. | | | | |
| HDPSP01 | 1352280 | 81 | WUblastx.64 | (Q9BR97) UNKNOWN (PROTEIN | Q9BR97 | 93% | 1671 | 1718 |
| | | | | FOR MGC: 10763). | | 94% | 184 | 1674 |
| | | | | | | 41% | 2196 | 2276 |
| HDPSP01 | 689129 | 389 | WUblastx.64 | (Q9BR97) UNKNOWN (PROTEIN | Q9BR97 | 90% | 227 | 1114 |
| | | | | FOR MGC: 10763). | | 98% | 1078 | 1668 |
| | | | | | | 100% | 1664 | 1744 |
| HDPSP54 | 744440 | 82 | WUblastx.64 | (BAB85063) CDNA FLJ23790 fis, | BAB85063 | 99% | 2 | 307 |
| | | | | clone HEP21466. | | | | |
| HDPTD15 | 692917 | 83 | WUblastx.64 | (Q9BU29) UNKNOWN (PROTEIN | Q9BU29 | 97% | 937 | 833 |
| | | | | FOR IMAGE: 3954899) | | | | |
| | | | | (FRAGMENT). | | | | |
| HDPUW68 | 812737 | 84 | HMMER 2.1.1 | PFAM: Immunoglobulin domain | PF00047 | 38.9 | 844 | 1005 |
| | | | WUblastx.64 | (Q9Y286) QA79 MEMBRANE | Q9Y286 | 100% | 40 | 1440 |
| | | | | PROTEIN, ALLELIC VARIANT | | | | |
| | | | | AIRM-IB PRECURSOR. | | | | |
| HDPWN93 | 992925 | 85 | WUblastx.64 | (AAH25255) Similar to hypothetical | AAH25255 | 99% | 45 | 2450 |
| | | | | protein FLJ21347 | | | | |
| HDPWN93 | 887914 | 391 | WUblastx.64 | (AAH25255) Similar to hypothetical | AAH25255 | 97% | 35 | 661 |
| | | | | protein FLJ21347 | | 68% | 619 | 714 |
| HDPWN93 | 905983 | 392 | WUblastx.64 | (Q9H747) CDNA: FLJ21347 FIS, | Q9H747 | 68% | 27 | 155 |
| | | | | CLONE COL02724. | | 99% | 205 | 2487 |
| HDPXY01 | 879048 | 86 | WUblastx.64 | hypothetical protein DKFZp434A139.1 - | pir\|T43490\|T43490 | 93% | 3 | 743 |
| | | | | human (fragments) | | | | |
| HDPXY01 | 904768 | 393 | WUblastx.64 | hypothetical protein DKFZp434A139.1 - | pir\|T43490\|T43490 | 97% | 10 | 921 |
| | | | | human (fragments) | | | | |
| HDPXY01 | 895715 | 395 | WUblastx.64 | (O93251) ALPHA 1 TYPE I | O93251 | 29% | 643 | 1419 |
| | | | | COLLAGEN. | | 35% | 268 | 447 |
| HDTBD53 | 972757 | 87 | WUblastx.64 | (Q9BTV4) UNKNOWN (PROTEIN | Q9BTV4 | 100% | 183 | 1382 |
| | | | | FOR MGC: 3222). | | | | |
| HDTBD53 | 906342 | 396 | WUblastx.64 | (Q9BTV4) UNKNOWN (PROTEIN | Q9BTV4 | 99% | 187 | 1386 |
| | | | | FOR MGC: 3222). | | | | |
| HDTBV77 | 785879 | 88 | WUblastx.64 | (Q9BT94) UNKNOWN (PROTEIN | Q9BT94 | 99% | 65 | 2137 |
| | | | | FOR MGC: 10848). | | 69% | 2131 | 2169 |
| HDTDQ23 | 1306984 | 89 | WUblastx.64 | calcium-binding protein (clone pMP41) - | pir\|S04970\|S04970 | 100% | 1611 | 1709 |
| | | | | mouse (fragment) | | | | |
| HDTDQ23 | 879009 | 397 | WUblastx.64 | calcium-binding protein (clone pMP41) - | pir\|S04970\|S04970 | 100% | 1623 | 1721 |
| | | | | mouse (fragment) | | | | |
| HDTDQ23 | 751707 | 398 | WUblastx.64 | calcium-binding protein (clone pMP41) - | pir\|S04970\|S04970 | 100% | 1623 | 1721 |
| | | | | mouse (fragment) | | | | |
| HE2DE47 | 619852 | 90 | WUblastx.64 | (Q9NZN8) NOT2P (CCR4-NOT | Q9NZN8 | 99% | 808 | 2427 |
| | | | | TRANSCRIPTION COMPLEX, | | | | |
| | | | | SUBUNIT 2). | | | | |
| HE2NV57 | 740750 | 92 | WUblastx.64 | (Q9UGV6) BK445C9.3 (HIGH- | Q9UGV6 | 31% | 321 | 866 |
| | | | | MOBILITY GROUP (NONHISTONE | | 66% | 71 | 106 |
| | | | | CHROMOSOMAL) PROT | | | | |
| HE2PH36 | 570903 | 93 | WUblastx.64 | (AAH07609) Similar to hypothetical | AAH07609 | 56% | 1359 | 1285 |
| | | | | protein PRO1722. | | 90% | 1524 | 1492 |
| | | | | | | 68% | 1484 | 1353 |
| HE8DS15 | 847060 | 94 | WUblastx.64 | (Q9WVT0) SEVEN | Q9WVT0 | 80% | 1 | 270 |
| | | | | TRANSMEMBRANE RECEPTOR. | | 24% | 48 | 146 |
| | | | | | | 87% | 269 | 985 |
| HE9DG49 | 1299935 | 96 | WUblastx.64 | (Q9NYL4) FK506 BINDING | Q9NYL4 | 100% | 70 | 672 |
| | | | | PROTEIN PRECURSOR. | | | | |
| HE9DG49 | 658678 | 400 | HMMER 2.1.1 | PFAM: FKBP-type peptidyl-prolyl cis- | PF00254 | 91 | 211 | 492 |
| | | | | trans isomerases | | | | |
| | | | WUblastx.64 | (Q9NYL4) FK506 BINDING | Q9NYL4 | 100% | 70 | 672 |
| | | | | PROTEIN PRECURSOR. | | | | |
| HE9DG49 | 382000 | 401 | HMMER 2.1.1 | PFAM: FKBP-type peptidyl-prolyl cis- | PF00254 | 91 | −71 | −352 |
| | | | | trans isomerases | | | | |
| | | | WUblastx.64 | (Q9NYL4) FK506 BINDING | Q9NYL4 | 100% | 578 | 679 |
| | | | | PROTEIN PRECURSOR. | | 86% | 78 | 674 |
| HEBEJ18 | 701802 | 98 | WUblastx.64 | (AAH00573) HSPC163 protein. | AAH00573 | 100% | 51 | 467 |
| HEEAQ11 | 777843 | 99 | HMMER 2.1.1 | PFAM: Cystatin domain | PF00031 | 39.7 | 360 | 638 |
| | | | WUblastx.64 | (Q9H4G1) BA218C14.1 (NOVEL | Q9H4G1 | 100% | 213 | 653 |
| | | | | CYSTATIN FAMILY MEMBER). | | | | |
| HEGAH43 | 532596 | 100 | WUblastx.64 | (Q9H1M5) BA530N10.1 (NOVEL | Q9H1M5 | 100% | 29 | 361 |
| | | | | PROTEIN). | | | | |
| HELHD85 | 847372 | 101 | WUblastx.64 | (Q9N083) UNNAMED PORTEIN | Q9N083 | 52% | 1715 | 1653 |
| | | | | PRODUCT. | | 53% | 1648 | 1559 |
| | | | | | | 67% | 1881 | 1705 |
| HEOMQ63 | 603533 | 102 | WUblastx.64 | (Q9BQM3) DJ842G6.1.1 (NOVEL | Q9BQM3 | 100% | 1036 | 1293 |
| | | | | PROTEIN) (FRAGMENT). | | 100% | 592 | 639 |
| | | | | | | 99% | 635 | 937 |
| HEPAA46 | 596830 | 103 | WUblastx.64 | (Q96PH6) ESC42. | Q96PH6 | 100% | 18 | 386 |
| HFABG18 | 847073 | 105 | WUblastx.64 | (Q9QZE9) TM6P1. | Q9QZE9 | 95% | 53 | 253 |
| | | | | | | 88% | 237 | 797 |
| HFABH95 | 566712 | 106 | WUblastx.64 | (Q9QZH5) PUTATIVE | Q9QZH5 | 88% | 513 | 944 |
| | | | | PHOSPHATE/PHOSPHOENOLPYRUVATE | | 65% | 9 | 77 |
| | | | | TRANSLOCATOR. | | | | |
| HFAEF57 | 534142 | 107 | WUblastx.64 | (Q9HBN2) HYPOTHETICAL 15.8 KDA | Q9HBN2 | 47% | 601 | 425 |
| | | | | PROTEIN. | | | | |
| HFCCQ50 | 579993 | 109 | HMMER 2.1.1 | PFAM: Galactosyltransferase | PF01762 | 130.8 | 365 | 1042 |
| | | | WUblastx.64 | (Q9C0J1) BETA-1,3-N- | Q9C0J1 | 95% | 35 | 1102 |
| | | | | ACETYLGLUCOSAMINYLTRANSFERASE | | | | |
| | | | | BGN-T4. | | | | |
| HFCEB37 | 411345 | 110 | WUblastx.64 | (Q9NYC6) NEURONAL SPECIFIC | Q9NYC6 | 94% | 4 | 204 |
| | | | | TRANSCRIPTION FACTOR DAT1. | | | | |
| HFFAL36 | 560639 | 112 | WUblastx.64 | (O75525) T-STAR. | O75525 | 100% | 568 | 657 |
| HFGAD82 | 513669 | 113 | WUblastx.64 | membrane glycoprotein M6 - mouse | pir\|I78556\|I78556 | 92% | 249 | 410 |
| HFIUR10 | 532060 | 114 | WUblastx.64 | (AAK55521) PRO0764. | AAK55521 | 47% | 369 | 307 |
| | | | | | | 75% | 497 | 411 |
| HFTBM50 | 545012 | 115 | WUblastx.64 | (Q9H8P0) CDNA FLJ13352 FIS, | Q9H8P0 | 100% | 23 | 229 |
| | | | | CLONE OVARC1002165, WEAKLY | | 91% | 198 | 524 |
| | | | | SIMILAR TO 3-O | | | | |
| HFVAB79 | 1300736 | 117 | WUblastx.64 | (Q9BX93) GROUP XIII SECRETED | Q9BX93 | 100% | 133 | 714 |
| | | | | PHOSPHOLIPASE A2. | | | | |
| HFVAB79 | 565076 | 403 | WUblastx.64 | (Q9BX93) GROUP XIII SECRETED | Q9BX93 | 100% | 139 | 720 |
| | | | | PHOSPHOLIPASE A2. | | | | |
| HFXJX44 | 701988 | 121 | WUblastx.64 | (Q9N083) UNNAMED PORTEIN | Q9N083 | 57% | 1378 | 1082 |
| | | | | PRODUCT. | | | | |
| HFXKJ03 | 505207 | 122 | WUblastx.64 | (O62658) LINE-1 ELEMENT ORF2. | O62658 | 34% | 492 | 292 |
| | | | | | | 36% | 920 | 525 |
| HFXKT05 | 658690 | 123 | WUblastx.64 | (Q9H5H7) CDNA: FLJ23425 FIS, | Q9H5H7 | 81% | 5 | 1015 |
| | | | | CLONE HEP22862. | | | | |
| HGBHI35 | 570262 | 124 | HMMER 2.1.1 | PFAM: Enoyl-CoA | PF00378 | 184.6 | 213 | 722 |
| | | | | hydratase/isomerase family | | | | |
| | | | WUblastx.64 | (AAH25104) Similar to RIKEN cDNA | AAH25104 | 91% | 225 | 962 |
| | | | | 1300017C12 gene. | | | | |
| HGBIB74 | 837220 | 125 | WUblastx.64 | hypothetical protein ZK858.6 - | pir\|T28058\|T28058 | 50% | 1387 | 1494 |
| | | | | Caenorhabditis elegans | | 51% | 2 | 439 |
| | | | | | | 65% | 482 | 730 |
| | | | | | | 62% | 723 | 1403 |
| HGBIB74 | 838602 | 405 | WUblastx.64 | (Q9V3N6) BG: DS00797.1 PROTEIN. | Q9V3N6 | 65% | 736 | 1257 |
| | | | | | | 82% | 537 | 740 |
| | | | | | | 81% | 1251 | 1505 |
| | | | | | | 27% | 223 | 537 |
| | | | | | | 57% | 61 | 474 |
| HGBIB74 | 899864 | 406 | WUblastx.64 | (Q9V3N6) BG: DS00797.1 PROTEIN. | Q9V3N6 | 71% | 12 | 950 |
| HHEPM33 | 877639 | 130 | WUblastx.64 | (Q96BH1) Ring finger protein 25. | Q96BH1 | 97% | 10 | 1230 |
| | | | | | | 100% | 1185 | 1373 |
| HHFBY53 | 821330 | 131 | WUblastx.64 | (Q9LGZ9) GENOMIC DNA, | Q9LGZ9 | 100% | 746 | 868 |
| | | | | CHROMOSOME 3, BAC | | 100% | 745 | 867 |
| | | | | CLONE: F1D9. | | 100% | 744 | 866 |
| | | | | | | 100% | 745 | 867 |
| | | | | | | 100% | 744 | 866 |
| | | | | | | 100% | 745 | 867 |
| | | | | | | 100% | 744 | 866 |
| | | | | | | 100% | 745 | 867 |
| | | | | | | 100% | 744 | 866 |
| | | | | | | 100% | 745 | 867 |
| | | | | | | 100% | 744 | 866 |
| | | | | | | 100% | 745 | 867 |
| | | | | | | 100% | 744 | 866 |
| | | | | | | 100% | 745 | 867 |
| | | | | | | 100% | 744 | 866 |
| | | | | | | 100% | 745 | 867 |
| | | | | | | 100% | 744 | 866 |
| | | | | | | 100% | 745 | 867 |
| | | | | | | 100% | 744 | 866 |
| | | | | | | 100% | 745 | 867 |
| | | | | | | 100% | 744 | 866 |
| | | | | | | 100% | 745 | 867 |
| | | | | | | 100% | 744 | 866 |
| | | | | | | 100% | 745 | 867 |
| | | | | | | 100% | 744 | 866 |
| | | | | | | 100% | 745 | 867 |
| | | | | | | 100% | 744 | 866 |
| | | | | | | 100% | 745 | 867 |
| | | | | | | 100% | 744 | 866 |
| | | | | | | 100% | 745 | 867 |
| | | | | | | 100% | 744 | 866 |
| | | | | | | 100% | 745 | 867 |
| | | | | | | 100% | 744 | 866 |
| | | | | | | 100% | 745 | 867 |
| | | | | | | 100% | 744 | 866 |
| | | | | | | 100% | 745 | 867 |
| | | | | | | 100% | 744 | 866 |
| | | | | | | 100% | 745 | 867 |
| | | | | | | 100% | 744 | 866 |
| | | | | | | 100% | 745 | 867 |
| | | | | | | 100% | 744 | 866 |
| | | | | | | 100% | 745 | 867 |
| | | | | | | 100% | 744 | 866 |
| | | | | | | 100% | 745 | 867 |
| | | | | | | 100% | 744 | 866 |
| | | | | | | 100% | 745 | 867 |
| | | | | | | 100% | 744 | 866 |
| | | | | | | 100% | 745 | 867 |
| | | | | | | 100% | 744 | 866 |
| | | | | | | 100% | 745 | 867 |
| | | | | | | 100% | 744 | 866 |
| | | | | | | 100% | 745 | 867 |
| | | | | | | 100% | 744 | 866 |
| | | | | | | 100% | 745 | 867 |
| | | | | | | 100% | 744 | 866 |
| | | | | | | 100% | 745 | 867 |
| | | | | | | 100% | 744 | 866 |
| | | | | | | 100% | 745 | 867 |
| | | | | | | 100% | 744 | 866 |
| | | | | | | 100% | 745 | 867 |
| | | | | | | 100% | 744 | 866 |
| | | | | | | 100% | 745 | 867 |
| | | | | | | 100% | 744 | 866 |
| | | | | | | 100% | 745 | 867 |
| | | | | | | 100% | 744 | 866 |
| | | | | | | 100% | 745 | 867 |
| | | | | | | 100% | 744 | 866 |
| | | | | | | 100% | 745 | 867 |
| | | | | | | 100% | 744 | 866 |
| | | | | | | 100% | 745 | 867 |
| | | | | | | 100% | 744 | 866 |
| | | | | | | 100% | 745 | 867 |
| | | | | | | 100% | 744 | 866 |
| | | | | | | 100% | 745 | 867 |
| | | | | | | 100% | 745 | 867 |
| | | | | | | 100% | 745 | 867 |
| | | | | | | 100% | 744 | 866 |
| | | | | | | 100% | 745 | 867 |
| | | | | | | 100% | 744 | 866 |
| | | | | | | 100% | 745 | 867 |
| | | | | | | 100% | 744 | 866 |
| | | | | | | 100% | 745 | 867 |
| | | | | | | 100% | 744 | 866 |
| | | | | | | 100% | 745 | 867 |
| | | | | | | 100% | 744 | 866 |
| | | | | | | 100% | 745 | 867 |
| | | | | | | 100% | 744 | 866 |
| | | | | | | 100% | 745 | 867 |
| | | | | | | 100% | 744 | 866 |
| | | | | | | 100% | 745 | 867 |
| | | | | | | 100% | 744 | 866 |
| | | | | | | 100% | 745 | 867 |
| | | | | | | 100% | 744 | 866 |
| | | | | | | 100% | 745 | 867 |
| | | | | | | 100% | 744 | 866 |
| | | | | | | 100% | 745 | 867 |
| | | | | | | 100% | 744 | 866 |
| | | | | | | 100% | 745 | 867 |
| | | | | | | 100% | 744 | 866 |
| | | | | | | 100% | 745 | 867 |
| | | | | | | 100% | 744 | 866 |
| | | | | | | 100% | 745 | 867 |
| | | | | | | 100% | 744 | 866 |
| | | | | | | 100% | 745 | 867 |
| | | | | | | 100% | 744 | 866 |
| | | | | | | 100% | 745 | 867 |
| | | | | | | 100% | 744 | 866 |
| | | | | | | 100% | 745 | 867 |
| | | | | | | 100% | 744 | 866 |
| | | | | | | 100% | 745 | 867 |
| | | | | | | 100% | 744 | 866 |
| | | | | | | 100% | 745 | 867 |
| | | | | | | 100% | 744 | 866 |
| | | | | | | 100% | 745 | 867 |
| | | | | | | 100% | 744 | 866 |
| | | | | | | 100% | 745 | 867 |
| | | | | | | 100% | 744 | 866 |
| | | | | | | 100% | 745 | 867 |
| | | | | | | 100% | 744 | 866 |
| | | | | | | 100% | 745 | 867 |
| | | | | | | 100% | 744 | 866 |
| | | | | | | 100% | 745 | 867 |
| | | | | | | 100% | 744 | 866 |
| | | | | | | 100% | 745 | 867 |
| | | | | | | 100% | 744 | 866 |
| | | | | | | 100% | 745 | 867 |
| | | | | | | 100% | 744 | 866 |
| | | | | | | 100% | 745 | 867 |
| | | | | | | 100% | 744 | 866 |
| | | | | | | 100% | 745 | 867 |
| | | | | | | 100% | 744 | 866 |
| | | | | | | 100% | 745 | 867 |
| | | | | | | 100% | 744 | 866 |
| | | | | | | 100% | 745 | 867 |
| | | | | | | 100% | 744 | 866 |
| | | | | | | 100% | 745 | 867 |
| | | | | | | 100% | 744 | 866 |
| | | | | | | 100% | 745 | 866 |
| | | | | | | 100% | 744 | 866 |
| | | | | | | 100% | 744 | 867 |
| | | | | | | 100% | 744 | 866 |
| | | | | | | 100% | 745 | 867 |
| | | | | | | 100% | 744 | 866 |
| | | | | | | 100% | 745 | 867 |
| | | | | | | 100% | 744 | 866 |
| | | | | | | 100% | 745 | 867 |
| | | | | | | 100% | 744 | 866 |
| | | | | | | 100% | 745 | 867 |
| | | | | | | 100% | 744 | 866 |
| | | | | | | 100% | 745 | 867 |
| | | | | | | 100% | 744 | 866 |
| | | | | | | 100% | 745 | 867 |
| | | | | | | 100% | 744 | 866 |
| | | | | | | 100% | 745 | 867 |
| | | | | | | 100% | 744 | 866 |
| | | | | | | 100% | 745 | 867 |
| | | | | | | 100% | 744 | 866 |
| | | | | | | 100% | 745 | 867 |
| | | | | | | 100% | 744 | 866 |
| | | | | | | 100% | 745 | 867 |
| | | | | | | 100% | 744 | 866 |
| | | | | | | 100% | 745 | 867 |
| | | | | | | 100% | 744 | 866 |
| | | | | | | 100% | 745 | 867 |
| | | | | | | 100% | 744 | 866 |
| | | | | | | 100% | 745 | 867 |
| | | | | | | 100% | 744 | 866 |
| | | | | | | 100% | 745 | 867 |
| | | | | | | 100% | 744 | 866 |
| | | | | | | 100% | 745 | 867 |
| | | | | | | 100% | 744 | 866 |
| | | | | | | 100% | 745 | 867 |
| | | | | | | 100% | 744 | 866 |
| | | | | | | 100% | 745 | 867 |
| | | | | | | 100% | 744 | 866 |
| | | | | | | 100% | 745 | 867 |
| | | | | | | 100% | 744 | 866 |
| | | | | | | 100% | 745 | 867 |
| | | | | | | 100% | 744 | 866 |
| | | | | | | 100% | 745 | 867 |
| | | | | | | 100% | 744 | 866 |
| | | | | | | 100% | 745 | 867 |
| | | | | | | 100% | 744 | 866 |
| | | | | | | 100% | 745 | 867 |
| | | | | | | 100% | 744 | 866 |
| | | | | | | 100% | 745 | 867 |
| | | | | | | 100% | 744 | 866 |
| | | | | | | 100% | 745 | 867 |
| | | | | | | 100% | 744 | 866 |
| | | | | | | 100% | 745 | 867 |
| | | | | | | 100% | 744 | 866 |
| | | | | | | 100% | 745 | 867 |
| | | | | | | 100% | 744 | 866 |
| | | | | | | 100% | 745 | 867 |
| | | | | | | 100% | 744 | 866 |
| | | | | | | 100% | 745 | 867 |
| | | | | | | 100% | 744 | 866 |
| | | | | | | 100% | 745 | 867 |
| | | | | | | 100% | 744 | 866 |
| | | | | | | 100% | 745 | 867 |
| | | | | | | 100% | 744 | 866 |
| | | | | | | 100% | 745 | 867 |
| | | | | | | 100% | 744 | 866 |
| | | | | | | 100% | 745 | 867 |
| | | | | | | 100% | 744 | 866 |
| | | | | | | 100% | 745 | 867 |
| | | | | | | 100% | 744 | 866 |
| | | | | | | 100% | 745 | 867 |
| | | | | | | 100% | 744 | 866 |
| | | | | | | 100% | 745 | 867 |
| | | | | | | 100% | 744 | 866 |
| | | | | | | 100% | 745 | 867 |
| | | | | | | 100% | 744 | 866 |
| | | | | | | 100% | 745 | 867 |
| | | | | | | 100% | 744 | 866 |
| | | | | | | 100% | 745 | 867 |
| | | | | | | 100% | 744 | 866 |
| | | | | | | 100% | 745 | 867 |
| | | | | | | 100% | 744 | 866 |
| | | | | | | 100% | 745 | 867 |
| | | | | | | 100% | 744 | 866 |
| | | | | | | 100% | 745 | 867 |
| | | | | | | 100% | 744 | 866 |
| | | | | | | 100% | 745 | 867 |
| | | | | | | 100% | 744 | 866 |
| | | | | | | 100% | 745 | 867 |
| | | | | | | 100% | 744 | 866 |
| | | | | | | 100% | 745 | 867 |
| | | | | | | 100% | 744 | 866 |
| | | | | | | 100% | 745 | 867 |
| | | | | | | 100% | 744 | 866 |
| | | | | | | 100% | 745 | 867 |
| | | | | | | 100% | 744 | 866 |
| | | | | | | 100% | 745 | 867 |
| | | | | | | 100% | 744 | 866 |
| | | | | | | 100% | 745 | 867 |
| | | | | | | 100% | 744 | 866 |
| | | | | | | 100% | 745 | 867 |
| | | | | | | 100% | 744 | 866 |
| | | | | | | 100% | 745 | 867 |
| | | | | | | 100% | 744 | 866 |
| | | | | | | 100% | 745 | 867 |
| | | | | | | 100% | 744 | 866 |
| | | | | | | 100% | 745 | 867 |
| | | | | | | 100% | 744 | 866 |
| | | | | | | 100% | 745 | 867 |
| | | | | | | 100% | 744 | 866 |
| | | | | | | 100% | 745 | 867 |
| | | | | | | 100% | 744 | 866 |
| | | | | | | 100% | 745 | 867 |
| | | | | | | 100% | 744 | 866 |
| | | | | | | 100% | 745 | 867 |
| | | | | | | 100% | 744 | 866 |
| | | | | | | 100% | 745 | 867 |
| | | | | | | 100% | 744 | 866 |
| | | | | | | 100% | 745 | 867 |
| | | | | | | 100% | 744 | 866 |
| | | | | | | 100% | 745 | 867 |
| | | | | | | 100% | 744 | 866 |
| | | | | | | 100% | 745 | 867 |
| | | | | | | 100% | 744 | 866 |
| | | | | | | 100% | 745 | 867 |
| | | | | | | 100% | 744 | 866 |
| | | | | | | 100% | 745 | 867 |
| | | | | | | 100% | 744 | 866 |
| | | | | | | 100% | 745 | 867 |
| | | | | | | 100% | 744 | 866 |
| | | | | | | 100% | 745 | 867 |
| | | | | | | 100% | 744 | 866 |
| | | | | | | 100% | 745 | 867 |
| | | | | | | 100% | 744 | 866 |
| | | | | | | 100% | 745 | 867 |
| | | | | | | 100% | 744 | 866 |
| | | | | | | 100% | 745 | 867 |
| | | | | | | 100% | 744 | 866 |
| | | | | | | 100% | 745 | 867 |
| | | | | | | 100% | 744 | 866 |
| | | | | | | 100% | 745 | 867 |
| | | | | | | 100% | 744 | 866 |
| | | | | | | 100% | 745 | 867 |
| | | | | | | 100% | 744 | 866 |
| | | | | | | 100% | 745 | 867 |
| | | | | | | 100% | 744 | 866 |
| | | | | | | 100% | 745 | 867 |
| | | | | | | 100% | 744 | 866 |
| | | | | | | 100% | 745 | 867 |
| | | | | | | 100% | 744 | 866 |
| | | | | | | 100% | 745 | 867 |
| | | | | | | 100% | 744 | 866 |
| | | | | | | 100% | 745 | 867 |
| | | | | | | 100% | 744 | 866 |
| | | | | | | 100% | 745 | 867 |
| | | | | | | 100% | 744 | 866 |
| | | | | | | 100% | 745 | 867 |
| | | | | | | 100% | 744 | 866 |
| | | | | | | 100% | 745 | 867 |
| | | | | | | 100% | 744 | 866 |
| | | | | | | 100% | 745 | 867 |
| | | | | | | 100% | 744 | 866 |
| | | | | | | 100% | 745 | 867 |
| | | | | | | 100% | 744 | 866 |
| | | | | | | 100% | 745 | 867 |
| | | | | | | 100% | 744 | 866 |
| | | | | | | 100% | 745 | 867 |
| | | | | | | 100% | 744 | 866 |
| | | | | | | 100% | 745 | 867 |
| | | | | | | 100% | 744 | 866 |
| | | | | | | 100% | 745 | 867 |
| | | | | | | 100% | 744 | 866 |
| | | | | | | 100% | 745 | 867 |
| | | | | | | 100% | 744 | 866 |
| | | | | | | 100% | 745 | 867 |
| | | | | | | 100% | 744 | 866 |
| | | | | | | 100% | 745 | 867 |
| | | | | | | 100% | 744 | 866 |
| | | | | | | 100% | 745 | 867 |
| | | | | | | 100% | 744 | 866 |
| | | | | | | 100% | 745 | 867 |
| | | | | | | 100% | 744 | 866 |
| | | | | | | 100% | 745 | 867 |
| | | | | | | 100% | 744 | 866 |
| | | | | | | 100% | 745 | 867 |
| | | | | | | 100% | 744 | 866 |
| | | | | | | 100% | 745 | 867 |
| | | | | | | 100% | 744 | 866 |
| | | | | | | 100% | 745 | 867 |
| | | | | | | 100% | 744 | 866 |
| | | | | | | 100% | 745 | 867 |
| | | | | | | 100% | 744 | 866 |
| | | | | | | 100% | 744 | 866 |
| | | | | | | 100% | 744 | 866 |
| | | | | | | 100% | 745 | 867 |
| | | | | | | 100% | 744 | 866 |
| | | | | | | 100% | 745 | 867 |
| | | | | | | 100% | 744 | 866 |
| | | | | | | 100% | 745 | 867 |
| | | | | | | 100% | 744 | 866 |
| | | | | | | 100% | 745 | 867 |
| | | | | | | 100% | 744 | 866 |
| | | | | | | 100% | 745 | 867 |
| | | | | | | 100% | 744 | 866 |
| | | | | | | 100% | 745 | 867 |
| | | | | | | 100% | 744 | 866 |
| | | | | | | 100% | 745 | 867 |
| | | | | | | 100% | 744 | 866 |
| | | | | | | 100% | 745 | 867 |
| | | | | | | 100% | 744 | 866 |
| | | | | | | 100% | 745 | 867 |
| | | | | | | 100% | 744 | 866 |
| | | | | | | 100% | 745 | 867 |
| | | | | | | 100% | 744 | 866 |
| | | | | | | 100% | 745 | 867 |
| | | | | | | 100% | 744 | 866 |
| | | | | | | 100% | 745 | 867 |
| | | | | | | 100% | 744 | 866 |
| | | | | | | 100% | 745 | 867 |
| | | | | | | 100% | 744 | 866 |
| | | | | | | 100% | 745 | 867 |
| | | | | | | 100% | 744 | 866 |
| | | | | | | 100% | 745 | 867 |
| | | | | | | 100% | 744 | 866 |
| | | | | | | 100% | 745 | 867 |
| | | | | | | 100% | 745 | 867 |
| | | | | | | 100% | 745 | 867 |
| | | | | | | 100% | 744 | 866 |
| | | | | | | 100% | 745 | 867 |
| | | | | | | 100% | 744 | 866 |
| | | | | | | 100% | 745 | 867 |
| | | | | | | 100% | 744 | 866 |
| | | | | | | 100% | 745 | 867 |
| | | | | | | 100% | 744 | 866 |
| | | | | | | 100% | 745 | 867 |
| | | | | | | 100% | 744 | 866 |
| | | | | | | 100% | 745 | 867 |
| | | | | | | 100% | 744 | 866 |
| | | | | | | 100% | 745 | 867 |
| | | | | | | 100% | 744 | 866 |
| | | | | | | 100% | 745 | 867 |
| | | | | | | 100% | 745 | 867 |
| | | | | | | 100% | 745 | 867 |
| | | | | | | 100% | 744 | 866 |
| | | | | | | 100% | 745 | 867 |
| | | | | | | 100% | 744 | 866 |
| | | | | | | 100% | 745 | 867 |
| | | | | | | 100% | 744 | 866 |
| | | | | | | 100% | 745 | 867 |
| | | | | | | 100% | 745 | 867 |
| | | | | | | 100% | 745 | 867 |
| | | | | | | 100% | 744 | 866 |
| | | | | | | 100% | 744 | 866 |
| | | | | | | 100% | 744 | 866 |
| | | | | | | 95% | 745 | 867 |
| | | | | | | 95% | 744 | 866 |
| | | | | | | 89% | 724 | 867 |
| HHFGR93 | 865581 | 132 | WUblastx.64 | (Q96AP7) Hypothetical 41.2 kDa | Q96AP7 | 100% | 132 | 1301 |
| | | | | protein. | | | | |
| HHFGR93 | 691402 | 407 | HMMER 2.1.1 | PFAM: Immunoglobulin domain | PF00047 | 36.3 | 628 | 807 |
| | | | WUblastx.64 | (Q96AP7) Hypothetical 41.2 kDa | Q96AP7 | 98% | 819 | 1298 |
| | | | | protein. | | 99% | 130 | 828 |
| HHGCM76 | 662329 | 134 | WUblastx.64 | (Q96FV2) Unknown (protein for | Q96FV2 | 94% | 7 | 114 |
| | | | | IMAGE: 3945715) (Fragment). | | 98% | 378 | 536 |
| HHGCM76 | 383547 | 408 | WUblastx.64 | (Q96FV2) Unknown (protein for | Q96FV2 | 94% | 7 | 114 |
| | | | | IMAGE: 3945715) (Fragment). | | 98% | 378 | 536 |
| HHPEN62 | 695134 | 137 | HMMER 2.1.1 | PFAM: Peptidase family | PF01546 | 148.9 | 510 | 1535 |
| | | | | M20/M25/M40 | | | | |
| | | | WUblastx.64 | (Q96KN2) Glutamate | Q96KN2 | 99% | 183 | 1706 |
| | | | | carboxypeptidase-like protein 2. | | | | |
| HHPGO40 | 1299927 | 138 | WUblastx.64 | (Q9HBW1) Brain tumor associated | Q9HBW1 | 74% | 191 | 976 |
| | | | | protein NAG14. | | 30% | 338 | 928 |
| HHPGO40 | 753270 | 409 | HMMER 2.1.1 | PFAM: Leucine Rich Repeat | PF00560 | 122 | 542 | 613 |
| | | | WUblastx.64 | (Q9HBW1) Brain tumor associated | Q9HBW1 | 74% | 191 | 967 |
| | | | | protein NAG14. | | 30% | 338 | 928 |
| HHPGO40 | 560969 | 410 | HMMER 2.1.1 | PFAM: Leucine Rich Repeat | PF00560 | 77 | 548 | 619 |
| | | | WUblastx.64 | (Q9HBW1) Brain tumor associated | Q9HBW1 | 71% | 739 | 984 |
| | | | | protein NAG14. | | 31% | 691 | 933 |
| | | | | | | 74% | 197 | 754 |
| HILCF66 | 636025 | 140 | WUblastx.64 | (Q9CWZ1) 2400006A19RIK | Q9CWZ1 | 100% | 1435 | 1530 |
| | | | | PROTEIN. | | 96% | 1243 | 1323 |
| HJABB94 | 456466 | 141 | WUblastx.64 | (Q9BWV3) PROTEIN KINASE NYDSP15. | Q9BWV3 | 100% | 8 | 250 |
| | | | | | | 38% | 1127 | 1192 |
| | | | | | | 94% | 1227 | 1523 |
| HJACG02 | 1307789 | 142 | WUblastx.64 | (Q9HD89) CYSTEINE-RICH | Q9HD89 | 100% | 66 | 389 |
| | | | | SECRETED PROTEIN (C/EBP- | | | | |
| | | | | EPSILON REGULATED MYEL | | | | |
| HJACG02 | 509948 | 411 | WUblastx.64 | (Q9HD89) CYSTEINE-RICH | Q9HD89 | 100% | 47 | 370 |
| | | | | SECRETED PROTEIN (C/EBP- | | | | |
| | | | | EPSILON REGULATED MYEL | | | | |
| HJACG30 | 895505 | 143 | WUblastx.64 | (Q9UM21) UDP-GLCNAC: A-1, 3-D- | Q9UM21 | 96% | 291 | 389 |
| | | | | MANNOSIDE B-1,4-N- | | | | |
| | | | | ACETYLGLUCOSAMINYLTRANS | | | | |
| HJACG30 | 774300 | 413 | WUblastx.64 | (Q9D399) 6330415B21RIK PROTEIN. | Q9D399 | 80% | 220 | 297 |
| HJBCY35 | 719729 | 144 | WUblastx.64 | hypothetical protein DKFZp586J0619.1 - | pir\|T08758\|T08758 | 100% | 1 | 1212 |
| | | | | human (fragment) | | | | |
| HJMBM38 | 545752 | 146 | WUblastx.64 | (Q9CS66) 5730496N17RIK PROTEIN | Q9CS66 | 83% | 3 | 722 |
| | | | | (FRAGMENT). | | | | |
| HJPAD75 | 651337 | 147 | WUblastx.64 | (Q9H5F8) CDNA: FLJ23476 FIS, | Q9H5F8 | 98% | 8 | 232 |
| | | | | CLONE HSI14935. | | | | |
| HJPCP42 | 852573 | 415 | WUblastx.64 | (Q9VL06) CG5604 PROTEIN. | Q9VL06 | 54% | 19 | 315 |
| HJPCP42 | 824612 | 416 | WUblastx.64 | cut1 protein - fission yeast | pir\|A35694\|A35694 | 42% | 7 | 201 |
| | | | | (Schizosaccharomyces pombe) | | | | |
| HKABZ65 | 862030 | 150 | WUblastx.64 | (Q96LB9) Peptidoglycan recognition | Q96LB9 | 99% | 77 | 802 |
| | | | | protein-1-alpha precursor. | | 45% | 137 | 541 |
| HKABZ65 | 665424 | 417 | WUblastx.64 | (Q96LB9) Peptidoglycan recognition | Q96LB9 | 99% | 69 | 794 |
| | | | | protein-1-alpha precursor. | | 45% | 129 | 533 |
| HKACB56 | 554616 | 151 | HMMER 2.1.1 | PFAM: Kazal-type serine protease | PF00050 | 76.3 | 114 | 266 |
| | | | | inhibitor domain | | | | |
| | | | WUblastx.64 | (P01001) ACROSIN INHIBITORS IIA | IAC2_BOVIN | 82% | 96 | 266 |
| | | | | AND IIB (BUSI-II). | | | | |
| HKACD58 | 1352202 | 152 | WUblastx.64 | (Q96BH2) Hypothetical 34.4 kDa | Q96BH2 | 86% | 786 | 1199 |
| | | | | protein. | | 28% | 46 | 186 |
| | | | | | | 100% | 125 | 715 |
| HKACD58 | 552465 | 418 | WUblastx.64 | (Q96BH2) Hypothetical 34.4 kDa | Q96BH2 | 86% | 795 | 1208 |
| | | | | protein. | | 28% | 43 | 183 |
| | | | | | | 88% | 122 | 724 |
| HKAEV06 | 1352263 | 154 | WUblastx.64 | (Q9NVA4) CDNA FLJ10846 FIS, | Q9NVA4 | 99% | 501 | 1814 |
| | | | | CLONE NT2RP4001373. | | | | |
| HKAEV06 | 638238 | 419 | WUblastx.64 | (Q9NVA4) CDNA FLJ10846 FIS, | Q9NVA4 | 96% | 367 | 459 |
| | | | | CLONE NT2RP4001373. | | 100% | 197 | 367 |
| | | | | | | 96% | 480 | 1541 |
| HKAFT66 | 946512 | 155 | WUblastx.64 | (Q9CPS2) 4933428I03RIK PROTEIN. | Q9CPS2 | 72% | 29 | 61 |
| | | | | | | 64% | 61 | 231 |
| | | | | | | 84% | 274 | 828 |
| HKAFT66 | 889258 | 420 | WUblastx.64 | (Q9CPS2) 4933428I03RIK PROTEIN. | Q9CPS2 | 72% | 29 | 61 |
| | | | | | | 64% | 61 | 231 |
| | | | | | | 83% | 274 | 828 |
| HKAFT66 | 904790 | 421 | WUblastx.64 | (Q9CPS2) 4933428I03RIK PROTEIN. | Q9CPS2 | 80% | 298 | 555 |
| | | | | | | 84% | 12 | 314 |
| HKBIE57 | 876571 | 156 | HMMER 2.1.1 | PFAM: Uncharacterized protein family | PF00919 | 320.5 | 178 | 843 |
| | | | | UPF0004 | | | | |
| | | | WUblastx.64 | (Q9BWZ5) DJ1187J4.4 (CGI-05 | Q9BWZ5 | 99% | 1 | 879 |
| | | | | PROTEIN (LOC51654) SIMILAR TO | | | | |
| | | | | RAT CDK5 AC | | | | |
| HKBIE57 | 654871 | 422 | WUblastx.64 | (Q9BVG6) SIMILAR TO CGI-05 | Q9BVG6 | 90% | 78 | 167 |
| | | | | PROTEIN. | | | | |
| HKFBC53 | 1352286 | 157 | WUblastx.64 | hypothetical protein F16H11.1 - | pir\|T16084\|T16084 | 39% | 46 | 1410 |
| | | | | Caenorhabditis elegans | | | | |
| HKFBC53 | 701893 | 423 | WUblastx.64 | hypothetical protein F16H11.1 - | pir\|T16084\|T16084 | 45% | 132 | 305 |
| | | | | Caenorhabditis elegans | | 59% | 11 | 106 |
| | | | | | | 50% | 82 | 129 |
| | | | | | | 37% | 566 | 673 |
| | | | | | | 37% | 293 | 1366 |
| HKFBC53 | 513190 | 424 | WUblastx.64 | hypothetical protein F16H11.1 - | pir\|T16084\|T16084 | 35% | 135 | 902 |
| | | | | Caenorhabditis elegans | | | | |
| HKFBC53 | 383426 | 425 | WUblastx.64 | hypothetical protein F16H11.1 - | pir\|T16084\|T16084 | 38% | 704 | 949 |
| | | | | Caenorhabditis elegans | | 32% | 135 | 713 |
| HKGDL36 | 877489 | 158 | WUblastx.64 | (Q9UHG2) PROSAAS PRECURSOR | Q9UHG2 | 99% | 53 | 832 |
| | | | | (GRANIN-LIKE | | | | |
| | | | | NEUROENDOCRINE PEPTIDE | | | | |
| | | | | PRECUR | | | | |
| HKGDL36 | 704088 | 426 | WUblastx.64 | (Q9UHG2) PROSAAS PRECURSOR | Q9UHG2 | 82% | 99 | 830 |
| | | | | (GRANIN-LIKE | | 49% | 55 | 555 |
| | | | | NEUROENDOCRINE PEPTIDE | | | | |
| | | | | PRECUR | | | | |
| HKISB57 | 625956 | 159 | WUblastx.64 | (Q8WWW1) Smoothelin-B3. | Q8WWW1 | 28% | 262 | 582 |
| | | | | | | 100% | 201 | 1013 |
| | | | | | | 98% | 1107 | 1256 |
| | | | | | | 27% | 271 | 480 |
| | | | | | | 26% | 532 | 966 |
| | | | | | | 44% | 954 | 1052 |
| HKMLM11 | 514788 | 160 | WUblastx.64 | (Q9P059) HSPC323 (FRAGMENT). | Q9P059 | 71% | 332 | 562 |
| | | | | | | 85% | 148 | 462 |
| HKMLP68 | 1037919 | 161 | WUblastx.64 | (Q8VD01) Hypothetical 61.8 kDa | Q8VD01 | 49% | 8 | 586 |
| | | | | protein. | | | | |
| HKMLP68 | 880047 | 427 | WUblastx.64 | (Q8VD01) Hypothetical 61.8 kDa | Q8VD01 | 49% | 31 | 609 |
| | | | | protein. | | | | |
| HKMMW74 | 581399 | 163 | WUblastx.64 | (Q8WY51) HC6. | Q8WY51 | 73% | 1784 | 1662 |
| HKMND01 | 527402 | 164 | WUblastx.64 | (Q9H3C0) PRO0898. | Q9H3C0 | 83% | 867 | 757 |
| HLDBE54 | 836041 | 165 | WUblastx.64 | (Q9NR71) MITOCHONDRIAL | Q9NR71 | 98% | 212 | 1051 |
| | | | | CERAMIDASE. | | | | |
| HLDBE54 | 600362 | 429 | WUblastx.64 | (Q9JHE3) NERUTAL CERAMIDASE | Q9JHE3 | 45% | 332 | 397 |
| | | | | (NEUTRAL CERAMIDASE). | | 72% | 130 | 306 |
| | | | | | | 78% | 375 | 1028 |
| HLDBE54 | 800678 | 430 | HMMER 2.1.1 | PFAM: Renal dipeptidase | PF01244 | 466.8 | 352 | 1410 |
| | | | WUblastx.64 | (Q9H4A9) PUTATIVE | Q9H4A9 | 100% | 133 | 1590 |
| | | | | DIPEPTIDASE. | | | | |
| HLDBX13 | 815665 | 166 | WUblastx.64 | (Q9H387) PRO2550. | Q9H387 | 76% | 1764 | 1681 |
| | | | | | | 60% | 1815 | 1756 |
| HLDQC46 | 847397 | 168 | WUblastx.64 | (Q9BXJ8) TRANSMEMBRANE | Q9BXJ8 | 100% | 28 | 423 |
| | | | | PROTEIN INDUCED BY TUMOR | | | | |
| | | | | NECROSIS FACTOR ALPHA | | | | |
| HLDQR62 | 753742 | 169 | WUblastx.64 | (Q9NQW2) PROGRESSIVE | Q9NQW2 | 100% | 41 | 382 |
| | | | | ANKYLOSIS-LIKE PROTEIN. | | 99% | 376 | 1002 |
| HLDQU79 | 740755 | 170 | WUblastx.64 | (O75477) KE04P. | O75477 | 100% | 105 | 1142 |
| HLDRM43 | 846330 | 171 | WUblastx.64 | (Q96NZ9) Proline-rich acidic protein. | Q96NZ9 | 100% | 24 | 476 |
| HLDRM43 | 638939 | 431 | WUblastx.64 | (Q96NZ9) Proline-rich acidic protein. | Q96NZ9 | 100% | 164 | 616 |
| HLDRP33 | 647430 | 172 | WUblastx.64 | (Q9H743) CDNA: FLJ21394 FIS, | Q9H743 | 38% | 340 | 278 |
| | | | | CLONE COL03536. | | 64% | 599 | 489 |
| HLHFP03 | 460467 | 174 | WUblastx.64 | (Q9WVC2) LY-6/NEUROTOXIN | Q9WVC2 | 81% | 224 | 571 |
| | | | | e. coloLOG (ADULT MALE | | | | |
| | | | | HIPPOCAMPUS CDNA, RIKEN | | | | |
| HLICQ90 | 791828 | 176 | WUblastx.64 | (Q96N65) CDNA FLJ31349 fis, clone | Q96N65 | 95% | 571 | 636 |
| | | | | MESAN2000092, moderately similar to | | 93% | 59 | 616 |
| HLTEJ06 | 543017 | 178 | WUblastx.64 | (AAL78047) Envelope protein. | AAL78047 | 32% | 173 | 490 |
| HLTHR66 | 699812 | 179 | HMMER 2.1.1 | PFAM: PAP2 superfamily | PF01569 | 22.3 | 35 | 151 |
| | | | WUblastx.64 | (Q9D4F2) 4932443D16RIK PROTEIN. | Q9D4F2 | 93% | 2 | 229 |
| HLTIP94 | 1087335 | 180 | WUblastx.64 | (Q96DH6) Hypothetical 35.2 kDa | Q96DH6 | 80% | 579 | 740 |
| | | | | protein. | | | | |
| HLTIP94 | 1047690 | 433 | HMMER 2.1.1 | PFAM: RNA recognition motif. (a.k.a. | PF00076 | 143.1 | 40 | −172 |
| | | | | RRM, RBD, or RNP domain) | | | | |
| | | | WUblastx.64 | (Q96DH6) Hypothetical 35.2 kDa | Q96DH6 | 99% | 123 | 776 |
| | | | | protein. | | | | |
| HLWAA17 | 629552 | 181 | WUblastx.64 | (Q9NY26) IRT1 PROTEIN (SIMILAR | Q9NY26 | 94% | 226 | 960 |
| | | | | TO ZINC/IRON REGULATED | | 100% | 85 | 123 |
| | | | | TRANSPORTER-L1K | | | | |
| HLWAA88 | 588485 | 182 | WUblastx.64 | (Q9H8L6) CDNA FLJ13465 FIS, | Q9H8L6 | 99% | 683 | 1768 |
| | | | | CLONE PLACE1003493, WEAKLY | | 99% | 295 | 696 |
| | | | | SIMILAR TO END | | 40% | 781 | 855 |
| | | | | | | 42% | 440 | 517 |
| | | | | | | 92% | 35 | 322 |
| HLWAA88 | 769166 | 434 | WUblastx.64 | (Q9H8L6) CDNA FLJ13465 FIS, | Q9H8L6 | 95% | 1567 | 1629 |
| | | | | CLONE PLACE1003493, WEAKLY | | 93% | 1487 | 1573 |
| | | | | SIMILAR TO END | | 98% | 51 | 1493 |
| HLWAD77 | 653513 | 183 | WUblastx.64 | (Q9GZP9) F-LAN-1 | Q9GZP9 | 99% | 29 | 745 |
| | | | | (HYPOTHETICAL | | | | |
| | | | | TRANSMEMBRANE PROTEIN | | | | |
| | | | | SBBI53). | | | | |
| HLWAE11 | 783071 | 184 | HMMER 2.1.1 | PFAM: C1q domain | PF00386 | 44.4 | 403 | 789 |
| | | | WUblastx.64 | (Q9BXI9) COMPLEMENT-C1Q | Q9BXI9 | 99% | 28 | 861 |
| | | | | TUMOR NECROSIS FACTOR- | | | | |
| | | | | RELATED PROTEIN. | | | | |
| HLWAO22 | 587270 | 185 | WUblastx.64 | (Q9NRG9) GL003 (ADRACALIN) | Q9NRG9 | 78% | 449 | 1147 |
| | | | | (AAAS PROTEIN) (UNKNOWN) | | 28% | 139 | 420 |
| | | | | (PROTEIN FOR MGC: | | 97% | 1003 | 1263 |
| | | | | | | 100% | 14 | 40 |
| | | | | | | 83% | 19 | 495 |
| | | | | | | 30% | 396 | 596 |
| | | | | | | 41% | 503 | 664 |
| | | | | | | 28% | 100 | 408 |
| | | | | | | 26% | 470 | 859 |
| | | | | | | 58% | 333 | 503 |
| HLWBH18 | 1045194 | 186 | WUblastx.64 | (Q96MM0) CDNA FLJ32172 fis, clone | Q96MM0 | 69% | 594 | 722 |
| | | | | PLACE6000555. | | | | |
| HLWBY76 | 797609 | 187 | WUblastx.64 | (AAH06651) Similar to hypothetical | AAH06651 | 76% | 6 | 1127 |
| | | | | protein FLJ23153 | | | | |
| HMADK33 | 561941 | 189 | WUblastx.64 | hypothetical protein | pir\|T47139\|T47139 | 87% | 394 | 417 |
| | | | | DKFZp761P2414.1 - human | | 100% | 152 | 232 |
| | | | | | | 94% | 228 | 395 |
| HMADS41 | 596831 | 190 | WUblastx.64 | (AAH07725) Ceroid-lipofuscinosis, | AAH07725 | 92% | 186 | 449 |
| | | | | neuronal 8 (epile | | 100% | 427 | 1041 |
| HMAMI15 | 1352406 | 191 | WUblastx.64 | (AAL84703) Citrate lyase beta subunit. | AAL84703 | 99% | 4 | 1023 |
| HMAMI15 | 1049263 | 436 | WUblastx.64 | (AAL84703) Citrate lyase beta subunit. | AAL84703 | 100% | 3 | 440 |
| | | | | | | 79% | 372 | 920 |
| HMCFY13 | 635301 | 192 | WUblastx.64 | (Q8WZ81) Chromosome 17 open | Q8WZ81 | 95% | 36 | 737 |
| | | | | reading frame 26. | | | | |
| HMDAM24 | 514394 | 194 | WUblastx.64 | hypothetical protein | pir\|T42663\|T42663 | 92% | 155 | 325 |
| | | | | DKFZp434N0615.1 - human | | 45% | 298 | 363 |
| | | | | (fragment) | | 33% | 248 | 316 |
| | | | | | | 31% | 345 | 962 |
| | | | | | | 52% | 877 | 984 |
| | | | | | | 26% | 369 | 764 |
| | | | | | | 25% | 158 | 298 |
| | | | | | | 31% | 318 | 818 |
| | | | | | | 67% | 306 | 926 |
| HMEAI48 | 1352290 | 195 | WUblastx.64 | (Q9Y639) STROMAL CELL- | Q9Y639 | 80% | 36 | 158 |
| | | | | DERIVED RECEPTOR-1 ALPHA. | | | | |
| HMEED18 | 560775 | 196 | WUblastx.64 | (Q9H651) CDNA: FLJ22604 FIS, | Q9H651 | 99% | 34 | 696 |
| | | | | CLONE HSI04630 (BBP-LIKE | | | | |
| | | | | PROTEIN 2). | | | | |
| HMSDL37 | 973996 | 199 | WUblastx.64 | (Q9H743) CDNA: FLJ21394 FIS, | Q9H743 | 66% | 1189 | 1497 |
| | | | | CLONE COL03536. | | 56% | 931 | 1110 |
| HMSDL37 | 895429 | 438 | WUblastx.64 | (Q9H743) CDNA: FLJ21394 FIS, | Q9H743 | 64% | 1186 | 1494 |
| | | | | CLONE COL03536. | | 56% | 928 | 1107 |
| HMSDL37 | 904241 | 439 | WUblastx.64 | hypothetical protein 3 - human | pir\|E41925\|E41925 | 50% | 421 | 350 |
| | | | | | | 47% | 161 | 39 |
| HMSFI26 | 560229 | 200 | WUblastx.64 | (Q14713) POT. ORF V. | Q14713 | 57% | 1075 | 1019 |
| | | | | | | 39% | 1041 | 805 |
| HMSGT42 | 383470 | 201 | WUblastx.64 | (Q9GZW0) DJ604K5.1 (15 KDA | Q9GZW0 | 99% | 40 | 525 |
| | | | | SELENOPROTEIN). | | | | |
| HMSHS36 | 1127691 | 203 | WUblastx.64 | (O95662) POT. ORF VI | O95662 | 83% | 781 | 350 |
| | | | | (FRAGMENT). | | | | |
| HMSHS36 | 1028961 | 441 | WUblastx.64 | (Q9H8K5) CDNA FLJ13501 FIS, | Q9H8K5 | 64% | 494 | 544 |
| | | | | CLONE PLACE1004815. | | 78% | 340 | 381 |
| | | | | | | 79% | 367 | 489 |
| HMSKC04 | 799540 | 204 | WUblastx.64 | (Q9H743) CDNA: FLJ21394 FIS, | Q9H743 | 66% | 1341 | 1225 |
| | | | | CLONE COL03536. | | 60% | 1414 | 1346 |
| | | | | | | 56% | 1244 | 1053 |
| HMUAP70 | 872208 | 205 | WUblastx.64 | (Q9EQH8) NEDD4 WW DOMAIN- | Q9EQH8 | 89% | 69 | 845 |
| | | | | BINDING PROTEIN 5 (FRAGMENT). | | | | |
| HMUAP70 | 723302 | 442 | WUblastx.64 | (Q9BT67) UNKNOWN (PROTEIN | Q9BT67 | 73% | 60 | 104 |
| | | | | FOR MGC: 10924). | | 99% | 107 | 721 |
| HMUAP70 | 778820 | 443 | WUblastx.64 | (Q9BT67) UNKNOWN (PROTEIN | Q9BT67 | 100% | 183 | 221 |
| | | | | FOR MGC: 10924). | | 72% | 229 | 402 |
| | | | | | | 100% | 338 | 844 |
| HMUAP70 | 674913 | 444 | WUblastx.64 | (Q9BT67) UNKNOWN (PROTEIN | Q9BT67 | 98% | 209 | 379 |
| | | | | FOR MGC: 10924). | | 94% | 109 | 216 |
| | | | | | | 82% | 62 | 112 |
| HMUAP70 | 646810 | 445 | WUblastx.64 | (Q9BT67) UNKNOWN (PROTEIN | Q9BT67 | 73% | 60 | 104 |
| | | | | FOR MGC: 10924). | | 96% | 107 | 583 |
| HMUAP70 | 381964 | 446 | WUblastx.64 | (Q9BT67) UNKNOWN (PROTEIN | Q9BT67 | 86% | 60 | 104 |
| | | | | FOR MGC: 10924). | | 99% | 106 | 720 |
| HMVBS81 | 639203 | 206 | WUblastx.64 | (O95070) 54TMP. | O95070 | 100% | 10 | 450 |
| HMWFT65 | 562063 | 208 | WUblastx.64 | (Q96AZ2) Similar to hypothetical | Q96AZ2 | 67% | 1342 | 1205 |
| | | | | protein FLJ21463. | | | | |
| HMWGY65 | 1308287 | 209 | WUblastx.64 | (Q8VCP9) RIKEN cDNA 1200003C23 | Q8VCP9 | 66% | 42 | 1442 |
| | | | | gene. | | | | |
| HMWGY65 | 794987 | 447 | WUblastx.64 | (Q8VCP9) RIKEN cDNA 1200003C23 | Q8VCP9 | 58% | 542 | 1438 |
| | | | | gene. | | 65% | 42 | 596 |
| HNEEB45 | 1036397 | 211 | WUblastx.64 | hypothetical protein 3 - human | pir\|E41925\|E41925 | 78% | 861 | 929 |
| | | | | | | 39% | 523 | 717 |
| | | | | | | 44% | 548 | 862 |
| HNFFC43 | 753337 | 213 | WUblastx.64 | (Q969J4) Lipocalin-1 interacting | Q969J4 | 97% | 319 | 453 |
| | | | | membrane receptor (Lipocalin-interac | | 66% | 428 | 769 |
| | | | | | | 87% | 651 | 839 |
| | | | | | | 99% | 903 | 1517 |
| HNFIY77 | 634551 | 214 | WUblastx.64 | (Q8WXE6) KCCR13L. | Q8WXE6 | 96% | 866 | 1030 |
| | | | | | | 99% | 105 | 866 |
| HNFJF07 | 577013 | 215 | WUblastx.64 | (Q8WYX2) Hypothetical 14.1 kDa | Q8WYX2 | 65% | 585 | 457 |
| | | | | protein. | | | | |
| HNGAK47 | 561488 | 216 | WUblastx.64 | (Q96EF8) Unknown (protein for | Q96EF8 | 33% | 12 | 206 |
| | | | | MGC: 21495). | | 31% | 12 | 206 |
| | | | | | | 20% | 492 | 617 |
| | | | | | | 34% | 492 | 557 |
| | | | | | | 25% | 486 | 569 |
| | | | | | | 39% | 190 | 2 |
| | | | | | | 29% | 537 | 487 |
| HNGEP09 | 499076 | 219 | WUblastx.64 | (AAK55521) PRO0764. | AAK55521 | 57% | 965 | 861 |
| | | | | | | 53% | 1021 | 977 |
| | | | | | | 50% | 867 | 715 |
| HNGIJ31 | 519120 | 221 | WUblastx.64 | (Q9N083) UNNAMED PORTEIN | Q9N083 | 73% | 566 | 610 |
| | | | | PRODUCT. | | 54% | 615 | 725 |
| | | | | | | 66% | 454 | 561 |
| HNGJE50 | 561568 | 222 | WUblastx.64 | (Q9HBS7) HYPOTHETICAL 14.2 KDA | Q9HBS7 | 64% | 1028 | 945 |
| | | | | PROTEIN. | | 62% | 919 | 734 |
| HNGOI12 | 1041375 | 225 | WUblastx.64 | collagen alpha 1(VIII) chain precursor - | pir\|A34246\|A34246 | 31% | 1067 | 2092 |
| | | | | rabbit | | | | |
| HNGOM56 | 836064 | 226 | WUblastx.64 | (Q96MM0) CDNA FLJ32172 fis, clone | Q96MM0 | 38% | 577 | 744 |
| | | | | PLACE6000555. | | 58% | 714 | 953 |
| HNHEU93 | 634851 | 229 | WUblastx.64 | (Q9H387) PRO2550. | Q9H387 | 67% | 741 | 418 |
| HNHFM14 | 664507 | 230 | WUblastx.64 | (Q9N8S9) POSSIBLE (HHV-6) | Q9N8S9 | 74% | 6 | 122 |
| | | | | U1102, VARIANT A DNA, | | 45% | 17 | 223 |
| | | | | COMPLETE VIRION GENOM | | 63% | 11 | 124 |
| | | | | | | 79% | 9 | 110 |
| | | | | | | 76% | 9 | 122 |
| HNHFO29 | 463568 | 231 | WUblastx.64 | (Q9NX85) CDNA FLJ20378 FIS, | Q9NX85 | 69% | 522 | 695 |
| | | | | CLONE KAIA0536. | | | | |
| HNHNB29 | 895462 | 232 | WUblastx.64 | (Q9P195) PRO1722. | Q9P195 | 79% | 1543 | 1674 |
| | | | | | | 75% | 1398 | 1553 |
| HNHOD46 | 843488 | 233 | WUblastx.64 | (O60448) NEURONAL THREAD | O60448 | 76% | 334 | 552 |
| | | | | PROTEIN AD7C-NTP. | | 56% | 646 | 921 |
| | | | | | | 56% | 645 | 713 |
| | | | | | | 52% | 844 | 894 |
| | | | | | | 73% | 331 | 498 |
| | | | | | | 59% | 353 | 625 |
| | | | | | | 50% | 828 | 917 |
| | | | | | | 70% | 721 | 792 |
| | | | | | | 48% | 781 | 915 |
| | | | | | | 50% | 558 | 791 |
| | | | | | | 35% | 401 | 595 |
| | | | | | | 31% | 283 | 552 |
| | | | | | | 50% | 379 | 462 |
| | | | | | | 61% | 486 | 839 |
| HNTBI26 | 1310821 | 235 | WUblastx.64 | (Q96F65) Similar to RIKEN cDNA | Q96F65 | 99% | 145 | 987 |
| | | | | 0610031J06 gene (Fragment). | | 29% | 1091 | 1201 |
| | | | | | | 95% | 7 | 150 |
| HNTBI26 | 796807 | 453 | WUblastx.64 | (Q96F65) Similar to RIKEN cDNA | Q96F65 | 94% | 516 | 992 |
| | | | | 0610031J06 gene (Fragment). | | 97% | 149 | 544 |
| | | | | | | 29% | 1096 | 1206 |
| | | | | | | 95% | 11 | 154 |
| HNTBI26 | 590738 | 454 | WUblastx.64 | (Q96F65) Similar to RIKEN cDNA | Q96F65 | 70% | 824 | 973 |
| | | | | 0610031J06 gene (Fragment). | | 92% | 285 | 887 |
| | | | | | | 84% | 133 | 378 |
| | | | | | | 29% | 1077 | 1187 |
| | | | | | | 97% | 1 | 138 |
| HNTBL27 | 545534 | 236 | WUblastx.64 | (Q96AA3) Putative endoplasmic | Q96AA3 | 98% | 243 | 500 |
| | | | | reticulum multispan transmembrane | | 33% | 13 | 168 |
| | | | | prote | | 40% | 646 | 711 |
| | | | | | | 96% | 13 | 261 |
| HNTCE26 | 1160395 | 237 | HMMER 2.1.1 | PFAM: 7 transmembrane receptor | PF00001 | 137.5 | 282 | 1037 |
| | | | | (rhodopsin family) | | | | |
| | | | WUblastx.64 | (Q9H1Y3) DJ317G22.2 | Q9H1Y3 | 100% | 111 | 1316 |
| | | | | (ENCEPHALOPSIN) (PANOPSIN). | | | | |
| HNTCE26 | 853373 | 455 | HMMER 2.1.1 | PFAM: 7 transmembrane receptor | PF00001 | 23.2 | 63 | 218 |
| | | | | (rhodopsin family) | | | | |
| | | | WUblastx.64 | (Q9H1Y3) DJ317G22.2 | Q9H1Y3 | 95% | 370 | 495 |
| | | | | (ENCEPHALOPSIN) (PANOPSIN). | | 100% | 12 | 377 |
| HODDN92 | 422913 | 240 | WUblastx.64 | (Q9H1S5) BA110H4.2 (SIMILAR TO | Q9H1S5 | 100% | 1119 | 1021 |
| | | | | MEMBRANE PROTEIN). | | | | |
| HODGE68 | 834907 | 242 | WUblastx.64 | retrovirus-related hypothetical protein | pir\|S523650\|S23650 | 36% | 370 | 278 |
| | | | | II - human 1 | | 54% | 276 | 1 |
| HOEDB32 | 634994 | 243 | WUblastx.64 | (Q9Y2Y6) TADA1 PROTEIN | Q9Y2Y6 | 100% | 104 | 781 |
| | | | | (DKFZP564K1964 PROTEIN). | | | | |
| HOFMQ33 | 1184465 | 244 | WUblastx.64 | (O15232) MATRILIN-3 | MTN3_HUMAN | 85% | 43 | 1500 |
| | | | | PRECURSOR. | | | | |
| HOFMQ33 | 919896 | 458 | HMMER 2.1.1 | PFAM: von Willebrand factor type A | PF00092 | 189.8 | 288 | 815 |
| | | | | domain | | | | |
| | | | WUblastx.64 | (O15232) MATRILIN-3 | MTN3_HUMAN | 85% | 42 | 1499 |
| | | | | PRECURSOR. | | | | |
| HOFMQ33 | 906694 | 459 | HMMER 2.1.1 | PFAM: von Willebrand factor type A | PF00092 | 162.2 | 318 | 737 |
| | | | | domain | | | | |
| | | | WUblastx.64 | (O15232) MATRILIN-3 | MTN3_HUMAN | 81% | 72 | 857 |
| | | | | PRECURSOR. | | | | |
| HOFMQ33 | 902639 | 460 | WUblastx.64 | (O15232) MATRILIN-3 | MTN3_HUMAN | 81% | 1584 | 877 |
| | | | | PRECURSOR. | | | | |
| HOFMQ33 | 702186 | 461 | WUblastx.64 | (Q8WUF2) Hypothetical 23.7 kDa | Q8WUF2 | 88% | 937 | 911 |
| | | | | protein. | | 99% | 914 | 327 |
| HOFMT75 | 911180 | 245 | HMMER 2.1.1 | PFAM: Eukaryotic aspartyl protease | PF00026 | 619 | 290 | 1303 |
| | | | WUblastx.64 | cathepsin D (EC 3.4.23.5) precursor | pir\|A25771\|KHHUD | 87% | 83 | 1312 |
| | | | | [validated] - human | | | | |
| HOFMT75 | 905365 | 462 | WUblastx.64 | cathepsin D (EC 3.4.23.5) precursor | pir\|A25771\|KHHUD | 65% | 83 | 361 |
| | | | | [validated] - human | | | | |
| HOFMT75 | 892308 | 463 | WUblastx.64 | cathepsin D (EC 3.4.23.5) precursor | pir\|A25771\|KHHUD | 88% | 1494 | 757 |
| | | | | [validated] - human | | | | |
| HOFMT75 | 892291 | 464 | HMMER 2.1.1 | PFAM: Eukaryotic aspartyl protease | PF00026 | 496.2 | 336 | 1232 |
| | | | WUblastx.64 | cathepsin D (EC 3.4.23.5) precursor | pir\|A25771\|KHHUD | 99% | 129 | 1232 |
| | | | | [validated] - human | | | | |
| HOFOC73 | 931871 | 247 | HMMER 2.1.1 | PFAM: Papain family cysteine protease | PF00112 | 22.3 | 192 | 311 |
| | | | WUblastx.64 | (BAB22302) Adult male kidney cDNA, | BAB22302 | 87% | 316 | 918 |
| | | | | RIKEN full-lengt | | 70% | 18 | 341 |
| HOFOC73 | 907073 | 465 | WUblastx.64 | (CAC09370) DJ543J19.3 (cathepsin Z). | CAC09370 | 76% | 64 | 414 |
| | | | | | | 84% | 411 | 920 |
| HOFOC73 | 878863 | 467 | WUblastx.64 | (BAB55004) CDNA FLJ14357 fis, | BAB55004 | 100% | 2291 | 819 |
| | | | | clone HEMBA1000005, h | | | | |
| HOGAW62 | 579891 | 248 | WUblastx.64 | (Q8WUD4) Similar to RIKEN cDNA | Q8WUD4 | 100% | 35 | 130 |
| | | | | 2700094L05 gene. | | | | |
| HOHCH55 | 827481 | 249 | WUblastx.64 | (O95965) TEN INTEGRIN EGF-LIKE | O95965 | 100% | 221 | 1702 |
| | | | | REPEAT DOMAINS PROTEIN | | | | |
| | | | | PRECURSOR. | | | | |
| HOHCH55 | 815682 | 468 | WUblastx.64 | (O95965) TEN INTEGRIN EGF-LIKE | O95965 | 100% | 1623 | 1712 |
| | | | | REPEAT DOMAINS PROTEIN | | 31% | 416 | 1576 |
| | | | | PRECURSOR. | | 99% | 230 | 1621 |
| | | | | | | 40% | 326 | 1426 |
| HOQBJ82 | 1352356 | 250 | WUblastx.64 | (CAC37794) H-1(3)mbt-like protein. | CAC37794 | 100% | 324 | 2414 |
| HOQBJ82 | 858338 | 469 | WUblastx.64 | (Q9BQI2) HYPOTHETICAL 69.3 KDA | Q9BQ12 | 56% | 406 | 585 |
| | | | | PROTEIN. | | 96% | 41 | 496 |
| HOQBJ82 | 857453 | 470 | HMMER 2.1.1 | PFAM: SET domain | PF00856 | 211.5 | 100 | 489 |
| | | | WUblastx.64 | (O96028) WHSC1 PROTEIN. | O96028 | 98% | 61 | 1029 |
| | | | | | | 49% | 2 | 166 |
| HOSDJ25 | 854234 | 252 | WUblastx.64 | (Q9D8Y9) 1810018L05RIK | Q9D8Y9 | 85% | 468 | 593 |
| | | | | PROTEIN. | | 86% | 143 | 544 |
| HOSFD58 | 614040 | 253 | HMMER 2.1.1 | PFAM: ATP-sulfurylase | PF01747 | 697.3 | −733 | −1719 |
| | | | WUblastx.64 | 3′-phosphoadenosine-5′-phosphosulfate | pir\|JW0087\|JW0087 | 100% | 56 | 1927 |
| | | | | synthetase - human | | | | |
| HOSFD58 | 383513 | 472 | WUblastx.64 | 3′-phosphoadenosine-5′-phosphosulfate | pir\|JW0087\|JW0087 | 100% | 56 | 1927 |
| | | | | synthetase - human | | | | |
| HPEAD79 | 520202 | 255 | WUblastx.64 | (Q96NR6) CDNA FLJ30278 fis, clone | Q96NR6 | 48% | 498 | 806 |
| | | | | BRACE2002755. | | | | |
| HPFCL43 | 535710 | 256 | WUblastx.64 | (AAH07349) Adrenal gland protein | AAH07349 | 97% | 57 | 257 |
| | | | | AD-004. | | | | |
| HPIBO15 | 1310868 | 257 | WUblastx.64 | (Q9CQS3) 1110018M03RIK | Q9CQS3 | 93% | 128 | 757 |
| | | | | PROTEIN. | | | | |
| HPIBO15 | 590741 | 474 | WUblastx.64 | (Q9CQS3) 1110018M03RIK | Q9CQS3 | 88% | 127 | 402 |
| | | | | PROTEIN. | | 95% | 507 | 722 |
| | | | | | | 97% | 401 | 508 |
| HPICB53 | 1042309 | 258 | WUblastx.64 | (Q9NX17) CDNA FLJ20489 FIS, | Q9NX17 | 74% | 1138 | 848 |
| | | | | CLONE KAT08285. | | | | |
| HPJB133 | 685699 | 259 | WUblastx.64 | (O60448) NEURONAL THREAD | O60448 | 49% | 617 | 934 |
| | | | | PROTEIN AD7C-NTP. | | 33% | 633 | 890 |
| | | | | | | 51% | 24 | 122 |
| | | | | | | 35% | 570 | 872 |
| | | | | | | 33% | 1317 | 1415 |
| | | | | | | 51% | 155 | 256 |
| | | | | | | 59% | 154 | 234 |
| | | | | | | 52% | 137 | 256 |
| | | | | | | 34% | 41 | 256 |
| | | | | | | 50% | 3 | 146 |
| | | | | | | 47% | 886 | 942 |
| HPMDK28 | 846357 | 261 | WUblastx.64 | (Q9NP77) CDNA FLJ10947 FIS, | Q9NP77 | 100% | 163 | 666 |
| | | | | CLONE PLACE1000066, WEAKLY | | | | |
| | | | | SIMILAR TO SSU | | | | |
| HPMDK28 | 639118 | 479 | WUblastx.64 | (Q9NP77) CDNA FLJ10947 FIS, | Q9NP77 | 100% | 157 | 660 |
| | | | | CLONE PLACE1000066, WEAKLY | | | | |
| | | | | SIMILAR TO SSU | | | | |
| HPRAL78 | 1352342 | 263 | WUblastx.64 | hypothetical protein DKFZp566D213.1 - | pir\|T08724\|T08724 | 99% | 62 | 1312 |
| | | | | human | | | | |
| HPRAL78 | 844216 | 480 | WUblastx.64 | (AAH08720) Unknown (protein for | AAH08720 | 83% | 70 | 1017 |
| | | | | MGC: 8447). | | 51% | 490 | 1068 |
| HPRAL78 | 484735 | 481 | WUblastx.64 | (Q91XD7) Unknown (protein for | Q91XD7 | 95% | 124 | 336 |
| | | | | MGC: 18896). | | | | |
| HPRBC80 | 829136 | 264 | HMMER 2.1.1 | PFAM: Protein phosphatase 2C | PF00481 | 336.4 | 157 | 957 |
| | | | WUblastx.64 | (Q9HAY8) SER/THR PROTEIN | Q9HAY8 | 99% | 94 | 1254 |
| | | | | PHOSPHATASE TYPE 2C BETA 2 | | | | |
| | | | | ISOFORM (PROTEIN | | | | |
| HPRBC80 | 720095 | 482 | WUblastx.64 | (Q9HAY8) SER/THR PROTEIN | Q9HAY8 | 98% | 3 | 284 |
| | | | | PHOSPHATASE TYPE 2C BETA 2 | | | | |
| | | | | ISOFORM (PROTEIN | | | | |
| HPZAB47 | 585702 | 266 | WUblastx.64 | hypothetical protein 3 - human | pir\|E41925\|E41925 | 34% | 1132 | 884 |
| | | | | | | 55% | 1296 | 1183 |
| HRAAB15 | 658717 | 267 | WUblastx.64 | (AAH25678) Similar to putative. | AAH25678 | 100% | 11 | 511 |
| HRABA80 | 882176 | 268 | WUblastx.64 | (Q9HA75) CDNA FLJ12122 FIS, | Q9HA75 | 63% | 647 | 679 |
| | | | | CLONE MAMMA1000129. | | 48% | 144 | 371 |
| | | | | | | 93% | 247 | 507 |
| HRABA80 | 588460 | 483 | WUblastx.64 | (Q9HA75) CDNA FLJ12122 FIS, | Q9HA75 | 63% | 633 | 665 |
| | | | | CLONE MAMMA1000129. | | 48% | 130 | 357 |
| | | | | | | 92% | 233 | 493 |
| HRACD15 | 871221 | 269 | WUblastx.64 | (AAH08084) Hypothetical 50.4 kDa | AAH08084 | 98% | 1452 | 253 |
| | | | | protein. | | | | |
| HRACD15 | 706332 | 484 | WUblastx.64 | (AAH08084) Hypothetical 50.4 kDa | AAH08084 | 82% | 1649 | 1581 |
| | | | | protein. | | 98% | 1596 | 253 |
| HRACJ35 | 877666 | 270 | WUblastx.64 | (Q9Y5X6) BLOOD PLASMA | Q9Y5X6 | 98% | 1468 | 1755 |
| | | | | GLUTAMATE | | 99% | 132 | 1472 |
| | | | | CARBOXYPEPTIDASE | | | | |
| | | | | PRECURSOR (EC 3.4.17 | | | | |
| HRACJ35 | 730504 | 485 | WUblastx.64 | (Q9Y5X6) BLOOD PLASMA | Q9Y5X6 | 98% | 1435 | 1722 |
| | | | | GLUTAMATE | | 99% | 99 | 1439 |
| | | | | CARBOXYPEPTIDASE | | | | |
| | | | | PRECURSOR (EC 3.4.17 | | | | |
| HRACJ35 | 470546 | 486 | WUblastx.64 | (Q9Y646) AMINOPEPTIDASE. | Q9Y646 | 96% | 507 | 785 |
| | | | | | | 100% | 1 | 519 |
| HRDFD27 | 567004 | 271 | WUblastx.64 | (Q9N032) UNNAMED PROTEIN | Q9N032 | 47% | 679 | 476 |
| | | | | PRODUCT. | | | | |
| HRGBL78 | 910133 | 272 | HMMER 2.1.1 | PFAM: Immunoglobulin domain | PF00047 | 32 | 582 | 755 |
| | | | WUblastx.64 | (Q8WXH3) FREB. | Q8WXH3 | 87% | 9 | 1085 |
| HRGBL78 | 904040 | 487 | WUblastx.64 | (Q8WXH3) FREB. | Q8WXH3 | 94% | 15 | 596 |
| | | | | | | 100% | 547 | 588 |
| | | | | | | 100% | 587 | 625 |
| HRGBL78 | 904621 | 488 | WUblastx.64 | (Q9EPP8) VIRION-ASSOCIATED | Q9EPP8 | 96% | 118 | 35 |
| | | | | NUCLEAR-SHUTTLING PROTEIN | | | | |
| | | | | (FRAGMENT). | | | | |
| HRGBL78 | 863802 | 489 | WUblastx.64 | (Q8WXH3) FREB. | Q8WXH3 | 95% | 489 | 698 |
| | | | | | | 29% | 3 | 341 |
| | | | | | | 98% | 59 | 496 |
| HROAJ03 | 567005 | 273 | WUblastx.64 | (Q96A82) CDNA FLJ30106 fis, clone | Q96A82 | 88% | 7 | 786 |
| | | | | BNGH41000190, weakly similar to Rat | | | | |
| HROAJ39 | 1181699 | 274 | WUblastx.64 | (Q96ES0) Unknown (protein for | Q96ES0 | 96% | 7 | 1146 |
| | | | | MGC: 16944). | | | | |
| HROAJ39 | 1114849 | 490 | WUblastx.64 | (Q96ES0) Unknown (protein for | Q96ES0 | 99% | 10 | 762 |
| | | | | MGC: 16944). | | | | |
| HROAJ39 | 1027712 | 491 | WUblastx.64 | (Q96ES0) Unknown (protein for | Q96ES0 | 95% | 7 | 1056 |
| | | | | MGC: 16944). | | | | |
| HROBD68 | 827306 | 275 | WUblastx.64 | (Q9H728) CDNA: FLJ21463 FIS, | Q9H728 | 66% | 418 | 576 |
| | | | | CLONE COL04765. | | 78% | 581 | 748 |
| HSATR82 | 531973 | 276 | WUblastx.64 | (Q9UI58) PRO0483 PROTEIN. | Q9U158 | 80% | 678 | 707 |
| | | | | | | 76% | 605 | 682 |
| HSAVH65 | 545459 | 277 | WUblastx.64 | (Q9CZR4) 2700018N07RIK | Q9CZR4 | 92% | 23 | 403 |
| | | | | PROTEIN. | | | | |
| HSAWD74 | 460527 | 278 | WUblastx.64 | (Q9NX85) CDNA FLJ20378 FIS, | Q9NX85 | 67% | 967 | 674 |
| | | | | CLONE KAIA0536. | | | | |
| HSAWZ41 | 580872 | 279 | WUblastx.64 | (Q9H387) PRO2550. | Q9H387 | 81% | 1386 | 1102 |
| HSAXA83 | 545051 | 280 | WUblastx.64 | (Q9NRX6) PROTEIN X 013. | Q9NRX6 | 100% | 92 | 313 |
| HSAYB43 | 604143 | 281 | WUblastx.64 | (Q9N083) UNNAMED PORTEIN | Q9N083 | 60% | 1662 | 1573 |
| | | | | PRODUCT. | | 50% | 1580 | 1338 |
| HSDEK49 | 1352253 | 282 | WUblastx.64 | (Q9Y279) Z39IG PROTEIN | Q9Y279 | 100% | 60 | 1256 |
| | | | | PRECURSOR. | | | | |
| HSDEK49 | 625998 | 493 | HMMER 2.1.1 | PFAM: Immunoglobulin domain | PF00047 | 18.7 | 225 | 470 |
| | | | WUblastx.64 | (Q9Y279) Z39IG PROTEIN | Q9Y279 | 88% | 444 | 1040 |
| | | | | PRECURSOR. | | 99% | 126 | 542 |
| HSDFJ26 | 834619 | 283 | WUblastx.64 | (Q9BYJ0) KSP37. | Q9BYJ0 | 99% | 99 | 767 |
| HSDFJ26 | 836071 | 494 | WUblastx.64 | (Q9BYJ0) KSP37. | Q9BYJ0 | 100% | 99 | 281 |
| | | | | | | 92% | 238 | 768 |
| HSDSE75 | 545057 | 286 | WUblastx.64 | (O60245) PCDH7 (BH-PCDH)A. | O60245 | 100% | 10 | 702 |
| HSDZR57 | 651375 | 287 | WUblastx.64 | (Q9NX00) CDNA FLJ20512 FIS, | Q9NX00 | 100% | 9 | 209 |
| | | | | CLONE KAT09739. | | | | |
| HSIDJ81 | 589447 | 288 | WUblastx.64 | (Q9H728) CDNA: FLJ21463 FIS, | Q9H728 | 74% | 1289 | 996 |
| | | | | CLONE COL04765. | | | | |
| HSKDA27 | 1352409 | 289 | WUblastx.64 | (BAB85613) URB. | BAB85613 | 83% | 786 | 3635 |
| HSKDA27 | 1074734 | 496 | WUblastx.64 | (BAB85613) URB. | BAB85613 | 60% | 1601 | 1789 |
| | | | | | | 60% | 1715 | 1789 |
| | | | | | | 52% | 1718 | 1792 |
| | | | | | | 73% | 127 | 1791 |
| | | | | | | 32% | 1716 | 1790 |
| HSKDA27 | 872570 | 497 | WUblastx.64 | (BAB85613) URB. | BAB85613 | 69% | 9 | 1670 |
| | | | | | | 32% | 1597 | 1671 |
| HSKGN81 | 676075 | 290 | WUblastx.64 | (Q9CZY7) 2610307O08RIK | Q9CZY7 | 68% | 146 | 1126 |
| | | | | PROTEIN. | | | | |
| HSKGN81 | 409905 | 498 | WUblastx.64 | (Q9CZY7) 2610307O08RIK | Q9CZY7 | 66% | 436 | 1311 |
| | | | | PROTEIN. | | | | |
| HSNAD72 | 467397 | 292 | WUblastx.64 | (Q9P195) PRO1722. | Q9P195 | 62% | 825 | 730 |
| | | | | | | 53% | 623 | 579 |
| | | | | | | 59% | 730 | 536 |
| HSSGD52 | 1352343 | 297 | WUblastx.64 | (Q96FI8) Unknown (protein for | Q96FI8 | 100% | 344 | 2161 |
| | | | | MGC: 9160). | | | | |
| HSSGD52 | 845666 | 501 | WUblastx.64 | (Q96FI8) Unknown (protein for | Q96FI8 | 100% | 338 | 2155 |
| | | | | MGC: 9160). | | | | |
| HSUBW09 | 413246 | 299 | WUblastx.64 | (Q95LL0) Hypothetical 11.3 kDa | Q95LL0 | 73% | 589 | 633 |
| | | | | protein. | | 77% | 327 | 611 |
| HSVBU91 | 596868 | 300 | WUblastx.64 | cytoplasmic linker protein CLIP-115 - | pir\|T42734\|T42734 | 85% | 356 | 171 |
| | | | | rat | | | | |
| HSYAV50 | 847358 | 301 | HMMER 2.1.1 | PFAM: Leucine Rich Repeat | PF00560 | 97.9 | 383 | 454 |
| | | | WUblastx.64 | (Q96CX1) Similar to RIKEN cDNA | Q96CX1 | 96% | 371 | 2170 |
| | | | | 2610528G05 gene (Fragment). | | | | |
| HTAEE28 | 1018291 | 302 | WUblastx.64 | (Q9D4I2) 4932408F18RIK PROTEIN. | Q9D4I2 | 78% | 319 | 1161 |
| HTAEE28 | 882919 | 502 | WUblastx.64 | (Q9D4I2) 4932408F18RIK PROTEIN. | Q9D4I2 | 78% | 372 | 617 |
| HTAEE28 | 864120 | 503 | WUblastx.64 | (Q9D4I2) 4932408F18RIK PROTEIN. | Q9D4I2 | 76% | 142 | 768 |
| HTEEB42 | 206980 | 304 | HMMER 2.1.1 | PFAM: Immunoglobulin domain | PF00047 | 48.5 | 500 | 706 |
| | | | WUblastx.64 | (AAG49022) Junctional adhesion | AAG49022 | 99% | 59 | 952 |
| | | | | molecule 2. | | | | |
| HTELP17 | 836072 | 308 | WUblastx.64 | (AAH24188) Similar to RIKEN cDNA | AAH24188 | 100% | 22 | 465 |
| | | | | 4930453N24 gene. | | | | |
| HTELS08 | 847090 | 309 | WUblastx.64 | (Q9JI83) EPCS26 (PLAC1) | Q9JI83 | 34% | 33 | 395 |
| | | | | (PLACENTAL SPECIFIC PROTEIN | | | | |
| | | | | 1). | | | | |
| HTEPG70 | 834931 | 310 | WUblastx.64 | (O75295) R27328_2. | O75295 | 93% | 23 | 268 |
| HTGEP89 | 410582 | 311 | WUblastx.64 | (Q9DAL9) 1700007K09RIK | Q9DAL9 | 44% | 258 | 566 |
| | | | | PROTEIN. | | | | |
| HTHBG43 | 919911 | 312 | WUblastx.64 | (Q9NX17) CDNA FLJ20489 FIS, | Q9NX17 | 52% | 846 | 517 |
| | | | | CLONE KAT08285. | | | | |
| HTHDS25 | 772559 | 313 | WUblastx.64 | (Q9P1H3) PRO1438. | Q9P1H3 | 66% | 1045 | 911 |
| HTLEP53 | 634852 | 314 | WUblastx.64 | (Q8WTZ3) Hypothetical 27.2 kDa | Q8WTZ3 | 66% | 543 | 499 |
| | | | | protein. | | 68% | 806 | 534 |
| HTLGE31 | 1035130 | 315 | WUblastx.64 | (Q9NY64) GLUCOSE | Q9NY64 | 81% | 3 | 149 |
| | | | | TRANSPORTER. | | | | |
| HTLHY14 | 838460 | 316 | WUblastx.64 | (Q96L02) Hypothetical 24.5 kDa | Q96L02 | 99% | 36 | 434 |
| | | | | protein. | | 100% | 528 | 773 |
| HTLIV19 | 1046341 | 317 | WUblastx.64 | (Q96LS9) CDNA FLJ25101 fis, clone | Q96LS9 | 50% | 119 | 172 |
| | | | | CBR01328. | | 69% | 178 | 315 |
| HTOIZ02 | 847904 | 508 | WUblastx.64 | ataxin 7 - human | pir\|T09193\|T09193 | 99% | 714 | 1196 |
| | | | | | | 31% | 437 | 619 |
| | | | | | | 47% | 303 | 359 |
| | | | | | | 28% | 224 | 718 |
| | | | | | | 97% | 2 | 736 |
| HTOJK60 | 545067 | 322 | WUblastx.64 | (Q9HA67) CDNA FLJ12155 FIS, | Q9HA67 | 73% | 745 | 644 |
| | | | | CLONE MAMMA 1000472. | | 78% | 870 | 757 |
| HTPCS72 | 854941 | 323 | WUblastx.64 | (O95880) UNKNOWN. | O95880 | 100% | 2191 | 2577 |
| HTPCS72 | 566683 | 509 | WUblastx.64 | (O95880) UNKNOWN. | O95880 | 100% | 356 | 742 |
| HTPIH83 | 919916 | 324 | HMMER 2.1.1 | PFAM: PMP-22/EMP/MP20/Claudin | PF00822 | 81.5 | 127 | 660 |
| | | | | family | | | | |
| | | | WUblastx.64 | (P57739) CLAUDIN-2. | CLD2_HUMAN | 100% | 118 | 807 |
| HTPIH83 | 895024 | 510 | HMMER 2.1.1 | PFAM: PMP-22/EMP/MP20/Claudin | PF00822 | 55.9 | 120 | 500 |
| | | | | family | | | | |
| | | | WUblastx.64 | (P57739) CLAUDIN-2. | CLD2_HUMAN | 98% | 111 | 530 |
| HTPIH83 | 898088 | 511 | WUblastx.64 | (P57739) CLAUDIN-2. | CLD2_HUMAN | 96% | 96 | 353 |
| HTTBS64 | 1008159 | 327 | WUblastx.64 | (O00172) LINE-1 REVERSE | O00172 | 50% | 932 | 714 |
| | | | | TRANSCRIPTASE (FRAGMENT). | | | | |
| HTWDF76 | 714344 | 328 | WUblastx.64 | (Q9BTF2) REC8P, A MEIOTIC | Q9BTF2 | 100% | 792 | 875 |
| | | | | RECOMBINATION AND SISTER | | 92% | 370 | 510 |
| | | | | CHROMATID COHESION | | 27% | 7 | 498 |
| | | | | | | 35% | 179 | 238 |
| | | | | | | 37% | 379 | 525 |
| | | | | | | 79% | 542 | 688 |
| | | | | | | 70% | 179 | 280 |
| | | | | | | 76% | 4 | 192 |
| HTXFL30 | 620001 | 330 | WUblastx.64 | (Q96KR5) Leishmanolysin-like | Q96KR5 | 98% | 305 | 1990 |
| | | | | peptidase, variant 2 (EC 3.4.24.36). | | 100% | 30 | 68 |
| | | | | | | 100% | 213 | 299 |
| | | | | | | 100% | 68 | 94 |
| HTXJM03 | 603918 | 331 | WUblastx.64 | (Q9BRH0) SIMILAR TO | Q9BRH0 | 100% | 470 | 565 |
| | | | | DKFZP727C091 PROTEIN. | | 99% | 564 | 1760 |
| HTXON32 | 838288 | 332 | WUblastx.64 | (Q96NR6) CDNA FLJ30278 fis, clone | Q96NR6 | 58% | 1397 | 1498 |
| | | | | BRACE2002755. | | 64% | 1194 | 1397 |
| HUKAH51 | 1352424 | 335 | WUblastx.64 | (Q96NZ9) Proline-rich acidic protein. | Q96NZ9 | 100% | 286 | 738 |
| HUKAH51 | 1300737 | 516 | WUblastx.64 | (Q96NZ9) Proline-rich acidic protein. | Q96NZ9 | 94% | 144 | 569 |
| HUKAH51 | 603538 | 517 | WUblastx.64 | (Q96NZ9) Proline-rich acidic protein. | Q96NZ9 | 100% | 462 | 479 |
| | | | | | | 93% | 55 | 462 |
| HUSXS50 | 1352367 | 336 | WUblastx.64 | (Q9Y311) F-BOX ONLY PROTEIN 7. | FBX7_HUMAN | 100% | 280 | 1845 |
| HUSXS50 | 883176 | 518 | WUblastx.64 | (AAH08361) F-box only protein 7. | AAH08361 | 99% | 281 | 1069 |
| | | | | | | 42% | 1566 | 1622 |
| | | | | | | 100% | 1067 | 1666 |
| HUSXS50 | 655372 | 519 | WUblastx.64 | (AAH08361) F-box only protein 7. | AAH08361 | 77% | 1 | 459 |
| | | | | | | 26% | 43 | 219 |
| | | | | | | 100% | 317 | 700 |
| HWAAD63 | 838626 | 338 | HMMER 2.1.1 | PFAM: Sodium/calcium exchanger | PF01699 | 62.8 | 346 | 453 |
| | | | | protein | | | | |
| | | | WUblastx.64 | (Q9HC58) SODIUM/CALCIUM | Q9HC58 | 65% | 229 | 813 |
| | | | | EXCHANGER NCKX3. | | | | |
| HWAAD63 | 833089 | 520 | HMMER 2.1.1 | PFAM: Sodium/calcium exchanger | PF01699 | 37.8 | 346 | 453 |
| | | | | protein | | | | |
| | | | WUblastx.64 | (Q9HC58) SODIUM/CALCIUM | Q9HC58 | 78% | 229 | 453 |
| | | | | EXCHANGER NCKX3. | | 55% | 429 | 596 |
| | | | | | | 72% | 533 | 814 |
| HWAAD63 | 793875 | 521 | HMMER 2.1.1 | PFAM: Sodium/calcium exchanger | PF01699 | 113.7 | 336 | 773 |
| | | | | protein | | | | |
| | | | WUblastx.64 | (Q9HC58) SODIUM/CALCIUM | Q9HC58 | 76% | 219 | 806 |
| | | | | EXCHANGER NCKX3. | | | | |
| HWABY10 | 768334 | 339 | WUblastx.64 | (Q96AW1) Hypothetical 19.2 kDa | Q96AW1 | 100% | 165 | 665 |
| | | | | protein. | | | | |
| HWBCB89 | 1093347 | 341 | WUblastx.64 | (BAB55294) CDNA FLJ14777 fis, | BAB55294 | 100% | 37 | 597 |
| | | | | clone NT2RP4000259, w | | | | |
| HWBCB89 | 886210 | 522 | HMMER 2.1.1 | PFAM: Glutathione peroxidases | PF00255 | 170.2 | 104 | 433 |
| | | | WUblastx.64 | (BAB55294) CDNA FLJ14777 fis, | BAB55294 | 100% | 35 | 595 |
| | | | | clone NT2RP4000259, w | | | | |
| HWBFX31 | 799427 | 342 | WUblastx.64 | (Q9N083) UNNAMED PORTEIN | Q9N083 | 56% | 1663 | 1517 |
| | | | | PRODUCT. | | | | |
| HWDAH38 | 1028519 | 343 | WUblastx.64 | (Q9NX85) CDNA FLJ20378 FIS, | Q9NX85 | 71% | 943 | 1119 |
| | | | | CLONE KAIA0536. | | 69% | 1113 | 1250 |
| | | | | | | 48% | 1600 | 1340 |
| HWDAH38 | 889281 | 523 | WUblastx.64 | (Q64150) NUCLEAR | Q64150 | 60% | 795 | 673 |
| | | | | LOCALIZATION SIGNAL BINDING | | | | |
| | | | | PROTEIN. | | | | |
| HWHGZ51 | 886212 | 344 | WUblastx.64 | (Q9UJ74) HYPOTHETICAL 36.0 KDA | Q9UJ74 | 100% | 33 | 1070 |
| | | | | PROTEIN (C4.4A PROTEIN). | | | | |
| HWLIH65 | 793713 | 345 | HMMER 2.1.1 | PFAM: Integral membrane protein | PF01940 | 49.3 | 147 | 455 |
| | | | WUblastx.64 | (AAH08596) Unknown (protein for | AAH08596 | 98% | 81 | 623 |
| | | | | MGC: 16985). | | | | |
| HTEAM34 | 898364 | 346 | WUblastx.64 | (Q96L11) Similar to RIKEN cDNA | Q96L11 | 100% | 136 | 501 |
| | | | | 1700034O15 gene. | | | | |
| HTEAM34 | 570049 | 524 | WUblastx.64 | (Q96L11) Similar to RIKEN cDNA | Q96L11 | 100% | 63 | 428 |
| | | | | 1700034O15 gene. | | | | |
| HTEJN13 | 1352272 | 347 | WUblastx.64 | (Q9BWY1) BA552M11.5 (NOVEL | Q9BWY1 | 100% | 158 | 193 |
| | | | | PROTEIN) (FRAGMENT). | | 100% | 351 | 779 |
| HTEJN13 | 658744 | 525 | WUblastx.64 | (Q9DAR9) 1700001D09RIK | Q9DAR9 | 60% | 525 | 743 |
| | | | | PROTEIN. | | 77% | 163 | 516 |
| HTEJN13 | 381941 | 526 | WUblastx.64 | (Q9HBK8) AD026. | Q9HBK8 | 92% | 191 | 229 |
| | | | | | | 94% | 214 | 633 |

RACE Protocol for Recovery of Full-Length Genes

[0128] Partial cDNA clones can be made full-length by utilizing the rapid amplification of cDNA ends (RACE) procedure described in Frohman, M. A., et al., Proc. Nat'l. Acad. Sci. USA, 85:8998-9002 (1988). A cDNA clone missing either the 5′ or 3′ end can be reconstructed to include the absent base pairs extending to the translational start or stop codon, respectively. In some cases, cDNAs are missing the start codon of translation, therefor. The following briefly describes a modification of this original 5′ RACE procedure. Poly A+ or total RNA is reverse transcribed with Superscript II (Gibco/BRL) and an antisense or complementary primer specific to the cDNA sequence. The primer is removed from the reaction with a Microcon Concentrator (Amicon). The first-strand cDNA is then tailed with DATP and terminal deoxynucleotide transferase (Gibco/BRL). Thus, an anchor sequence is produced which is needed for PCR amplification. The second strand is synthesized from the dA-tail in PCR buffer, Taq DNA polymerase (Perkin-Elmer Cetus), an oligo-dT primer containing three adjacent restriction sites (XhoI, SalI and ClaI) at the 5′ end and a primer containing just these restriction sites. This double-stranded cDNA is PCR amplified for 40 cycles with the same primers as well as a nested cDNA-specific antisense primer. The PCR products are size-separated on an ethidium bromide-agarose gel and the region of gel containing cDNA products the predicted size of missing protein-coding DNA is removed. cDNA is purified from the agarose with the Magic PCR Prep kit (Promega), restriction digested with XhoI or SalI, and ligated to a plasmid such as pBluescript SKII (Stratagene) at XhoI and EcoRV sites. This DNA is transformed into bacteria and the plasmid clones sequenced to identify the correct protein-coding inserts. Correct 5′ ends are confirmed by comparing this sequence with the putatively identified homologue and overlap with the partial cDNA clone. Similar methods known in the art and/or commercial kits are used to amplify and recover 3′ ends.

[0129] Several quality-controlled kits are commercially available for purchase. Similar reagents and methods to those above are supplied in kit form from Gibco/BRL for both 5′ and 3′ RACE for recovery of full length genes. A second kit is available from Clontech which is a modification of a related technique, SLIC (single-stranded ligation to single-stranded cDNA), developed by Dumas et al., Nucleic Acids Res., 19:5227-32 (1991). The major differences in procedure are that the RNA is alkaline hydrolyzed after reverse transcription and RNA ligase is used to join a restriction site-containing anchor primer to the first-strand cDNA. This obviates the necessity for the dA-tailing reaction which results in a polyT stretch that is difficult to sequence past.

[0130] An alternative to generating 5′ or 3′ cDNA from RNA is to use cDNA library double-stranded DNA. An asymmetric PCR-amplified antisense cDNA strand is synthesized with an antisense cDNA-specific primer and a plasmid-anchored primer. These primers are removed and a symmetric PCR reaction is performed with a nested cDNA-specific antisense primer and the plasmid-anchored primer.

RNA Ligase Protocol for Generating the 5′ or 3′ End Sequences to Obtain Full Length Genes

[0131] Once a gene of interest is identified, several methods are available for the identification of the 5′ or 3′ portions of the gene which may not be present in the original cDNA plasmid. These methods include, but are not limited to, filter probing, clone enrichment using specific probes and protocols similar and identical to 5′ and 3′ RACE. While the full length gene may be present in the library and can be identified by probing, a useful method for generating the 5′ or 3′ end is to use the existing sequence information from the original cDNA to generate the missing information. A method similar to 5′ RACE is available for generating the missing 5′ end of a desired full-length gene. (This method was published by Fromont-Racine et al., Nucleic Acids Res., 21(7):1683-1684 (1993)). Briefly, a specific RNA oligonucleotide is ligated to the 5′ ends of a population of RNA presumably containing full-length gene RNA transcript and a primer set containing a primer specific to the ligated RNA oligonucleotide and a primer specific to a known sequence of the gene of interest, is used to PCR amplify the 5′ portion of the desired full length gene which may then be sequenced and used to generate the full length gene. This method starts with total RNA isolated from the desired source, poly A RNA may be used but is not a prerequisite for this procedure. The RNA preparation may then be treated with phosphatase if necessary to eliminate 5′ phosphate groups on degraded or damaged RNA which may interfere with the later RNA ligase step. The phosphatase if used is then inactivated and the RNA is treated with tobacco acid pyrophosphatase in order to remove the cap structure present at the 5′ ends of messenger RNAs. This reaction leaves a 5′ phosphate group at the 5′ end of the cap cleaved RNA which can then be ligated to an RNA oligonucleotide using T4 RNA ligase. This modified RNA preparation can then be used as a template for first strand cDNA synthesis using a gene specific oligonucleotide. The first strand synthesis reaction can then be used as a template for PCR amplification of the desired 5′ end using a primer specific to the ligated RNA oligonucleotide and a primer specific to the known sequence of the gene of interest. The resultant product is then sequenced and analyzed to confirm that the 5′ end sequence belongs to the relevant gene.

[0132] The present invention also relates to vectors or plasmids which include such DNA sequences, as well as the use of the DNA sequences. The material deposited with the ATCC (e.g., as described in columns 2 and 3 of Table 1A, and/or as set forth in Table 1B, Table 6, or Table 7) is a mixture of cDNA clones derived from a variety of human tissue and cloned in either a plasmid vector or a phage vector, as described, for example, in Table 1A and Table 7. These deposits are referred to as “the deposits” herein. The tissues from which some of the clones were derived are listed in Table 7, and the vector in which the corresponding cDNA is contained is also indicated in Table 7. The deposited material includes cDNA clones corresponding to SEQ ID NO:X described, for example, in Table 1A and/or Table 1B (ATCC Deposit No:Z). A clone which is isolatable from the ATCC Deposits by use of a sequence listed as SEQ ID NO:X, may include the entire coding region of a human gene or in other cases such clone may include a substantial portion of the coding region of a human gene. Furthermore, although the sequence listing may in some instances list only a portion of the DNA sequence in a clone included in the ATCC Deposits, it is well within the ability of one skilled in the art to sequence the DNA included in a clone contained in the ATCC Deposits by use of a sequence (or portion thereof) described in, for example Tables 1A and/or Table 1B or Table 2, by procedures hereinafter further described, and others apparent to those skilled in the art.

[0133] Also provided in Table 1A and Table 7 is the name of the vector which contains the cDNA clone. Each vector is routinely used in the art. The following additional information is provided for convenience.

[0134] Vectors Lambda Zap (U.S. Pat. Nos. 5,128,256 and 5,286,636), Uni-Zap XR (U.S. Pat. Nos. 5,128, 256 and 5,286,636), Zap Express (U.S. Pat. Nos. 5,128,256 and 5,286,636), pBluescript (pBS) (Short, J. M. et al., Nucleic Acids Res. 16:7583-7600 (1988); Alting-Mees, M. A. and Short, J. M., Nucleic Acids Res. 17:9494 (1989)) and pBK (Alting-Mees, M. A. et al., Strategies 5:58-61 (1992)) are commercially available from Stratagene Cloning Systems, Inc., 11011 N. Torrey Pines Road, La Jolla, Calif., 92037. pBS contains an ampicillin resistance gene and pBK contains a neomycin resistance gene. Phagemid pBS may be excised from the Lambda Zap and Uni-Zap XR vectors, and phagemid pBK may be excised from the Zap Express vector. Both phagemids may be transformed into E. coli strain XL-1 Blue, also available from Stratagene.

[0135] Vectors pSport1, pCMVSport 1.0, pCMVSport 2.0 and pCMVSport 3.0, were obtained from Life Technologies, Inc., P.O. Box 6009, Gaithersburg, Md. 20897. All Sport vectors contain an ampicillin resistance gene and may be transformed into E. coli strain DH10B, also available from Life Technologies. See, for instance, Gruber, C. E., et al., Focus 15:59-(1993). Vector lafmid BA (Bento Soares, Columbia University, New York, N.Y.) contains an ampicillin resistance gene and can be transformed into E. coli strain XL-1 Blue. Vector pCR®2.1, which is available from Invitrogen, 1600 Faraday Avenue, Carlsbad, Calif. 92008, contains an ampicillin resistance gene and may be transformed into E. coli strain DH10B, available from Life Technologies. See, for instance, Clark, J. M., Nuc. Acids Res. 16:9677-9686 (1988) and Mead, D. et al., Bio/Technology 9: (1991).

[0136] The present invention also relates to the genes corresponding to SEQ ID NO:X SEQ ID NO:Y, and/or the deposited clone (ATCC Deposit No:Z). The corresponding gene can be isolated in accordance with known methods using the sequence information disclosed herein. Such methods include preparing probes or primers from the disclosed sequence and identifying or amplifying the corresponding gene from appropriate sources of genomic material.

[0137] Also provided in the present invention are allelic variants, orthologs, and/or species homologs. Procedures known in the art can be used to obtain full-length genes, allelic variants, splice variants, full-length coding portions, orthologs, and/or species homologs of genes corresponding to SEQ ID NO:X or the complement thereof, polypeptides encoded by genes corresponding to SEQ ID NO:X or the complement thereof, and/or the cDNA contained in ATCC Deposit No:Z, using information from the sequences disclosed herein or the clones deposited with the ATCC. For example, allelic variants and/or species-homologs may be isolated and identified by making suitable probes or primers from the sequences provided herein and screening a suitable nucleic acid source for allelic variants and/or the desired homologue.

[0138] The polypeptides of the invention can be prepared in any suitable manner. Such polypeptides include isolated naturally occurring polypeptides, recombinantly produced polypeptides, synthetically produced polypeptides, or polypeptides produced by a combination of these methods. Means for preparing such polypeptides are well understood in the art.

[0139] The polypeptides may be in the form of the secreted protein, including the mature form, or may be a part of a larger protein, such as a fusion protein (see below). It is often advantageous to include an additional amino acid sequence which contains secretory or leader sequences, pro-sequences, sequences which aid in purification, such as multiple histidine residues, or an additional sequence for stability during recombinant production.

[0140] The polypeptides of the present invention are preferably provided in an isolated form, and preferably are substantially purified. A recombinantly produced version of a polypeptide, including the secreted polypeptide, can be substantially purified using techniques described herein or otherwise known in the art, such as, for example, by the one-step method described in Smith and Johnson, Gene 67:31-40 (1988). Polypeptides of the invention also can be purified from natural, synthetic or recombinant sources using techniques described herein or otherwise known in the art, such as, for example, antibodies of the invention raised against the polypeptides of the present invention in methods which are well known in the art.

[0141] The present invention provides a polynucleotide comprising, or alternatively consisting of, the nucleic acid sequence of SEQ ID NO:X, and/or the cDNA sequence contained in ATCC Deposit No:Z. The present invention also provides a polypeptide comprising, or alternatively, consisting of, the polypeptide sequence of SEQ ID NO:Y, a polypeptide encoded by SEQ ID NO:X or a complement thereof, a polypeptide encoded by the cDNA contained in ATCC Deposit No:Z, and/or the polypeptide sequence encoded by a nucleotide sequence in SEQ ID NO:B as defined in column 6 of Table 1C. Polynucleotides encoding a polypeptide comprising, or alternatively consisting of the polypeptide sequence of SEQ ID NO:Y, a polypeptide encoded by SEQ ID NO:X, a polypeptide encoded by the cDNA contained in ATCC Deposit No:Z, and/or a polypeptide sequence encoded by a nucleotide sequence in SEQ ID NO:B as defined in column 6 of Table 1C are also encompassed by the invention. The present invention further encompasses a polynucleotide comprising, or alternatively consisting of, the complement of the nucleic acid sequence of SEQ ID NO:X, a nucleic acid sequence encoding a polypeptide encoded by the complement of the nucleic acid sequence of SEQ ID NO:X, and/or the cDNA contained in ATCC Deposit No:Z.

[0142] Moreover, representative examples of polynucleotides of the invention comprise, or alternatively consist of, one, two, three, four, five, six, seven, eight, nine, ten, or more of the sequences delineated in Table 1C column 6, or any combination thereof. Additional, representative examples of polynucleotides of the invention comprise, or alternatively consist of, one, two, three, four, five, six, seven, eight, nine, ten, or more of the complementary strand(s) of the sequences delineated in Table 1C column 6, or any combination thereof. In further embodiments, the above-described polynucleotides of the invention comprise, or alternatively consist of, sequences delineated in Table 1C, column 6, and have a nucleic acid sequence which is different from that of the BAC fragment having the sequence disclosed in SEQ ID NO:B (see Table 1C, column 5). In additional embodiments, the above-described polynucleotides of the invention comprise, or alternatively consist of, sequences delineated in Table 1C, column 6, and have a nucleic acid sequence which is different from that published for the BAC clone identified as BAC ID NO:A (see Table 1C, column 4). In additional embodiments, the above-described polynucleotides of the invention comprise, or alternatively consist of, sequences delineated in Table 1C, column 6, and have a nucleic acid sequence which is different from that contained in the BAC clone identified as BAC ID NO:A (see Table 1C, column 4). Polypeptides encoded by these polynucleotides, other polynucleotides that encode these polypeptides, and antibodies that bind these polypeptides are also encompassed by the invention. Additionally, fragments and variants of the above-described polynucleotides and polypeptides are also encompassed by the invention.

[0143] Further, representative examples of polynucleotides of the invention comprise, or alternatively consist of, one, two, three, four, five, six, seven, eight, nine, ten, or more of the sequences delineated in column 6 of Table 1C which correspond to the same Clone ID (see Table 1C, column 1), or any combination thereof. Additional, representative examples of polynucleotides of the invention comprise, or alternatively consist of, one, two, three, four, five, six, seven, eight, nine, ten, or more of the complementary strand(s) of the sequences delineated in column 6 of Table 1C which correspond to the same Clone ID (see Table 1C, column 1), or any combination thereof In further embodiments, the above-described polynucleotides of the invention comprise, or alternatively consist of, sequences delineated in column 6 of Table 1C which correspond to the same Clone ID (see Table 1C, column 1) and have a nucleic acid sequence which is different from that of the BAC fragment having the sequence disclosed in SEQ ID NO:B (see Table 1C, column 5). In additional embodiments, the above-described polynucleotides of the invention comprise, or alternatively consist of, sequences delineated in column 6 of Table 1C which correspond to the same Clone ID (see Table 1C, column 1) and have a nucleic acid sequence which is different from that published for the BAC clone identified as BAC ID NO:A (see Table 1C, column 4). In additional embodiments, the above-described polynucleotides of the invention comprise, or alternatively consist of, sequences delineated in column 6 of Table 1C which correspond to the same Clone ID (see Table 1C, column 1) and have a nucleic acid sequence which is different from that contained in the BAC clone identified as BAC ID NO:A (see Table 1C, column 4). Polypeptides encoded by these polynucleotides, other polynucleotides that encode these polypeptides, and antibodies that bind these polypeptides are also encompassed by the invention. Additionally, fragments and variants of the above-described polynucleotides and polypeptides are also encompassed by the invention.

[0144] Further, representative examples of polynucleotides of the invention comprise, or alternatively consist of, one, two, three, four, five, six, seven, eight, nine, ten, or more of the sequences delineated in column 6 of Table 1C which correspond to the same contig sequence identifier SEQ ID NO:X (see Table 1C, column 2), or any combination thereof. Additional, representative examples of polynucleotides of the invention comprise, or alternatively consist of, one, two, three, four, five, six, seven, eight, nine, ten, or more of the complementary strand(s) of the sequences delineated in column 6 of Table 1C which correspond to the same contig sequence identifier SEQ ID NO:X (see Table 1C, column 2), or any combination thereof. In further embodiments, the above-described polynucleotides of the invention comprise, or alternatively consist of, sequences delineated in column 6 of Table 1C which correspond to the same contig sequence identifier SEQ ID NO:X (see Table 1C, column 2) and have a nucleic acid sequence which is different from that of the BAC fragment having the sequence disclosed in SEQ ID NO:B (see Table 1C, column 5). In additional embodiments, the above-described polynucleotides of the invention comprise, or alternatively consist of, sequences delineated in column 6 of Table 1C which correspond to the same contig sequence identifier SEQ ID NO:X (see Table 1C, column 2) and have a nucleic acid sequence which is different from that published for the BAC clone identified as BAC ID NO:A (see Table 1C, column 4). In additional embodiments, the above-described polynucleotides of the invention comprise, or alternatively consist of, sequences delineated in column 6 of Table 1C which correspond to the same contig sequence identifier SEQ ID NO:X (see Table 1C, column 2) and have a nucleic acid sequence which is different from that contained in the BAC clone identified as BAC ID NO:A (See Table 1C, column 4). Polypeptides encoded by these polynucleotides, other polynucleotides that encode these polypeptides, and antibodies that bind these polypeptides are also encompassed by the invention. Additionally, fragments and variants of the above-described polynucleotides and polypeptides are also encompassed by the invention.

[0145] Moreover, representative examples of polynucleotides of the invention comprise, or alternatively consist of, one, two, three, four, five, six, seven, eight, nine, ten, or more of the sequences delineated in the same row of Table 1C column 6, or any combination thereof Additional, representative examples of polynucleotides of the invention comprise, or alternatively consist of, one, two, three, four, five, six, seven, eight, nine, ten, or more of the complementary strand(s) of the sequences delineated in the same row of Table 1C column 6, or any combination thereof. In preferred embodiments, the polynucleotides of the invention comprise, or alternatively consist of, one, two, three, four, five, six, seven, eight, nine, ten, or more of the complementary strand(s) of the sequences delineated in the same row of Table 1C column 6, wherein sequentially delineated sequences in the table (i.e. corresponding to those exons located closest to each other) are directly contiguous in a 5′ to 3′ orientation. In further embodiments, above-described polynucleotides of the invention comprise, or alternatively consist of; sequences delineated in the same row of Table 1C, column 6, and have a nucleic acid sequence which is different from that of the BAC fragment having the sequence disclosed in SEQ ID NO:B (see Table 1C, column 5). In additional embodiments, the above-described polynucleotides of the invention comprise, or alternatively consist of, sequences delineated in the same row of Table 1C, column 6, and have a nucleic acid sequence which is different from that published for the BAC clone identified as BAC ID NO:A (see Table 1C, column 4). In additional embodiments, the above-described polynucleotides of the invention comprise, or alternatively consist of, sequences delineated in the same row of Table 1C, column 6, and have a nucleic acid sequence which is different from that contained in the BAC clone identified as BAC ID NO:A (see Table 1C, column 4). Polypeptides encoded by these polynucleotides, other polynucleotides that encode these polypeptides, and antibodies that bind these polypeptides are also encompassed by the invention.

[0146] In additional specific embodiments, polynucleotides of the invention comprise, or alternatively consist of, one, two, three, four, five, six, seven, eight, nine, ten, or more of the sequences delineated in column 6 of Table 1C, and the polynucleotide sequence of SEQ ID NO:X (e.g., as defined in Table 1C, column 2) or fragments or variants thereof. Polypeptides encoded by these polynucleotides, other polynucleotides that encode these polypeptides, and antibodies that bind these polypeptides are also encompassed by the invention.

[0147] In additional specific embodiments, polynucleotides of the invention comprise, or alternatively consist of, one, two, three, four, five, six, seven, eight, nine, ten, or more of the sequences delineated in column 6 of Table 1C which correspond to the same Clone ID (see Table 1C, column 1), and the polynucleotide sequence of SEQ ID NO:X (e.g., as defined in Table 1A, Table 1B, or Table 1C) or fragments or variants thereof. In preferred embodiments, the delineated sequence(s) and polynucleotide sequence of SEQ ID NO:X correspond to the same Clone ID. Polypeptides encoded by these polynucleotides, other polynucleotides that encode these polypeptides, and antibodies that bind these polypeptides are also encompassed by the invention.

[0148] In further specific embodiments, polynucleotides of the invention comprise, or alternatively consist of, one, two, three, four, five, six, seven, eight, nine, ten, or more of the sequences delineated in the same row of column 6 of Table 1C, and the polynucleotide sequence of SEQ ID NO:X (e.g., as defined in Table 1A, Table 1B, or Table 1C) or fragments or variants thereof. In preferred embodiments, the delineated sequence(s) and polynucleotide sequence of SEQ ID NO:X correspond to the same row of column 6 of Table 1C. Polypeptides encoded by these polynucleotides, other polynucleotides that encode these polypeptides, and antibodies that bind these polypeptides are also encompassed by the invention.

[0149] In additional specific embodiments, polynucleotides of the invention comprise, or alternatively consist of a polynucleotide sequence in which the 3′ 10 polynucleotides of one of the sequences delineated in column 6 of Table 1C and the 5′ 10 polynucleotides of the sequence of SEQ ID NO:X are directly contiguous. Nucleic acids which hybridize to the complement of these 20 contiguous polynucleotides under stringent hybridization conditions or alternatively, under lower stringency conditions, are also encompassed by the invention. Polypeptides encoded by these polynucleotides and/or nucleic acids, other polynucleotides and/or nucleic acids that encode these polypeptides, and antibodies that bind these polypeptides are also encompassed by the invention. Additionally, fragments and variants of the above-described polynucleotides, nucleic acids, and polypeptides are also encompassed by the invention.

[0150] In additional specific embodiments, polynucleotides of the invention comprise, or alternatively consist of, a polynucleotide sequence in which the 3′ 10 polynucleotides of one of the sequences delineated in column 6 of Table 1C and the 5′ 10 polynucleotides of a fragment or variant of the sequence of SEQ ID NO:X are directly contiguous Nucleic acids which hybridize to the complement of these 20 contiguous polynucleotides under stringent hybridization conditions or alternatively, under lower stringency conditions, are also encompassed by the invention. Polypeptides encoded by these polynucleotides and/or nucleic acids, other polynucleotides and/or nucleic acids encoding these polypeptides, and antibodies that bind these polypeptides are also encompassed by the invention. Additionally, fragments and variants of the above-described polynucleotides, nucleic acids, and polypeptides are also encompassed by the invention.

[0151] In specific embodiments, polynucleotides of the invention comprise, or alternatively consist of, a polynucleotide sequence in which the 3′ 10 polynucleotides of the sequence of SEQ ID NO:X and the 5′ 10 polynucleotides of the sequence of one of the sequences delineated in column 6 of Table 1C are directly contiguous. Nucleic acids which hybridize to the complement of these 20 contiguous polynucleotides under stringent hybridization conditions or alternatively, under lower stringency conditions, are also encompassed by the invention. Polypeptides encoded by these polynucleotides and/or nucleic acids, other polynucleotides and/or nucleic acids encoding these polypeptides, and antibodies that bind these polypeptides are also encompassed by the invention. Additionally, fragments and variants of the above-described polynucleotides, nucleic acids, and polypeptides are also encompassed by the invention.

[0152] In specific embodiments, polynucleotides of the invention comprise, or alternatively consist of, a polynucleotide sequence in which the 3′ 10 polynucleotides of a fragment or variant of the sequence of SEQ ID NO:X and the 5′ 10 polynucleotides of the sequence of one of the sequences delineated in column 6 of Table 1C are directly contiguous. Nucleic acids which hybridize to the complement of these 20 contiguous polynucleotides under stringent hybridization conditions or alternatively, under lower stringency conditions, are also encompassed by the invention. Polypeptides encoded by these polynucleotides and/or nucleic acids, other polynucleotides and/or nucleic acids encoding these polypeptides, and antibodies that bind these polypeptides are also encompassed by the invention. Additionally, fragments and variants of the above-described polynucleotides, nucleic acids, and polypeptides, are also encompassed by the invention.

[0153] In further specific embodiments, polynucleotides of the invention comprise, or alternatively consist of, a polynucleotide sequence in which the 3′ 10 polynucleotides of one of the sequences delineated in column 6 of Table 1C and the 5′ 10 polynucleotides of another sequence in column 6 are directly contiguous. Nucleic acids which hybridize to the complement of these 20 contiguous polynucleotides under stringent hybridization conditions or alternatively, under lower stringency conditions, are also encompassed by the invention. Polypeptides encoded by these polynucleotides and/or nucleic acids, other polynucleotides and/or nucleic acids encoding these polypeptides, and antibodies that bind these polypeptides are also encompassed by the invention. Additionally, fragments and variants of the above-described polynucleotides, nucleic acids, and polypeptides are also encompassed by the invention.

[0154] In specific embodiments, polynucleotides of the invention comprise, or alternatively consist of, a polynucleotide sequence in which the 3′ 10 polynucleotides of one of the sequences delineated in column 6 of Table 1C and the 5′ 10 polynucleotides of another sequence in column 6 corresponding to the same Clone ID (see Table 1C, column 1) are directly contiguous. Nucleic acids which hybridize to the complement of these 20 lower stringency conditions, are also encompassed by the invention. Polypeptides encoded by these polynucleotides and/or nucleic acids, other polynucleotides and/or nucleic acids encoding these polypeptides, and antibodies that bind these polypeptides are also encompassed by the invention. Additionally, fragments and variants of the above-described polynucleotides, nucleic acids, and polypeptides are also encompassed by the invention.

[0155] In specific embodiments, polynucleotides of the invention comprise, or alternatively consist of, a polynucleotide sequence in which the 3′ 10 polynucleotides of one sequence in column 6 corresponding to the same contig sequence identifer SEQ ID NO:X (see Table 1C, column 2) are directly contiguous. Nucleic acids which hybridize to the complement of these 20 contiguous polynucleotides under stringent hybridization conditions or alternatively, under lower stringency conditions, are also encompassed by the invention. Polypeptides encoded by these polynucleotides and/or nucleic acids, other polynucleotides and/or nucleic acids encoding these polypeptides, and antibodies that bind these polypeptides are also encompassed by the invention. Additionally, fragments and variants of the above-described polynucleotides, nucleic acids, and polypeptides are also encompassed by the invention.

[0156] In specific embodiments, polynucleotides of the invention comprise, or alternatively consist of a polynucleotide sequence in which the 3′ 10 polynucleotides of one of the sequences delineated in column 6 of Table 1C and the 5′ 10 polynucleotides of another sequence in column 6 corresponding to the same row are directly contiguous. In preferred embodiments, the 3′ 10 polynucleotides of one of the sequences delineated in column 6 of Table 1C is directly contiguous with the 5′ 10 polynucleotides of the next seqeuntial exon delineated in Table 1C, column 6. Nucleic acids which hybridize to the complement of these 20 contiguous polynucleotides under stringent hybridization conditions or alternatively, under lower stringency conditions, are also encompassed by the invention. Polypeptides encoded by these polynucleotides and/or nucleic acids, other polynucleotides and/or nucleic acids encoding these polypeptides, and antibodies that bind these polypeptides are also encompassed by the invention. Additionally, fragments and variants of the above-described polynucleotides, nucleic acids, and polypeptides are also encompassed by the invention.

Table 3

[0157] Many polynucleotide sequences, such as EST sequences, are publicly available and accessible through sequence databases and may have been publicly available prior to conception of the present invention. Preferably, such related polynucleotides are specifically excluded from the scope of the present invention. Accordingly, for each contig sequence (SEQ ID NO:X) listed in the fifth column of Table 1A and/or Table 1B, preferably excluded are one or more polynucleotides comprising a nucleotide sequence described by the general formula of a-b, where a is any integer between 1 and the final nucleotide minus 15 of SEQ ID NO:X, b is an integer of 15 to the final nucleotide of SEQ ID NO:X, where both a and b correspond to the positions of nucleotide residues shown in SEQ ID NO:X, and where b is greater than or equal to a+14. More specifically, preferably excluded are one or more polynucleotides comprising a nucleotide sequence described by the general formula of a-b, where a and b are integers as defined in columns 4 and 5, respectively, of Table 3. Table 3 is found in priority Application No. PCT/US02/09785, filed Mar. 19, 2002, which corresponds to Publication No. WO02/95010, published Nov. 28, 2002. Table 3, found on pages 643 to 798 of Publication No. WO02/95010, is incorporated by reference herein in its entirety.

[0158] In specific embodiments, the polynucleotides of the invention do not consist of at least one, two, three, four, five, ten, or more of the specific polynucleotide sequences referenced by the Genbank Accession No. as disclosed in column 6 of Table 3 (including for example, published sequence in connection with a particular BAC clone). In further embodiments, preferably excluded from the invention are the specific polynucleotide sequence(s) contained in the clones corresponding to at least one, two, three, four, five, ten, or more of the available material having the accession numbers identified in the sixth column of this Table (including for example, the actual sequence contained in an identified BAC clone). In no way is this listing meant to encompass all of the sequences which may be excluded by the general formula, it is just a representative example. All references available through these accessions are hereby incorporated by reference in their entirety.

Description of Table 4

[0159] Table 4 provides a key to the tissue/cell source identifier code disclosed in Table 1B.2, column 8. Column 1 provides the tissue/cell source identifier code disclosed in Table 1B.2, Column 8. Columns 2-5 provide a description of the tissue or cell source. Note that “Description” and “Tissue” sources (i.e. columns 2 and 3) having the prefix “a_” indicates organs, tissues, or cells derived from “adult” sources. Codes corresponding to diseased tissues are indicated in column 6 with the word “disease.” The use of the word “disease” in column 6 is non-limiting. The tissue or cell source may be specific (e.g. a neoplasm), or may be disease-associated (e.g., a tissue sample from a normal portion of a diseased organ). Furthermore, tissues and/or cells lacking the “disease” designation may still be derived from sources directly or indirectly involved in a disease state or disorder, and therefore may have a further utility in that disease state or disorder. In numerous cases where the tissue/cell source is a library, column 7 identifies the vector used to generate the library.

TABLE 4

| Code | Description | Tissue | Organ | Cell Line | Disease | Vector |
|---|---|---|---|---|---|---|
| AR022 | a_Heart | a_Heart | | | | |
| AR023 | a_Liver | a_Liver | | | | |
| AR024 | a_mammary gland | a_mammary gland | | | | |
| AR025 | a_Prostate | a_Prostate | | | | |
| AR026 | a_small intestine | a_small intestine | | | | |
| AR027 | a_Stomach | a_Stomach | | | | |
| AR028 | Blood B cells | Blood B cells | | | | |
| AR029 | Blood B cells activated | Blood B cells activated | | | | |
| AR030 | Blood B cells resting | Blood B cells resting | | | | |
| AR031 | Blood T cells activated | Blood T cells activated | | | | |
| AR032 | Blood T cells resting | Blood T cells resting | | | | |
| AR033 | brain | brain | | | | |
| AR034 | breast | breast | | | | |
| AR035 | breast cancer | breast cancer | | | | |
| AR036 | Cell Line CAOV3 | Cell Line CAOV3 | | | | |
| AR037 | cell line PA-1 | cell line PA-1 | | | | |
| AR038 | cell line transformed | cell line transformed | | | | |
| AR039 | colon | colon | | | | |
| AR040 | colon (9808co65R) | colon (9808co65R) | | | | |
| AR041 | colon (9809co15) | colon (9809co15) | | | | |
| AR042 | colon cancer | colon cancer | | | | |
| AR043 | colon cancer (9808co64R) | colon cancer (9808co64R) | | | | |
| AR044 | colon cancer 9809co14 | colon cancer 9809co14 | | | | |
| AR050 | Donor II B Cells 24 hrs | Donor II B Cells 24 hrs | | | | |
| AR051 | Donor II B Cells 72 hrs | Donor II B Cells 72 hrs | | | | |
| AR052 | Donor II B-Cells 24 hrs. | Donor II B-Cells 24 hrs. | | | | |
| AR053 | Donor II B-Cells 72 hrs | Donor II B-Cells 72 hrs | | | | |
| AR054 | Donor II Resting B Cells | Donor II Resting B Cells | | | | |
| AR055 | Heart | Heart | | | | |
| AR056 | Human Lung (clonetech) | Human Lung (clonetech) | | | | |
| AR057 | Human Mammary (clontech) | Human Mammary (clontech) | | | | |
| AR058 | Human Thymus (clonetech) | Human Thymus (clonetech) | | | | |
| AR059 | Jurkat (unstimulated) | Jurkat (unstimulated) | | | | |
| AR060 | Kidney | Kidney | | | | |
| AR061 | Liver | Liver | | | | |
| AR062 | Liver (Clontech) | Liver (Clontech) | | | | |
| AR063 | Lymphocytes chronic | Lymphocytes chronic lymphocytic | | | | |
| | lymphocytic leukaemia | leukaemia | | | | |
| AR064 | Lymphocytes diffuse large B cell | Lymphocytes diffuse large B cell | | | | |
| | lymphoma | lymphoma | | | | |
| AR065 | Lymphocytes follicular | Lymphocytes follicular lymphoma | | | | |
| | lymphoma | | | | | |
| AR066 | normal breast | normal breast | | | | |
| AR067 | Normal Ovarian (4004901) | Normal Ovarian (4004901) | | | | |
| AR068 | Normal Ovary 9508G045 | Normal Ovary 9508G045 | | | | |
| AR069 | Normal Ovary 9701G208 | Normal Ovary 9701G208 | | | | |
| AR070 | Normal Ovary 9806G005 | Normal Ovary 9806G005 | | | | |
| AR071 | Ovarian Cancer | Ovarian Cancer | | | | |
| AR072 | Ovarian Cancer (9702G001) | Ovarian Cancer (9702G001) | | | | |
| AR073 | Ovarian Cancer (9707G029) | Ovarian Cancer (9707G029) | | | | |
| AR074 | Ovarian Cancer (9804G011) | Ovarian Cancer (9804G011) | | | | |
| AR075 | Ovarian Cancer (9806G019) | Ovarian Cancer (9806G019) | | | | |
| AR076 | Ovarian Cancer (9807G017) | Ovarian Cancer (9807G017) | | | | |
| AR077 | Ovarian Cancer (9809G001) | Ovarian Cancer (9809G001) | | | | |
| AR078 | ovarian cancer 15799 | ovarian cancer 15799 | | | | |
| AR079 | Ovarian Cancer 17717AID | Ovarian Cancer 177I7AID | | | | |
| AR080 | Ovarian Cancer 4004664B1 | Ovarian Cancer 4004664B1 | | | | |
| AR081 | Ovarian Cancer 4005315A1 | Ovarian Cancer 4005315A1 | | | | |
| AR082 | ovarian cancer 94127303 | ovarian cancer 94127303 | | | | |
| AR083 | Ovarian Cancer 96069304 | Ovarian Cancer 96069304 | | | | |
| AR084 | Ovarian Cancer 9707G029 | Ovarian Cancer 9707G029 | | | | |
| AR085 | Ovarian Cancer 9807G045 | Ovarian Cancer 9807G045 | | | | |
| AR086 | ovarian cancer 9809G001 | ovarian cancer 9809G001 | | | | |
| AR087 | Ovarian Cancer 9905C032RC | Ovarian Cancer 9905C032RC | | | | |
| AR088 | Ovarian cancer 9907 C00 3rd | Ovarian cancer 9907 C00 3rd | | | | |
| AR089 | Prostate | Prostate | | | | |
| AR090 | Prostate (clonetech) | Prostate (clonetech) | | | | |
| AR091 | prostate cancer | prostate cancer | | | | |
| AR092 | prostate cancer #15176 | prostate cancer #15176 | | | | |
| AR093 | prostate cancer #15509 | prostate cancer #15509 | | | | |
| AR094 | prostate cancer #15673 | prostate cancer #15673 | | | | |
| AR095 | Small Intestine (Clontech) | Small Intestine (Clontech) | | | | |
| AR096 | Spleen | Spleen | | | | |
| AR097 | Thymus T cells activated | Thymus T cells activated | | | | |
| AR098 | Thymus T cells resting | Thymus T cells resting | | | | |
| AR099 | Tonsil | Tonsil | | | | |
| AR100 | Tonsil geminal center centroblast | Tonsil geminal center centroblast | | | | |
| AR101 | Tonsil germinal center B cell | Tonsil germinal center B cell | | | | |
| AR102 | Tonsil lymph node | Tonsil lymph node | | | | |
| AR103 | Tonsil memory B cell | Tonsil memory B cell | | | | |
| AR104 | Whole Brain | Whole Brain | | | | |
| AR105 | Xenograft ES-2 | Xenograft ES-2 | | | | |
| AR106 | Xenograft SW626 | Xenograft SW626 | | | | |
| AR124 | 002: Monocytes untreated (1 hr) | 002: Monocytes untreated (1 hr) | | | | |
| AR125 | 002: Monocytes untreated (5 hrs) | 002: Monocytes untreated (5 hrs) | | | | |
| AR135 | 004: Monocytes untreated (5 hrs) | 004: Monocytes untreated (5 hrs) | | | | |
| AR136 | 004: Monocytes untreated 1 hr | 004: Monocytes untreated 1 hr | | | | |
| AR139 | 005: Placebo (48 hrs) | 005: Placebo (48 hrs) | | | | |
| AR140 | 006: pC4 (24 hrs) | 006: pC4 (24 hrs) | | | | |
| AR141 | 006: pC4 (48 hrs) | 006: pC4 (48 hrs) | | | | |
| AR152 | 007: PHA(1 hr) | 007: PHA(1 hr) | | | | |
| AR153 | 007: PHA(6 HRS) | 007: PHA(6 HRS) | | | | |
| AR154 | 007: PMA(6 hrs) | 007: PMA(6 hrs) | | | | |
| AR155 | 008: 1449_#2 | 008: 1449_#2 | | | | |
| AR168 | 3T3P10 1.0 uM insulin | 3T3P10 1.0 uM insulin | | | | |
| AR169 | 3T3P10 10 nM Insulin | 3T3P10 10 nM Insulin | | | | |
| AR170 | 3T3P10 10 uM insulin | 3T3P10 10 uM insulin | | | | |
| AR171 | 3T3P10 No Insulin | 3T3P10 No Insulin | | | | |
| AR172 | 3T3P4 | 3T3P4 | | | | |
| AR173 | Adipose (41892) | Adipose (41892) | | | | |
| AR174 | Adipose Diabetic (41611) | Adipose Diabetic (41611) | | | | |
| AR175 | Adipose Diabetic (41661) | Adipose Diabetic (41661) | | | | |
| AR176 | Adipose Diabetic (41689) | Adipose Diabetic (41689) | | | | |
| AR177 | Adipose Diabetic (41706) | Adipose Diabetic (41706) | | | | |
| AR178 | Adipose Diabetic (42352) | Adipose Diabetic (42352) | | | | |
| AR179 | Adipose Diabetic (42366) | Adipose Diabetic (42366) | | | | |
| AR180 | Adipose Diabetic (42452) | Adipose Diabetic (42452) | | | | |
| AR181 | Adipose Diabetic (42491) | Adipose Diabetic (42491) | | | | |
| AR182 | Adipose Normal (41843) | Adipose Normal (41843) | | | | |
| AR183 | Adipose Normal (41893) | Adipose Normal (41893) | | | | |
| AR184 | Adipose Normal (42452) | Adipose Normal (42452) | | | | |
| AR185 | Adrenal Gland | Adrenal Gland | | | | |
| AR186 | Adrenal Gland + Whole Brain | Adrenal Gland + Whole Brain | | | | |
| AR187 | B7(1 hr) + (inverted) | B7(1 hr) + (inverted) | | | | |
| AR188 | Breast (18275A2B) | Breast (18275A2B) | | | | |
| AR189 | Breast (4004199) | Breast (4004199) | | | | |
| AR190 | Breast (4004399) | Breast (4004399) | | | | |
| AR191 | Breast (4004943B7) | Breast (4004943B7) | | | | |
| AR192 | Breast (4005570B1) | Breast (4005570B1) | | | | |
| AR193 | Breast Cancer (4004127A30) | Breast Cancer (4004127A30) | | | | |
| AR194 | Breast Cancer (400443A21) | Breast Cancer (400443A21) | | | | |
| AR195 | Breast Cancer (4004643A2) | Breast Cancer (4004643A2) | | | | |
| AR196 | Breast Cancer (4004710A7) | Breast Cancer (4004710A7) | | | | |
| AR197 | Breast Cancer (4004943A21) | Breast Cancer (4004943A21) | | | | |
| AR198 | Breast Cancer (400553A2) | Breast Cancer (400553A2) | | | | |
| AR199 | Breast Cancer (9805C046R) | Breast Cancer (9805C046R) | | | | |
| AR200 | Breast Cancer (9806C012R) | Breast Cancer (9806C012R) | | | | |
| AR201 | Breast Cancer (ODQ 45913) | Breast Cancer (ODQ 45913) | | | | |
| AR202 | Breast Cancer (ODQ45913) | Breast Cancer (ODQ45913) | | | | |
| AR203 | Breast Cancer (ODQ4591B) | Breast Cancer (ODQ4591B) | | | | |
| AR204 | Colon Cancer (15663) | Colon Cancer (15663) | | | | |
| AR205 | Colon Cancer (4005144A4) | Colon Cancer (4005144A4) | | | | |
| AR206 | Colon Cancer (4005413A4) | Colon Cancer (4005413A4) | | | | |
| AR207 | Colon Cancer (4005570B1) | Colon Cancer (4005570B1) | | | | |
| AR208 | Control RNA #1 | Control RNA #1 | | | | |
| AR209 | Control RNA #2 | Control RNA #2 | | | | |
| AR210 | Cultured Preadipocyte (blue) | Cultured Preadipocyte (blue) | | | | |
| AR211 | Cultured Preadipocyte (Red) | Cultured Preadipocyte (Red) | | | | |
| AR212 | Donor II B-Cells 24 hrs | Donor II B-Cells 24 hrs | | | | |
| AR213 | Donor II Resting B-Cells | Donor II Resting B-Cells | | | | |
| AR214 | H114EP12 10 nM Insulin | H114EP12 10 nM Insulin | | | | |
| AR215 | H114EP12 (10 nM insulin) | H114EP12 (10 nM insulin) | | | | |
| AR216 | H114EP12 (2.6 ug/ul) | H114EP12 (2.6 ug/ul) | | | | |
| AR217 | H114EP12 (3.6 ug/ul) | H114EP12 (3.6 ug/ul) | | | | |
| AR218 | HUVEC #1 | HUVEC #1 | | | | |
| AR219 | HUVEC #2 | HUVEC #2 | | | | |
| AR221 | L6 undiff. | L6 undiff. | | | | |
| AR222 | L6 Undifferentiated | L6 Undifferentiated | | | | |
| AR223 | L6P8 + 10 nM Insulin | L6P8 + 10 nM Insulin | | | | |
| AR224 | L6P8 + HS | L6P8 + HS | | | | |
| AR225 | L6P8 10 nM Insulin | L6P8 10 nM Insulin | | | | |
| AR226 | Liver (00-06-A007B) | Liver (00-06-A007B) | | | | |
| AR227 | Liver (96-02-A075) | Liver (96-02-A075) | | | | |
| AR228 | Liver (96-03-A144) | Liver (96-03-A144) | | | | |
| AR229 | Liver (96-04-A138) | Liver (96-04-A138) | | | | |
| AR230 | Liver (97-10-A074B) | Liver (97-10-A074B) | | | | |
| AR231 | Liver (98-09-A242A) | Liver (98-09-A242A) | | | | |
| AR232 | Liver Diabetic (1042) | Liver Diabetic (1042) | | | | |
| AR233 | Liver Diabetic (41616) | Liver Diabetic (41616) | | | | |
| AR234 | Liver Diabetic (41955) | Liver Diabetic (41955) | | | | |
| AR235 | Liver Diabetic (42352R) | Liver Diabetic (42352R) | | | | |
| AR236 | Liver Diabetic (42366) | Liver Diabetic (42366) | | | | |
| AR237 | Liver Diabetic (42483) | Liver Diabetic (42483) | | | | |
| AR238 | Liver Diabetic (42491) | Liver Diabetic (42491) | | | | |
| AR239 | Liver Diabetic (99-09-A281A) | Liver Diabetic (99-09-A281A) | | | | |
| AR240 | Lung | Lung | | | | |
| AR241 | Lung (27270) | Lung (27270) | | | | |
| AR242 | Lung (2727Q) | Lung (2727Q) | | | | |
| AR243 | Lung Cancer (4005116A1) | Lung Cancer (4005116A1) | | | | |
| AR244 | Lung Cancer (4005121A5) | Lung Cancer (4005121A5) | | | | |
| AR245 | Lung Cancer (4005121A5)) | Lung Cancer (4005121A5)) | | | | |
| AR246 | Lung Cancer (4005340A4) | Lung Cancer (4005340A4) | | | | |
| AR247 | Mammary Gland | Mammary Gland | | | | |
| AR248 | Monocyte (CT) | Monocyte (CT) | | | | |
| AR249 | Monocyte (OCT) | Monocyte (OCT) | | | | |
| AR250 | Monocytes (CT) | Monocytes (CT) | | | | |
| AR251 | Monocytes (INFG 18 hr) | Monocytes (INFG 18 hr) | | | | |
| AR252 | Monocytes (INFG 18 hr) | Monocytes (INFG 18 hr) | | | | |
| AR253 | Monocytes( INFG 8-11) | Monocytes(INFG 8-11) | | | | |
| AR254 | Monocytes (O CT) | Monocytes (O CT) | | | | |
| AR255 | Muscle (91-01-A105) | Muscle (91-01-A105) | | | | |
| AR256 | Muscle (92-04-A059) | Muscle (92-04-A059) | | | | |
| AR257 | Muscle (97-11-A056d) | Muscle (97-11-A056d) | | | | |
| AR258 | Muscle (99-06-A210A) | Muscle (99-06-A210A) | | | | |
| AR259 | Muscle (99-07-A203B) | Muscle (99-07-A203B) | | | | |
| AR260 | Muscle (99-7-A203B) | Muscle (99-7-A203B) | | | | |
| AR261 | Muscle Diabetic (42352R) | Muscle Diabetic (42352R) | | | | |
| AR262 | Muscle Diabetic (42366) | Muscle Diabetic (42366) | | | | |
| AR263 | NK-19 Control | NK-19 Control | | | | |
| AR264 | NK-19 IL Treated 72 hrs | NK-19 IL Treated 72 hrs | | | | |
| AR265 | NK-19 UK Treated 72 hrs. | NK-19 UK Treated 72 hrs. | | | | |
| AR266 | Omentum Normal (94-08-B009) | Omentum Normal (94-08-B009) | | | | |
| AR267 | Omentum Normal (97-01- | Omentum Normal (97-01-A039A) | | | | |
| | A039A) | | | | | |
| AR268 | Omentum Normal (97-04- | Omentum Normal (97-04-A114C) | | | | |
| | A114C) | | | | | |
| AR269 | Omentum Normal (97-06- | Omentum Normal (97-06-A117C) | | | | |
| | A117C) | | | | | |
| AR270 | Omentum Normal (97-09- | Omentum Normal (97-09-B004C) | | | | |
| | B004C) | | | | | |
| AR271 | Ovarian Cancer (17717AID) | Ovarian Cancer (17717AID) | | | | |
| AR272 | Ovarian Cancer (9905C023RC) | Ovarian Cancer (9905C023RC) | | | | |
| AR273 | Ovarian Cancer (9905C032RC) | Ovarian Cancer (9905C032RC) | | | | |
| AR274 | Ovary (9508G045) | Ovary (9508G045) | | | | |
| AR275 | Ovary (9701G208) | Ovary (9701G208) | | | | |
| AR276 | Ovary 9806G005 | Ovary 9806G005 | | | | |
| AR277 | Pancreas | Pancreas | | | | |
| AR278 | Placebo | Placebo | | | | |
| AR279 | rIL2 Control | rIL2 Control | | | | |
| AR280 | RSS288L | RSS288L | | | | |
| AR281 | RSS288LC | RSS288LC | | | | |
| AR282 | Salivary Gland | Salivary Gland | | | | |
| AR283 | Skeletal Muscle | Skeletal Muscle | | | | |
| AR284 | Skeletal Muscle (91-01-A105) | Skeletal Muscle (91-01-A105) | | | | |
| AR285 | Skeletal Muscle (42180) | Skeletal Muscle (42180) | | | | |
| AR286 | Skeletal Muscle (42386) | Skeletal Muscle (42386) | | | | |
| AR287 | Skeletal Muscle (42461) | Skeletal Muscle (42461) | | | | |
| AR288 | Skeletal Muscle (91-01-A105) | Skeletal Muscle (91-01-A105) | | | | |
| AR289 | Skeletal Muscle (92-04-A059) | Skeletal Muscle (92-04-A059) | | | | |
| AR290 | Skeletal Muscle (96-08-A171) | Skeletal Muscle (96-08-A171) | | | | |
| AR291 | Skeletal Muscle (97-07-A190A) | Skeletal Muscle (97-07-A190A) | | | | |
| AR292 | Skeletal Muscle Diabetic (42352) | Skeletal Muscle Diabetic (42352) | | | | |
| AR293 | Skeletal Muscle Diabetic (42366) | Skeletal Muscle Diabetic (42366) | | | | |
| AR294 | Skeletal Muscle Diabetic (42395) | Skeletal Muscle Diabetic (42395) | | | | |
| AR295 | Skeletal Muscle Diabetic (42483) | Skeletal Muscle Diabetic (42483) | | | | |
| AR296 | Skeletal Muscle Diabetic (42491) | Skeletal Muscle Diabetic (42491) | | | | |
| AR297 | Skeletal Muscle Diabetic 42352 | Skeletal Muscle Diabetic 42352 | | | | |
| AR298 | Skeletal Musle (42461) | Skeletal Musle (42461) | | | | |
| AR299 | Small Intestine | Small Intestine | | | | |
| AR300 | Stomach | Stomach | | | | |
| AR301 | T-Cell + HDPBQ71.fc 1449 | T-Cell + HDPBQ71.fc 1449 16 hrs | | | | |
| | 16 hrs | | | | | |
| AR302 | T-Cell + HDPBQ71.fc 1449 6 hrs | T-Cell + HDPBQ71.fc 1449 6 hrs | | | | |
| AR303 | T-Cell + IL2 16 hrs | T-Cell + IL2 16 hrs | | | | |
| AR304 | T-Cell + IL2 6 hrs | T-Cell + IL2 6 hrs | | | | |
| AR306 | T-Cell Untreated 16 hrs | T-Cell Untreated 16 hrs | | | | |
| AR307 | T-Cell Untreated 6 hrs | T-Cell Untreated 6 hrs | | | | |
| AR308 | T-Cells 24 hours | T-Cells 24 hours | | | | |
| AR309 | T-Cells 24 hrs | T-Cells 24 hrs | | | | |
| AR310 | T-Cells 24 hrs. | T-Cells 24 hrs. | | | | |
| AR311 | T-Cells 24 hrs | T-Cells 24 hrs | | | | |
| AR312 | T-Cells 4 days | T-Cells 4 days | | | | |
| AR313 | Thymus | Thymus | | | | |
| AR314 | TRE | TRE | | | | |
| AR315 | TREC | TREC | | | | |
| H0004 | Human Adult Spleen | Human Adult Spleen | Spleen | | | Uni-ZAP XR |
| H0007 | Human Cerebellum | Human Cerebellum | Brain | | | Uni-ZAP XR |
| H0008 | Whole 6 Week Old Embryo | | | | | Uni-ZAP XR |
| H0009 | Human Fetal Brain | | | | | Uni-ZAP XR |
| H0012 | Human Fetal Kidney | Human Fetal Kidney | Kidney | | | Uni-ZAP XR |
| H0013 | Human 8 Week Whole Embryo | Human 8 Week Old Embryo | Embryo | | | Uni-ZAP XR |
| H0014 | Human Gall Bladder | Human Gall Bladder | Gall Bladder | | | Uni-ZAP XR |
| H0015 | Human Gall Bladder, fraction II | Human Gall Bladder | Gall Bladder | | | Uni-ZAP XR |
| H0020 | Human Hippocampus | Human Hippocampus | Brain | | | Uni-ZAP XR |
| H0022 | Jurkat Cells | Jurkat T-Cell Line | | | | Lambda ZAP II |
| H0024 | Human Fetal Lung III | Human Fetal Lung | Lung | | | Uni-ZAP XR |
| H0025 | Human Adult Lymph Node | Human Adult Lymph Node | Lymph Node | | | Lambda ZAP II |
| H0026 | Namalwa Cells | Namalwa B-Cell Line, EBV | | | | Lambda ZAP II |
| | | immortalized | | | | |
| H0030 | Human Placenta | | | | | Uni-ZAP XR |
| H0031 | Human Placenta | Human Placenta | Placenta | | | Uni-ZAP XR |
| H0032 | Human Prostate | Human Prostate | Prostate | | | Uni-ZAP XR |
| H0033 | Human Pituitary | Human Pituitary | | | | Uni-ZAP XR |
| H0036 | Human Adult Small Intestine | Human Adult Small Intestine | Small Int. | | | Uni-ZAP XR |
| H0038 | Human Testes | Human Testes | Testis | | | Uni-ZAP XR |
| H0039 | Human Pancreas Tumor | Human Pancreas Tumor | Pancreas | | disease | Uni-ZAP XR |
| H0040 | Human Testes Tumor | Human Testes Tumor | Testis | | disease | Uni-ZAP XR |
| H0041 | Human Fetal Bone | Human Fetal Bone | Bone | | | Uni-ZAP XR |
| H0042 | Human Adult Pulmonary | Human Adult Pulmonary | Lung | | | Uni-ZAP XR |
| H0044 | Human Cornea | Human Cornea | eye | | | Uni-ZAP XR |
| H0045 | Human Esophagus, Cancer | Human Esophagus, cancer | Esophagus | | disease | Uni-ZAP XR |
| H0046 | Human Endometrial Tumor | Human Endometrial Tumor | Uterus | | disease | Uni-ZAP XR |
| H0047 | Human Fetal Liver | Human Fetal Liver | Liver | | | Uni-ZAP XR |
| H0050 | Human Fetal Heart | Human Fetal Heart | Heart | | | Uni-ZAP XR |
| H0051 | Human Hippocampus | Human Hippocampus | Brain | | | Uni-ZAP XR |
| H0052 | Human Cerebellum | Human Cerebellum | Brain | | | Uni-ZAP XR |
| H0056 | Human Umbilical Vein, Endo. | Human Umbilical Vein Endothelial Cells | Umbilical vein | | | Uni-ZAP XR |
| | remake | | | | | |
| H0057 | Human Fetal Spleen | | | | | Uni-ZAP XR |
| H0059 | Human Uterine Cancer | Human Uterine Cancer | Uterus | | disease | Lambda ZAP II |
| H0063 | Human Thymus | Human Thymus | Thymus | | | Uni-ZAP XR |
| H0068 | Human Skin Tumor | Human Skin Tumor | Skin | | disease | Uni-ZAP XR |
| H0069 | Human Activated T-Cells | Activated T-Cells | Blood | Cell Line | | Uni-ZAP XR |
| H0070 | Human Pancreas | Human Pancreas | Pancreas | | | Uni-ZAP XR |
| H0071 | Human Infant Adrenal Gland | Human Infant Adrenal Gland | Adrenal gland | | | Uni-ZAP XR |
| H0073 | Human Leiomyeloid Carcinoma | Human Leiomyeloid Carcinoma | Muscle | | disease | Uni-ZAP XR |
| H0075 | Human Activated T-Cells (II) | Activated T-Cells | Blood | Cell Line | | Uni-ZAP XR |
| H0077 | Human Thymus Tumor | Human Thymus Tumor | Thymus | | disease | Lambda ZAP II |
| H0081 | Human Fetal Epithelium (Skin) | Human Fetal Skin | Skin | | | Uni-ZAP XR |
| H0083 | HUMAN JURKAT | Jurkat Cells | | | | Uni-ZAP XR |
| | MEMBRANE BOUND | | | | | |
| | POLYSOMES | | | | | |
| H0085 | Human Colon | Human Colon | | | | Lambda ZAP II |
| H0086 | Human epithelioid sarcoma | Epithelioid Sarcoma, muscle | Sk Muscle | | disease | Uni-ZAP XR |
| H0087 | Human Thymus | Human Thymus | | | | pBluescript |
| H0090 | Human T-Cell Lymphoma | T-Cell Lymphoma | T-Cell | | disease | Uni-ZAP XR |
| H0096 | Human Parotid Cancer | Human Parotid Cancer | Parotid | | disease | Lambda ZAP II |
| H0098 | Human Adult Liver, subtracted | Human Adult Liver | Liver | | | Uni-ZAP XR |
| H0100 | Human Whole Six Week Old | Human Whole Six Week Old Embryo | Embryo | | | Uni-ZAP XR |
| | Embryo | | | | | |
| H0102 | Human Whole 6 Week Old | Human Whole Six Week Old Embryo | Embryo | | | pBluescript |
| | Embryo (II), subt | | | | | |
| H0103 | Human Fetal Brain, subtracted | Human Fetal Brain | Brain | | | Uni-ZAP XR |
| H0108 | Human Adult Lymph Node, | Human Adult Lymph Node | Lymph Node | | | Uni-ZAP XR |
| | subtracted | | | | | |
| H0111 | Human Placenta, subtracted | Human Placenta | Placenta | | | pBluescript |
| H0112 | Human Parathyroid Tumor, | Human Parathyroid Tumor | Parathyroid | | | pBluescript |
| | subtracted | | | | | |
| H0120 | Human Adult Spleen, subtracted | Human Adult Spleen | Spleen | | | Uni-ZAP XR |
| H0121 | Human Cornea, subtracted | Human Cornea | eye | | | Uni-ZAP XR |
| H0122 | Human Adult Skeletal Muscle | Human Skeletal Muscle | Sk Muscle | | | Uni-ZAP XR |
| H0123 | Human Fetal Dura Mater | Human Fetal Dura Mater | Brain | | | Uni-ZAP XR |
| H0124 | Human Rhabdomyosarcoma | Human Rhabdomyosarcoma | Sk Muscle | | disease | Uni-ZAP XR |
| H0125 | Cem cells cyclohexamide treated | Cyclohexamide Treated Cem, Jurkat, | Blood | Cell Line | | Uni-ZAP XR |
| | | Raji, and Supt | | | | |
| H0130 | LNCAP untreated | LNCAP Cell Line | Prostate | Cell Line | | Uni-ZAP XR |
| H0131 | LNCAP + o.3 nM R1881 | LNCAP Cell Line | Prostate | Cell Line | | Uni-ZAP XR |
| H0132 | LNCAP + 30 nM R1881 | LNCAP Cell Line | Prostate | Cell Line | | Uni-ZAP XR |
| H0134 | Raji Cells, cyclohexamide treated | Cyclohexamide Treated Cem, Jurkat, | Blood | Cell Line | | Uni-ZAP XR |
| | | Raji, and Supt | | | | |
| H0135 | Human Synovial Sarcoma | Human Synovial Sarcoma | Synovium | | | Uni-ZAP XR |
| H0136 | Supt Cells, cyclohexamide | Cyclohexamide Treated Cem, Jurkat, | Blood | Cell Line | | Uni-ZAP XR |
| | treated | Raji, and Supt | | | | |
| H0139 | Activated T-Cells, 4 hrs. | Activated T-Cells | Blood | Cell Line | | Uni-ZAP XR |
| H0140 | Activated T-Cells, 8 hrs. | Activated T-Cells | Blood | Cell Line | | Uni-ZAP XR |
| H0141 | Activated T-Cells, 12 hrs. | Activated T-Cells | Blood | Cell Line | | Uni-ZAP XR |
| H0144 | Nine Week Old Early Stage | 9 Wk Old Early Stage Human | Embryo | | | Uni-ZAP XR |
| | Human | | | | | |
| H0147 | Human Adult Liver | Human Adult Liver | Liver | | | Uni-ZAP XR |
| H0149 | 7 Week Old Early Stage Human, | Human Whole 7 Week Old Embryo | Embryo | | | Uni-ZAP XR |
| | subtracted | | | | | |
| H0150 | Human Epididymus | Epididymis | Testis | | | Uni-ZAP XR |
| H0151 | Early Stage Human Liver | Human Fetal Liver | Liver | | | Uni-ZAP XR |
| H0156 | Human Adrenal Gland Tumor | Human Adrenal Gland Tumor | Adrenal Gland | | disease | Uni-ZAP XR |
| H0158 | Activated T-Cells, 4 hrs., ligation 2 | Activated T-Cells | Blood | Cell Line | | Uni-ZAP XR |
| H0159 | Activated T-Cells, 8 hrs., ligation 2 | Activated T-Cells | Blood | Cell Line | | Uni-ZAP XR |
| H0160 | Activated T-Cells, 12 hrs., | Activated T-Cells | Blood | Cell Line | | Uni-ZAP XR |
| | ligation 2 | | | | | |
| H0161 | Activated T-Cells, 24 hrs., | Activated T-Cells | Blood | Cell Line | | Uni-ZAP XR |
| | ligation 2 | | | | | |
| H0163 | Human Synovium | Human Synovium | Synovium | | | Uni-ZAP XR |
| H0165 | Human Prostate Cancer, Stage | Human Prostate Cancer, stage B2 | Prostate | | disease | Uni-ZAP XR |
| | B2 | | | | | |
| H0166 | Human Prostate Cancer, Stage | Human Prostate Cancer, stage B2 | Prostate | | disease | Uni-ZAP XR |
| | B2 fraction | | | | | |
| H0167 | Activated T-Cells, 24 hrs. | Activated T-Cells | Blood | Cell Line | | Uni-ZAP XR |
| H0169 | Human Prostate Cancer, Stage C | Human Prostate Cancer, stage C | Prostate | | disease | Uni-ZAP XR |
| | fraction | | | | | |
| H0170 | 12 Week Old Early Stage Human | Twelve Week Old Early Stage Human | Embryo | | | Uni-ZAP XR |
| H0171 | 12 Week Old Early Stage | Twelve Week Old Early Stage Human | Embryo | | | Uni-ZAP XR |
| | Human, II | | | | | |
| H0172 | Human Fetal Brain, random | Human Fetal Brain | Brain | | | Lambda ZAP II |
| | primed | | | | | |
| H0176 | CAMA1Ee Cell Line | CAMA1Ee Cell Line | Breast | Cell Line | | Uni-ZAP XR |
| H0177 | CAMA1Ee Cell Line | CAMA1Ee Cell Line | Breast | Cell Line | | Uni-ZAP XR |
| H0178 | Human Fetal Brain | Human Fetal Brain | Brain | | | Uni-ZAP XR |
| H0179 | Human Neutrophil | Human Neutrophil | Blood | Cell Line | | Uni-ZAP XR |
| H0180 | Human Primary Breast Cancer | Human Primary Breast Cancer | Breast | | disease | Uni-ZAP XR |
| H0181 | Human Primary Breast Cancer | Human Primary Breast Cancer | Breast | | disease | Uni-ZAP XR |
| H0182 | Human Primary Breast Cancer | Human Primary Breast Cancer | Breast | | disease | Uni-ZAP XR |
| H0183 | Human Colon Cancer | Human Colon Cancer | Colon | | disease | Uni-ZAP XR |
| H0187 | Resting T-Cell | T-Cells | Blood | Cell Line | | Lambda ZAP II |
| H0188 | Human Normal Breast | Human Normal Breast | Breast | | | Uni-ZAP XR |
| H0189 | Human Resting Macrophage | Human Macrophage/Monocytes | Blood | Cell Line | | Uni-ZAP XR |
| H0192 | Cem Cells, cyclohexamide | Cyclohexamide Treated Cem, Jurkat, | Blood | Cell Line | | Uni-ZAP XR |
| | treated, subtra | Raji, and Supt | | | | |
| H0194 | Human Cerebellum, subtracted | Human Cerebellum | Brain | | | pBluescript |
| H0196 | Human Cardiomyopathy, | Human Cardiomyopathy | Heart | | | Uni-ZAP XR |
| | subtracted | | | | | |
| H0197 | Human Fetal Liver, subtracted | Human Fetal Liver | Liver | | | Uni-ZAP XR |
| H0199 | Human Fetal Liver, subtracted, | Human Fetal Liver | Liver | | | Uni-ZAP XR |
| | neg clone | | | | | |
| H0200 | Human Greater Omentum, fract | Human Greater Omentum | peritoneum | | | Uni-ZAP XR |
| | II remake, | | | | | |
| H0202 | Jurkat Cells, cyclohexamide | Cyclohexamide Treated Cem, Jurkat, | Blood | Cell Line | | Uni-ZAP XR |
| | treated, subtraction | Raji, and Supt | | | | |
| H0204 | Human Colon Cancer, subtracted | Human Colon Cancer | Colon | | | pBluescript |
| H0205 | Human Colon Cancer, | Human Colon Cancer | Colon | | | pBluescript |
| | differential | | | | | |
| H0207 | LNCAP, differential expression | LNCAP Cell Line | Prostate | Cell Line | | pBluescript |
| H0208 | Early Stage Human Lung, | Human Fetal Lung | Lung | | | pBluescript |
| | subtracted | | | | | |
| H0211 | Human Prostate, differential | Human Prostate | Prostate | | | pBluescript |
| | expression | | | | | |
| H0212 | Human Prostate, subtracted | Human Prostate | Prostate | | | pBluescript |
| H0213 | Human Pituitary, subtracted | Human Pituitary | | | | Uni-ZAP XR |
| H0214 | Raji cells, cyclohexamide treated, | Cyclohexamide Treated Cem, Jurkat, | Blood | Cell Line | | pBluescript |
| | subtracted | Raji, and Supt | | | | |
| H0216 | Supt cells, cyclohexamide | Cyclohexamide Treated Cem, Jurkat, | Blood | Cell Line | | pBluescript |
| | treated, subtracted | Raji, and Supt | | | | |
| H0217 | Supt cells, cyclohexamide | Cyclohexamide Treated Cem, Jurkat, | Blood | Cell Line | | pBluescript |
| | treated, differentially expressed | Raji, and Supt | | | | |
| H0218 | Activated T-Cells, 0 hrs, | Activated T-Cells | Blood | Cell Line | | Uni-ZAP XR |
| | subtracted | | | | | |
| H0219 | Activated T-Cells, 0 hrs, | Activated T-Cells | Blood | Cell Line | | Uni-ZAP XR |
| | differentially expressed | | | | | |
| H0220 | Activated T-Cells, 4 hrs, | Activated T-Cells | Blood | Cell Line | | Uni-ZAP XR |
| | subtracted | | | | | |
| H0222 | Activated T-Cells, 8 hrs, | Activated T-Cells | Blood | Cell Line | | Uni-ZAP XR |
| | subtracted | | | | | |
| H0224 | Activated T-Cells, 12 hrs, | Activated T-Cells | Blood | Cell Line | | Uni-ZAP XR |
| | subtracted | | | | | |
| H0225 | Activated T-Cells, 12 hrs, | Activated T-Cells | Blood | Cell Line | | Uni-ZAP XR |
| | differentially expressed | | | | | |
| H0229 | Early Stage Human Brain, | Early Stage Human Brain | Brain | | | Lambda ZAP II |
| | random primed | | | | | |
| H0231 | Human Colon, subtraction | Human Colon | | | | pBluescript |
| H0233 | Human Fetal Heart, Differential | Human Fetal Heart | Heart | | | pBluescript |
| | (Adult-Specific) | | | | | |
| H0234 | human colon cancer, metastatic | Human Colon Cancer, metasticized to | Liver | | | pBluescript |
| | to liver, differentially expressed | liver | | | | |
| H0235 | Human colon cancer, metaticized | Human Colon Cancer, metasticized to | Liver | | | pBluescript |
| | to liver, subtraction | liver | | | | |
| H0239 | Human Kidney Tumor | Human Kidney Tumor | Kidney | | disease | Uni-ZAP XR |
| H0241 | C7MCF7 cell line, estrogen | C7MCF7 Cell Line, estrogen treated | Breast | Cell Line | | Uni-ZAP XR |
| | treated, subtraction | | | | | |
| H0242 | Human Fetal Heart, Differential | Human Fetal Heart | Heart | | | pBluescript |
| | (Fetal-Specific) | | | | | |
| H0244 | Human 8 Week Whole Embryo, | Human 8 Week Old Embryo | Embryo | | | Uni-ZAP XR |
| | subtracted | | | | | |
| H0250 | Human Activated Monocytes | Human Monocytes | | | | Uni-ZAP XR |
| H0251 | Human Chondrosarcoma | Human Chondrosarcoma | Cartilage | | disease | Uni-ZAP XR |
| H0252 | Human Osteosarcoma | Human Osteosarcoma | Bone | | disease | Uni-ZAP XR |
| H0253 | Human adult testis, large inserts | Human Adult Testis | Testis | | | Uni-ZAP XR |
| H0254 | Breast Lymph node cDNA | Breast Lymph Node | Lymph Node | | | Uni-ZAP XR |
| | library | | | | | |
| H0255 | breast lymph node CDNA library | Breast Lymph Node | Lymph Node | | | Lambda ZAP II |
| H0256 | HL-60, unstimulated | Human HL-60 Cells, unstimulated | Blood | Cell Line | | Uni-ZAP XR |
| H0257 | HL-60, PMA 4 H | HL-60 Cells, PMA stimulated 4 H | Blood | Cell Line | | Uni-ZAP XR |
| H0261 | H. cerebellum, Enzyme | Human Cerebellum | Brain | | | Uni-ZAP XR |
| | subtracted | | | | | |
| H0263 | human colon cancer | Human Colon Cancer | Colon | | disease | Lambda ZAP II |
| H0264 | human tonsils | Human Tonsil | Tonsil | | | Uni-ZAP XR |
| H0265 | Activated T-Cell | T-Cells | Blood | Cell Line | | Uni-ZAP XR |
| | (12 hs)/Thiouridine labelledEco | | | | | |
| H0266 | Human Microvascular | HMEC | Vein | Cell Line | | Lambda ZAP II |
| | Endothelial Cells, fract. A | | | | | |
| H0267 | Human Microvascular | HMEC | Vein | Cell Line | | Lambda ZAP II |
| | Endothelial Cells, fract. B | | | | | |
| H0268 | Human Umbilical Vein | HUVE Cells | Umbilical vein | Cell Line | | Lambda ZAP II |
| | Endothelial Cells, fract. A | | | | | |
| H0269 | Human Umbilical Vein | HUVE Cells | Umbilical vein | Cell Line | | Lambda ZAP II |
| | Endothelial Cells, fract. B | | | | | |
| H0270 | HPAS (human pancreas, | Human Pancreas | Pancreas | | | Uni-ZAP XR |
| | subtracted) | | | | | |
| H0271 | Human Neutrophil, Activated | Human Neutrophil - Activated | Blood | Cell Line | | Uni-ZAP XR |
| H0272 | HUMAN TONSILS, | Human Tonsil | Tonsil | | | Uni-ZAP XR |
| | FRACTION 2 | | | | | |
| H0274 | Human Adult Spleen, fractionII | Human Adult Spleen | Spleen | | | Uni-ZAP XR |
| H0275 | Human Infant Adrenal Gland, | Human Infant Adrenal Gland | Adrenal gland | | | pBluescript |
| | Subtracted | | | | | |
| H0280 | K562 + PMA (36 hrs) | K562 Cell line | cell line | Cell Line | | ZAP Express |
| H0282 | HBGB''s differential | Human Primary Breast Cancer | Breast | | | Uni-ZAP XR |
| | consolidation | | | | | |
| H0284 | Human OB MG63 control | Human Osteoblastoma MG63 cell line | Bone | Cell Line | | Uni-ZAP XR |
| | fraction I | | | | | |
| H0286 | Human OB MG63 treated (10 nM | Human Osteoblastoma MG63 cell line | Bone | Cell Line | | Uni-ZAP XR |
| | E2) fraction I | | | | | |
| H0288 | Human OB HOS control fraction I | Human Osteoblastoma HOS cell line | Bone | Cell Line | | Uni-ZAP XR |
| H0290 | Human OB HOS treated (1 nM | Human Osteoblastoma HOS cell line | Bone | Cell Line | | Uni-ZAP XR |
| | E2) fraction I | | | | | |
| H0292 | Human OB HOS treated (10 nM | Human Osteoblastoma HOS cell line | Bone | Cell Line | | Uni-ZAP XR |
| | E2) fraction I | | | | | |
| H0293 | WI 38 cells | | | | | Uni-ZAP XR |
| H0294 | Amniotic Cells - TNF induced | Amniotic Cells - TNF induced | Placenta | Cell Line | | Uni-ZAP XR |
| H0295 | Amniotic Cells - Primary Culture | Amniotic Cells - Primary Culture | Placenta | Cell Line | | Uni-ZAP XR |
| H0298 | HCBB''s differential | CAMAIEe Cell Line | Breast | Cell Line | | Uni-ZAP XR |
| | consolidation | | | | | |
| H0305 | CD34 positive cells (Cord Blood) | CD34 Positive Cells | Cord Blood | | | ZAP Express |
| H0306 | CD34 depleted Buffy Coat (Cord | CD34 Depleted Buffy Coat (Cord Blood) | Cord Blood | | | ZAP Express |
| | Blood) | | | | | |
| H0309 | Human Chronic Synovitis | Synovium, Chronic Synovitis/ | Synovium | | disease | Uni-ZAP XR |
| | | Osteoarthritis | | | | |
| H0310 | human caudate nucleus | Brain | Brain | | | Uni-ZAP XR |
| H0313 | human pleural cancer | pleural cancer | | | disease | pBluescript |
| H0316 | HUMAN STOMACH | Human Stomach | Stomach | | | Uni-ZAP XR |
| H0318 | HUMAN B CELL LYMPHOMA | Human B Cell Lymphoma | Lymph Node | | disease | Uni-ZAP XR |
| H0320 | Human frontal cortex | Human Frontal Cortex | Brain | | | Uni-ZAP XR |
| H0327 | human corpus colosum | Human Corpus Callosum | Brain | | | Uni-ZAP XR |
| H0328 | human ovarian cancer | Ovarian Cancer | Ovary | | disease | Uni-ZAP XR |
| H0329 | Dermatofibrosarcoma | Dermatofibrosarcoma Protuberans | Skin | | disease | Uni-ZAP XR |
| | Protuberance | | | | | |
| H0331 | Hepatocellular Tumor | Hepatocellular Tumor | Liver | | disease | Lambda ZAP II |
| H0333 | Hemangiopericytoma | Hemangiopericytoma | Blood vessel | | disease | Lambda ZAP II |
| H0334 | Kidney cancer | Kidney Cancer | Kidney | | disease | Uni-ZAP XR |
| H0339 | Duodenum | Duodenum | | | | Uni-ZAP XR |
| H0341 | Bone Marrow Cell Line (RS4; 11) | Bone Marrow Cell Line RS4; 11 | Bone Marrow | Cell Line | | Uni-ZAP XR |
| H0342 | Lingual Gyrus | Lingual Gyrus | Brain | | | Uni-Zap XR |
| H0343 | stomach cancer (human) | Stomach Cancer - 5383A (human) | | | disease | Uni-ZAP XR |
| H0346 | Brain-medulloblastoma | Brain (Medulloblastoma)-9405C006R | Brain | | disease | Uni-ZAP XR |
| H0350 | Human Fetal Liver, mixed 10 & | Human Fetal Liver, mixed 10&14 Week | Liver | | | Uni-ZAP XR |
| | 14 week | | | | | |
| H0351 | Glioblastoma | Glioblastoma | Brain | | disease | Uni-ZAP XR |
| H0352 | wilm''s tumor | Wilm''s Tumor | | | disease | Uni-ZAP XR |
| H0354 | Human Leukocytes | Human Leukocytes | Blood | Cell Line | | pCMVSport 1 |
| H0355 | Human Liver | Human Liver, normal Adult | | | | pCMVSport 1 |
| H0356 | Human Kidney | Human Kidney | Kidney | | | pCMVSport 1 |
| H0357 | H. Normalized Fetal Liver, II | Human Fetal Liver | Liver | | | Uni-ZAP XR |
| H0359 | KMH2 cell line | KMH2 | | | | ZAP Express |
| H0361 | Human rejected kidney | Human Rejected Kidney | | | disease | pBluescript |
| H0362 | HeLa cell line | HELA CELL LINE | | | | pSport1 |
| H0366 | L428 cell line | L428 | | | | ZAP Express |
| H0369 | H. Atrophic Endometrium | Atrophic Endometrium and myometrium | | | | Uni-ZAP XR |
| H0370 | H. Lymph node breast Cancer | Lymph node with Met. Breast Cancer | | | disease | Uni-ZAP XR |
| H0372 | Human Testes | Human Testes | Testis | | | pCMVSport 1 |
| H0373 | Human Heart | Human Adult Heart | Heart | | | pCMVSport 1 |
| H0374 | Human Brain | Human Brain | | | | pCMVSport 1 |
| H0375 | Human Lung | Human Lung | | | | pCMVSport 1 |
| H0376 | Human Spleen | Human Adult Spleen | Spleen | | | pCMVSport 1 |
| H0379 | Human Tongue, frac 1 | Human Tongue | | | | pSport1 |
| H0380 | Human Tongue, frac 2 | Human Tongue | | | | pSport1 |
| H0381 | Bone Cancer | Bone Cancer | | | disease | Uni-ZAP XR |
| H0383 | Human Prostate BPH, re-excision | Human Prostate BPH | | | | Uni-ZAP XR |
| H0384 | Brain, Kozak | Human Brain | | | | pCMVSport 1 |
| H0386 | Leukocyte and Lung; 4 screens | Human Leukocytes | Blood | Cell Line | | pCMVSport 1 |
| H0388 | Human Rejected Kidney, 704 re- | Human Rejected Kidney | | | disease | pBluescript |
| | excision | | | | | |
| H0390 | Human Amygdala Depression, | Human Amygdala Depression | | | disease | pBluescript |
| | re-excision | | | | | |
| H0391 | H. Meniingima, M6 | Human Meningima | brain | | | pSport1 |
| H0392 | H. Meningima, M1 | Human Meningima | brain | | | pSport1 |
| H0393 | Fetal Liver, subtraction II | Human Fetal Liver | Liver | | | pBluescript |
| H0394 | A-14 cell line | Redd-Sternberg cell | | | | ZAP Express |
| H0395 | A1-CELL LINE | Redd-Sternberg cell | | | | ZAP Express |
| H0396 | L1 Cell line | Redd-Sternberg cell | | | | ZAP Express |
| H0399 | Human Kidney Cortex, re-rescue | Human Kidney Cortex | | | | Lambda ZAP II |
| H0400 | Human Striatum Depression, re- | Human Brain, Striatum Depression | Brain | | | Lambda ZAP II |
| | rescue | | | | | |
| H0402 | CD34 depleted Buffy Coat (Cord | CD34 Depleted Buffy Coat (Cord Blood) | Cord Blood | | | ZAP Express |
| | Blood), re-excision | | | | | |
| H0403 | H. Umbilical Vein Endothelial | HUVE Cells | Umbilical vein | Cell Line | | Uni-ZAP XR |
| | Cells, IL4 induced | | | | | |
| H0404 | H. Umbilical Vein endothelial | HUVE Cells | Umbilical vein | Cell Line | | Uni-ZAP XR |
| | cells, uninduced | | | | | |
| H0405 | Human Pituitary, subtracted VI | Human Pituitary | | | | pBluescript |
| H0406 | H Amygdala Depression, | Human Amygdala Depression | | | | Uni-ZAP XR |
| | subtracted | | | | | |
| H0408 | Human kidney Cortex, subtracted | Human Kidney Cortex | | | | pBluescript |
| H0409 | H. Striatum Depression, | Human Brain, Striatum Depression | Brain | | | pBluescript |
| | subtracted | | | | | |
| H0410 | H. Male bladder, adult | H Male Bladder, Adult | Bladder | | | pSport1 |
| H0411 | H Female Bladder, Adult | Human Female Adult Bladder | Bladder | | | pSport1 |
| H0412 | Human umbilical vein | HUVE Cells | Umbilical vein | Cell Line | | pSport1 |
| | endothelial cells, IL-4 induced | | | | | |
| H0413 | Human Umbilical Vein | HUVE Cells | Umbilical vein | Cell Line | | pSport1 |
| | Endothelial Cells, uninduced | | | | | |
| H0415 | H. Ovarian Tumor, II, OV5232 | Ovarian Tumor, OV5232 | Ovary | | disease | pCMVSport 2.0 |
| H0416 | Human Neutrophils, Activated, | Human Neutrophil - Activated | Blood | Cell Line | | pBluescript |
| | re-excision | | | | | |
| H0417 | Human Pituitary, subtracted VIII | Human Pituitary | | | | pBluescript |
| H0418 | Human Pituitary, subtracted VII | Human Pituitary | | | | pBluescript |
| H0419 | Bone Cancer, re-excision | Bone Cancer | | | | Uni-ZAP XR |
| H0421 | Human Bone Marrow, re- | Bone Marrow | | | | pBluescript |
| | excision | | | | | |
| H0422 | T-Cell PHA 16 hrs | T-Cells | Blood | Cell Line | | pSport1 |
| H0423 | T-Cell PHA 24 hrs | T-Cells | Blood | Cell Line | | pSport1 |
| H0424 | Human Pituitary, subt IX | Human Pituitary | | | | pBluescript |
| H0427 | Human Adipose | Human Adipose, left hiplipoma | | | | pSport1 |
| H0428 | Human Ovary | Human Ovary Tumor | Ovary | | | pSport1 |
| H0429 | K562 + PMA (36 hrs), re-excision | K562 Cell line | cell line | Cell Line | | ZAP Express |
| H0431 | H. Kidney Medulla, re-excision | Kidney medulla | Kidney | | | pBluescript |
| H0433 | Human Umbilical Vein | HUVE Cells | Umbilical vein | Cell Line | | pBluescript |
| | Endothelial cells, frac B, re- | | | | | |
| | excision | | | | | |
| H0435 | Ovarian Tumor 10-3-95 | Ovarian Tumor, OV350721 | Ovary | | | pCMVSport 2.0 |
| H0436 | Resting T-Cell Library, II | T-Cells | Blood | Cell Line | | pSport1 |
| H0437 | H Umbilical Vein Endothelial | HUVE Cells | Umbilical vein | Cell Line | | Lambda ZAP II |
| | Cells, frac A, re-excision | | | | | |
| H0438 | H. Whole Brain #2, re-excision | Human Whole Brain #2 | | | | ZAP Express |
| H0439 | Human Eosinophils | Eosinophils | | | | pBluescript |
| H0441 | H. Kidney Cortex, subtracted | Kidney cortex | Kidney | | | pBluescript |
| H0443 | H. Adipose, subtracted | Human Adipose, left hiplipoma | | | | pSport1 |
| H0444 | Spleen metastic melanoma | Spleen, Metastic malignant melanoma | Spleen | | disease | pSport1 |
| H0445 | Spleen, Chronic lymphocytic | Human Spleen, CLL | Spleen | | disease | pSport1 |
| | leukemia | | | | | |
| H0449 | CD34+ cell, I | CD34 positive cells | | | | pSport1 |
| H0455 | H. Striatum Depression, subt | Human Brain, Striatum Depression | Brain | | | pBluescript |
| H0457 | Human Eosinophils | Human Eosinophils | | | | pSport1 |
| H0458 | CD34+ cell, I, frac II | CD34 positive cells | | | | pSport1 |
| H0459 | CD34+cells, II, FRACTION 2 | CD34 positive cells | | | | pCMVSport 2.0 |
| H0461 | H. Kidney Medulla, subtracted | Kidney medulla | Kidney | | | pBluescript |
| H0462 | H. Amygdala Depression, | | Brain | | | pBluescript |
| | subtracted | | | | | |
| H0477 | Human Tonsil, Lib 3 | Human Tonsil | Tonsil | | | pSport1 |
| H0478 | Salivary Gland, Lib 2 | Human Salivary Gland | Salivary gland | | | pSport1 |
| H0483 | Breast Cancer cell line, MDA 36 | Breast Cancer Cell line, MDA 36 | | | | pSport1 |
| H0484 | Breast Cancer Cell line, | Breast Cancer Cell line, Angiogenic, | | | | pSport1 |
| | angiogenic | 36T3 | | | | |
| H0485 | Hodgkin''s Lymphoma I | Hodgkin''s Lymphoma I | | | disease | pCMVSport 2.0 |
| H0486 | Hodgkin''s Lymphoma II | Hodgkin''s Lymphoma II | | | disease | pCMVSport 2.0 |
| H0487 | Human Tonsils, lib I | Human Tonsils | | | | pCMVSport 2.0 |
| H0488 | Human Tonsils, Lib 2 | Human Tonsils | | | | pCMVSport 2.0 |
| H0489 | Crohn''s Disease | Ileum | Intestine | | disease | pSport1 |
| H0490 | Hl-60, untreated, subtracted | Human HL-60 Cells, unstimulated | Blood | Cell Line | | Uni-ZAP XR |
| H0491 | HL-60, PMA 4 H, subtracted | HL-60 Cells, PMA stimulated 4 H | Blood | Cell Line | | Uni-ZAP XR |
| H0492 | HL-60, RA 4 h, Subtracted | HL-60 Cells, RA stimulated for 4 H | Blood | Cell Line | | Uni-ZAP XR |
| H0494 | Keratinocyte | Keratinocyte | | | | pCMVSport 2.0 |
| H0497 | HEL cell line | HEL cell line | | HEL 92.1.7 | | pSport1 |
| H0505 | Human Astrocyte | Human Astrocyte | | | | pSport1 |
| H0506 | Ulcerative Colitis | Colon | Colon | | | pSport1 |
| H0509 | Liver, Hepatoma | Human Liver, Hepatoma, patient 8 | Liver | | disease | pCMVSport 3.0 |
| H0510 | Human Liver, normal | Human Liver, normal, Patient # 8 | Liver | | | pCMVSport 3.0 |
| H0512 | Keratinocyte, lib 3 | Keratinocyte | | | | pCMVSport 2.0 |
| H0518 | pBMC stimulated w/poly I/C | pBMC stimulated with poly I/C | | | | pCMVSport 3.0 |
| H0519 | NTERA2, control | NTERA2, Teratocarcinoma cell line | | | | pCMVSport 3.0 |
| H0520 | NTERA2 + retinoic acid, 14 days | NTERA2, Teratocarcinoma cell line | | | | pSport1 |
| H0521 | Primary Dendritic Cells, lib 1 | Primary Dendritic cells | | | | pCMVSport 3.0 |
| H0522 | Primary Dendritic cells, frac 2 | Primary Dendritic cells | | | | pCMVSport 3.0 |
| H0525 | PCR, pBMC I/C treated | pBMC stimulated with poly I/C | | | | PCRII |
| H0529 | Myoloid Progenitor Cell Line | TF-1 Cell Line; Myoloid progenitor cell | | | | pCMVSport 3.0 |
| | | line | | | | |
| H0530 | Human Dermal Endothelial | Human Dermal Endothelial Cells; | | | | pSport1 |
| | Cells, untreated | untreated | | | | |
| H0537 | H. Primary Dendritic Cells, lib 3 | Primary Dendritic cells | | | | pCMVSport 2.0 |
| H0538 | Merkel Cells | Merkel cells | Lymph node | | | pSport1 |
| H0539 | Pancreas Islet Cell Tumor | Pancreas Islet Cell Tumour | Pancreas | | disease | pSport1 |
| H0542 | T Cell helper I | Helper T cell | | | | pCMVSport 3.0 |
| H0543 | T cell helper II | Helper T cell | | | | pCMVSport 3.0 |
| H0544 | Human endometrial stromal cells | Human endometrial stromal cells | | | | pCMVSport 3.0 |
| H0545 | Human endometrial stromal | Human endometrial stromal cells-treated | | | | pCMVSport 3.0 |
| | cells-treated with progesterone | with proge | | | | |
| H0546 | Human endometrial stromal | Human endometrial stromal cells-treated | | | | pCMVSport 3.0 |
| | cells-treated with estradiol | with estra | | | | |
| H0547 | NTERA2 teratocarcinoma cell | NTERA2, Teratocarcinoma cell line | | | | pSport1 |
| | line + retinoic acid (14 days) | | | | | |
| H0549 | H. Epididiymus, caput & corpus | Human Epididiymus, caput and corpus | | | | Uni-ZAP XR |
| H0550 | H. Epididiymus, cauda | Human Epididiymus, cauda | | | | Uni-ZAP XR |
| H0551 | Human Thymus Stromal Cells | Human Thymus Stromal Cells | | | | pCMVSport 3.0 |
| H0553 | Human Placenta | Human Placenta | | | | pCMVSport 3.0 |
| H0555 | Rejected Kidney, lib 4 | Human Rejected Kidney | Kidney | | disease | pCMVSport 3.0 |
| H0556 | Activated T- | T-Cells | Blood | Cell Line | | Uni-ZAP XR |
| | cell(12 h)/Thiouridine-re-excision | | | | | |
| H0559 | HL-60, PMA 4 H, re-excision | HL-60 Cells, PMA stimulated 4 H | Blood | Cell Line | | Uni-ZAP XR |
| H0560 | KMH2 | KMH2 | | | | pCMVSport 3.0 |
| H0561 | L428 | L428 | | | | pCMVSport 3.0 |
| H0562 | Human Fetal Brain, normalized | Human Fetal Brain | | | | pCMVSport 2.0 |
| | c5-11-26 | | | | | |
| H0563 | Human Fetal Brain, normalized | Human Fetal Brain | | | | pCMVSport 2.0 |
| | 50021F | | | | | |
| H0564 | Human Fetal Brain, normalized | Human Fetal Brain | | | | pCMVSport 2.0 |
| | C5001F | | | | | |
| H0566 | Human Fetal Brain, normalized | Human Fetal Brain | | | | pCMVSport 2.0 |
| | c50F | | | | | |
| H0567 | Human Fetal Brain, normalized | Human Fetal Brain | | | | pCMVSport 2.0 |
| | A5002F | | | | | |
| H0569 | Human Fetal Brain, normalized | Human Fetal Brain | | | | pCMVSport 2.0 |
| | CO | | | | | |
| H0570 | Human Fetal Brain, normalized | Human Fetal Brain | | | | pCMVSport 2.0 |
| | C500H | | | | | |
| H0571 | Human Fetal Brain, normalized | Human Fetal Brain | | | | pCMVSport 2.0 |
| | C500HE | | | | | |
| H0572 | Human Fetal Brain, normalized | Human Fetal Brain | | | | pCMVSport 2.0 |
| | AC5002 | | | | | |
| H0574 | Hepatocellular Tumor; re- | Hepatocellular Tumor | Liver | | disease | Lambda ZAP II |
| | excision | | | | | |
| H0575 | Human Adult Pulmonary; re- | Human Adult Pulmonary | Lung | | | Uni-ZAP XR |
| | excision | | | | | |
| H0576 | Resting T-Cell; re-excision | T-Cells | Blood | Cell Line | | Lambda ZAP II |
| H0578 | Human Fetal Thymus | Fetal Thymus | Thymus | | | pSport1 |
| H0580 | Dendritic cells, pooled | Pooled dendritic cells | | | | pCMVSport 3.0 |
| H0581 | Human Bone Marrow, treated | Human Bone Marrow | Bone Marrow | | | pCMVSport 3.0 |
| H0583 | B Cell lymphoma | B Cell Lymphoma | B Cell | | disease | pCMVSport 3.0 |
| H0584 | Activated T-cells, 24 hrs, re- | Activated T-Cells | Blood | Cell Line | | Uni-ZAP XR |
| | excision | | | | | |
| H0585 | Activated T-Cells, 12 hrs, re- | Activated T-Cells | Blood | Cell Line | | Uni-ZAP XR |
| | excision | | | | | |
| H0586 | Healing groin wound, 6.5 hours | healing groin wound, 6.5 hours post | groin | | disease | pCMVSport 3.0 |
| | post incision | incision - 2/ | | | | |
| H0587 | Healing groin wound; 7.5 hours | Groin-Feb. 19, 1997 | groin | | disease | pCMVSport 3.0 |
| | post incision | | | | | |
| H0589 | CD34 positive cells (cord | CD34 Positive Cells | Cord Blood | | | ZAP Express |
| | blood), re-ex | | | | | |
| H0590 | Human adult small intestine, re- | Human Adult Small Intestine | Small Int. | | | Uni-ZAP XR |
| | excision | | | | | |
| H0591 | Human T-cell lymphoma; re- | T-Cell Lymphoma | T-Cell | | disease | Uni-ZAP XR |
| | excision | | | | | |
| H0592 | Healing groin wound - zero hr | HGS wound healing project; abdomen | | | disease | pCMVSport 3.0 |
| | post-incision (control) | | | | | |
| H0593 | Olfactory epithelium; nasalcavity | Olfactory epithelium from roof of left | | | | pCMVSport 3.0 |
| | | nasal cacit | | | | |
| H0594 | Human Lung Cancer; re-excision | Human Lung Cancer | Lung | | disease | Lambda ZAP II |
| H0595 | Stomach cancer (human); re- | Stomach Cancer - 5383A (human) | | | disease | Uni-ZAP XR |
| | excision | | | | | |
| H0596 | Human Colon Cancer; re-excision | Human Colon Cancer | Colon | | | Lambda ZAP II |
| H0597 | Human Colon; re-excision | Human Colon | | | | Lambda ZAP II |
| H0598 | Human Stomach; re-excision | Human Stomach | Stomach | | | Uni-ZAP XR |
| H0599 | Human Adult Heart; re-excision | Human Adult Heart | Heart | | | Uni-ZAP XR |
| H0600 | Healing Abdomen wound; 70&90 min | Abdomen | | | disease | pCMVSport 3.0 |
| | post incision | | | | | |
| H0601 | Healing Abdomen Wound; 15 | Abdomen | | | disease | pCMVSport 3.0 |
| | days post incision | | | | | |
| H0602 | Healing Abdomen Wound; 21&29 | Abdomen | | | disease | pCMVSport 3.0 |
| | days post incision | | | | | |
| H0604 | Human Pituitary, re-excision | Human Pituitary | | | | pBluescript |
| H0606 | Human Primary Breast | Human Primary Breast Cancer | Breast | | disease | Uni-ZAP XR |
| | Cancer; re-excision | | | | | |
| H0613 | H. Leukocytes, normalized cot 5B | H. Leukocytes | | | | pCMVSport 1 |
| H0614 | H. Leukocytes, normalized cot | H. Leukocytes | | | | pCMVSport 1 |
| | 500 A | | | | | |
| H0615 | Human Ovarian Cancer | Ovarian Cancer | Ovary | | disease | Uni-ZAP XR |
| | Reexcision | | | | | |
| H0616 | Human Testes, Reexcision | Human Testes | Testis | | | Uni-ZAP XR |
| H0617 | Human Primary Breast Cancer | Human Primary Breast Cancer | Breast | | disease | Uni-ZAP XR |
| | Reexcision | | | | | |
| H0618 | Human Adult Testes, Large | Human Adult Testis | Testis | | | Uni-ZAP XR |
| | Inserts, Reexcision | | | | | |
| H0619 | Fetal Heart | Human Fetal Heart | Heart | | | Uni-ZAP XR |
| H0620 | Human Fetal Kidney; Reexcision | Human Fetal Kidney | Kidney | | | Uni-ZAP XR |
| H0622 | Human Pancreas Tumor; | Human Pancreas Tumor | Pancreas | | disease | Uni-ZAP XR |
| | Reexcision | | | | | |
| H0623 | Human Umbilical Vein; | Human Umbilical Vein Endothelial Cells | Umbilical vein | | | Uni-ZAP XR |
| | Reexcision | | | | | |
| H0624 | 12 Week Early Stage Human II; | Twelve Week Old Early Stage Human | Embryo | | | Uni-ZAP XR |
| | Reexcision | | | | | |
| H0625 | Ku 812F Basophils Line | Ku 812F Basophils | | | | pSport1 |
| H0626 | Saos2 Cells; Untreated | Saos2 Cell Line; Untreated | | | | pSport1 |
| H0627 | Saos2 Cells; Vitamin D3 Treated | Saos2 Cell Line; Vitamin D3 Treated | | | | pSport1 |
| H0628 | Human Pre-Differentiated | Human Pre-Differentiated Adipocytes | | | | Uni-ZAP XR |
| | Adipocytes | | | | | |
| H0631 | Saos2, Dexamethosome Treated | Saos2 Cell Line; Dexamethosome | | | | pSport1 |
| | | Treated | | | | |
| H0632 | Hepatocellular Tumor; re-excision | Hepatocellular Tumor | Liver | | | Lambda ZAP II |
| H0633 | Lung Carcinoma A549 TNFalpha | TNFalpha activated A549 - Lung | | | disease | pSport1 |
| | activated | Carcinoma | | | | |
| H0634 | Human Testes Tumor, re- | Human Testes Tumor | Testis | | disease | Uni-ZAP XR |
| | excision | | | | | |
| H0635 | Human Activated T-Cells, re- | Activated T-Cells | Blood | Cell Line | | Uni-ZAP XR |
| | excision | | | | | |
| H0637 | Dendritic Cells From CD34 Cells | Dentritic cells from CD34 cells | | | | pSport1 |
| H0638 | CD40 activated monocyte | CD40 activated monocyte dendridic cells | | | | pSport1 |
| | dendridic cells | | | | | |
| H0640 | Ficolled Human Stromal Cells, | Ficolled Human Stromal Cells, Untreated | | | | Other |
| | Untreated | | | | | |
| H0641 | LPS activated derived dendritic | LPS activated monocyte derived | | | | pSport1 |
| | cells | dendritic cells | | | | |
| H0642 | Hep G2 Cells, lambda library | Hep G2 Cells | | | | Other |
| H0643 | Hep G2 Cells, PCR library | Hep G2 Cells | | | | Other |
| H0644 | Human Placenta (re-excision) | Human Placenta | Placenta | | | Uni-ZAP XR |
| H0645 | Fetal Heart, re-excision | Human Fetal Heart | Heart | | | Uni-ZAP XR |
| H0646 | Lung, Cancer (4005313 A3): | Metastatic squamous cell lung | | | | pSport1 |
| | Invasive Poorly Differentiated | carcinoma, poorly di | | | | pSport1 |
| | Lung Adenocarcinoma, | | | | | |
| H0647 | Lung, Cancer (4005163 B7): | Invasive poorly differentiated lung | | | disease | pSport1 |
| | Invasive, Poorly Diff. | adenocarcinoma | | | | |
| | Adenocarcinoma, Metastatic | | | | | |
| H0648 | Ovary, Cancer: (4004562 B6) | Papillary Cstic neoplasm of low | | | disease | pSport1 |
| | Papillary Serous Cystic | malignant potentia | | | | |
| | Neoplasm, Low Malignant Pot | | | | | |
| H0649 | Lung, Normal: (4005313 B1) | Normal Lung | | | | pSport1 |
| H0650 | B-Cells | B-Cells | | | | pCMVSport 3.0 |
| H0651 | Ovary, Normal: (9805C040R) | Normal Ovary | | | | pSport1 |
| H0652 | Lung, Normal: (4005313 B1) | Normal Lung | | | | pSport1 |
| H0653 | Stromal Cells | Stromal Cells | | | | pSport1 |
| H0654 | Lung, Cancer: (4005313 A3) | Metastatic Squamous cell lung | | | | Other |
| | Invasive Poorly-differentiated | Carcinoma poorly dif | | | | |
| | Metastatic lung adenoc | | | | | |
| H0656 | B-cells (unstimulated) | B-cells (unstimulated) | | | | pSport1 |
| H0657 | B-cells (stimulated) | B-cells (stimulated) | | | | pSport1 |
| H0658 | Ovary, Cancer (9809C332): Poorly differentiated | 9809C332 - Poorly differentiate | Ovary & Fallopian Tubes | | disease | pSport1 |
| | adenocarcinoma | | | | | |
| H0659 | Ovary, Cancer (15395A1F): | Grade II Papillary Carcinoma, Ovary | Ovary | | disease | pSport1 |
| | Grade II Papillary Carcinoma | | | | | |
| H0660 | Ovary, Cancer: (15799A1F) | Poorly differentiated carcinoma, ovary | | | disease | pSport1 |
| | Poorly differentiated carcinoma | | | | | |
| H0661 | Breast, Cancer: (4004943 A5) | Breast cancer | | | disease | pSport1 |
| H0662 | Breast, Normal: (4005522B2) | Normal Breast - #4005522(B2) | Breast | | | pSport1 |
| H0663 | Breast, Cancer: (4005522 A2) | Breast Cancer - #4005522(A2) | Breast | | disease | pSport1 |
| H0664 | Breast, Cancer: (9806C012R) | Breast Cancer | Breast | | disease | pSport1 |
| H0665 | Stromal cells 3.88 | Stromal cells 3.88 | | | | pSport1 |
| H0666 | Ovary, Cancer: (4004332 A2) | Ovarian Cancer, Sample #4004332A2 | | | disease | pSport1 |
| H0667 | Stromal cells(HBM3.18) | Stromal cell(HBM 3.18) | | | | pSport1 |
| H0668 | stromal cell clone 2.5 | stromal cell clone 2.5 | | | | pSport1 |
| H0669 | Breast, Cancer: (4005385 A2) | Breast Cancer (4005385A2) | Breast | | | pSport1 |
| H0670 | Ovary, Cancer(4004650 A3): | Ovarian Cancer - 4004650A3 | | | | pSport1 |
| | Well-Differentiated | | | | | |
| | Micropapillary Serous Carcinoma | | | | | |
| H0671 | Breast, Cancer: (9802C02OE) | Breast Cancer - Sample # 9802C02OE | | | | pSport1 |
| H0672 | Ovary, Cancer: (4004576 A8) | Ovarian Cancer(4004576A8) | Ovary | | | pSport1 |
| H0673 | Human Prostate Cancer, Stage | Human Prostate Cancer, stage B2 | Prostate | | | Uni-ZAP XR |
| | B2; re-excision | | | | | |
| H0674 | Human Prostate Cancer, Stage C; | Human Prostate Cancer, stage C | Prostate | | | Uni-ZAP XR |
| | re-excission | | | | | |
| H0675 | Colon, Cancer: (9808C064R) | Colon Cancer 9808C064R | | | | pCMVSport 3.0 |
| H0677 | TNFR degenerate oligo | B-Cells | | | | PCRII |
| H0678 | screened clones from placental | Placenta | Placenta | | | Other |
| | library | | | | | |
| H0682 | Serous Papillary | serous papillary adenocarcinoma | | | | pCMVSport 3.0 |
| | Adenocarcinoma | (9606G304SPA3B) | | | | |
| H0683 | Ovarian Serous Papillary | Serous papillary adenocarcinoma, stage | | | | pCMVSport 3.0 |
| | Adenocarcinoma | 3C (9804G01 | | | | |
| H0684 | Serous Papillary | Ovarian Cancer - 9810G606 | Ovaries | | | pCMVSport 3.0 |
| | Adenocarcinoma | | | | | |
| H0685 | Adenocarcinoma of Ovary, | Adenocarcinoma of Ovary, Human Cell | | | | pCMVSport 3.0 |
| | Human Cell Line, # OVCAR-3 | Line, # OVCAR- | | | | |
| H0686 | Adenocarcinoma of Ovary, | Adenocarcinoma of Ovary, Human Cell | | | | pCMVSport 3.0 |
| | Human Cell Line | Line, # SW-626 | | | | |
| H0687 | Human normal | Human normal ovary(#9610G215) | Ovary | | | pCMVSport 3.0 |
| | ovary(#9610G215) | | | | | |
| H0688 | Human Ovarian | Human Ovarian | | | | pCMVSport 3.0 |
| | Cancer(#9807G017) | cancer(#9807G017), mRNA from Maura | | | | |
| | | Ru | | | | |
| H0689 | Ovarian Cancer | Ovarian Cancer, #9806G019 | | | | pCMVSport 3.0 |
| H0690 | Ovarian Cancer, # 9702G001 | Ovarian Cancer, #9702G001 | | | | pCMVSport 3.0 |
| H0691 | Normal Ovary, #9710G208 | normal ovary, #9710G208 | | | | pCMVSport 3.0 |
| H0692 | BLyS Receptor from Expression | B Cell Lymphoma | B Cell | | | pCMVSport 3.0 |
| | Cloning | | | | | |
| H0693 | Normal Prostate #ODQ3958EN | Normal Prostate Tissue # ODQ3958EN | | | | pCMVSport 3.0 |
| H0694 | Prostate gland adenocarcinoma | Prostate gland, adenocarcinoma, | prostate gland | | | pCMVSport 3.0 |
| | | mod/diff, gleason | | | | |
| H0695 | mononucleocytes from patient | mononucleocytes from patient at Shady | | | | pCMVSport 3.0 |
| | | Grove Hospit | | | | |
| N0003 | Human Fetal Brain | Human Fetal Brain | | | | |
| N0006 | Human Fetal Brain | Human Fetal Brain | | | | |
| N0007 | Human Hippocampus | Human Hippocampus | | | | |
| N0009 | Human Hippocampus, | Human Hippocampus | | | | |
| | prescreened | | | | | |
| S0001 | Brain frontal cortex | Brain frontal cortex | Brain | | | Lambda ZAP II |
| S0002 | Monocyte activated | Monocyte-activated | blood | Cell Line | | Uni-ZAP XR |
| S0003 | Human Osteoclastoma | Osteoclastoma | bone | | disease | Uni-ZAP XR |
| S0004 | Prostate | Prostate BPH | Prostate | | | Lambda ZAP II |
| S0006 | Neuroblastoma | Human Neural Blastoma | | | disease | pCDNA |
| S0007 | Early Stage Human Brain | Human Fetal Brain | | | | Uni-ZAP XR |
| S0010 | Human Amygdala | Amygdala | | | | Uni-ZAP XR |
| S0011 | STROMAL - | Osteoclastoma | bone | | disease | Uni-ZAP XR |
| | OSTEOCLASTOMA | | | | | |
| S0013 | Prostate | Prostate | prostate | | | Uni-ZAP XR |
| S0014 | Kidney Cortex | Kidney cortex | Kidney | | | Uni-ZAP XR |
| S0015 | Kidney medulla | Kidney medulla | Kidney | | | Uni-ZAP XR |
| S0016 | Kidney Pyramids | Kidney pyramids | Kidney | | | Uni-ZAP XR |
| S0022 | Human Osteoclastoma Stromal | Osteoclastoma Stromal Cells | | | | Uni-ZAP XR |
| | Cells - unamplified | | | | | |
| S0024 | Human Kidney Medulla - | Human Kidney Medulla | | | | |
| | unamplified | | | | | |
| S0026 | Stromal cell TF274 | stromal cell | Bone marrow | Cell Line | | Uni-ZAP XR |
| S0027 | Smooth muscle, serum treated | Smooth muscle | Pulmanary artery | Cell Line | | Uni-ZAP XR |
| S0028 | Smooth muscle, control | Smooth muscle | Pulmanary artery | Cell Line | | Uni-ZAP XR |
| S0029 | brain stem | Brain stem | brain | | | Uni-ZAP XR |
| S0031 | Spinal cord | Spinal cord | spinal cord | | | Uni-ZAP XR |
| S0032 | Smooth muscle-ILb induced | Smooth muscle | Pulmanary artery | Cell Line | | Uni-ZAP XR |
| S0036 | Human Substantia Nigra | Human Substantia Nigra | | | | Uni-ZAP XR |
| S0037 | Smooth muscle, IL1b induced | Smooth muscle | Pulmanary artery | Cell Line | | Uni-ZAP XR |
| S0038 | Human Whole Brain #2 - Oligo | Human Whole Brain #2 | | | | ZAP Express |
| | dT > 1.5 Kb | | | | | |
| S0039 | Hypothalamus | Hypothalamus | Brain | | | Uni-ZAP XR |
| S0040 | Adipocytes | Human Adipocytes from Osteoclastoma | | | | Uni-ZAP XR |
| S0042 | Testes | Human Testes | | | | ZAP Express |
| S0044 | Prostate BPH | prostate BPH | Prostate | | disease | Uni-ZAP XR |
| S0045 | Endothelial cells-control | Endothelial cell | endothelial cell-lung | Cell Line | | Uni-ZAP XR |
| S0046 | Endothelial-induced | Endothelial cell | endothelial cell-lung | Cell Line | | Uni-ZAP XR |
| S0048 | Human Hypothalamus, | Human Hypothalamus, Alzheimer''s | | | disease | Uni-ZAP XR |
| | Alzheimer''s | | | | | |
| S0049 | Human Brain, Striatum | Human Brain, Striatum | | | | Uni-ZAP XR |
| S0050 | Human Frontal Cortex, | Human Frontal Cortex, Schizophrenia | | | disease | Uni-ZAP XR |
| | Schizophrenia | | | | | |
| S0051 | Human | Human Hypothalamus, Schizophrenia | | | disease | Uni-ZAP XR |
| | Hypothalmus, Schizophrenia | | | | | |
| S0052 | neutrophils control | human neutrophils | blood | Cell Line | | Uni-ZAP XR |
| S0053 | Neutrophils IL-1 and LPS | human neutrophil induced | blood | Cell Line | | Uni-ZAP XR |
| | induced | | | | | |
| S0106 | STRIATUM DEPRESSION | | BRAIN | | disease | Uni-ZAP XR |
| S0110 | Brain Amygdala Depression | | Brain | | disease | Uni-ZAP XR |
| S0112 | Hypothalamus | | Brain | | | Uni-ZAP XR |
| S0114 | Anergic T-cell | Anergic T-cell | | Cell Line | | Uni-ZAP XR |
| S0116 | Bone marrow | Bone marrow | Bone marrow | | | Uni-ZAP XR |
| S0122 | Osteoclastoma-normalized A | Osteoclastoma | bone | | disease | pBluescript |
| S0124 | Smooth muscle-edited A | Smooth muscle | Pulmanary artery | Cell Line | | Uni-ZAP XR |
| S0126 | Osteoblasts | Osteoblasts | Knee | Cell Line | | Uni-ZAP XR |
| S0132 | Epithelial-TNFa and INF induced | Airway Epithelial | | | | Uni-ZAP XR |
| S0134 | Apoptotic T-cell | apoptotic cells | | Cell Line | | Uni-ZAP XR |
| S0136 | PERM TF274 | stromal cell | Bone marrow | Cell Line | | Lambda ZAP II |
| S0140 | eosinophil-IL5 induced | eosinophil | lung | Cell Line | | Uni-ZAP XR |
| S0142 | Macrophage-oxLDL | macrophage-oxidized LDL treated | blood | Cell Line | | Uni-ZAP XR |
| S0144 | Macrophage (GM-CSF treated) | Macrophage (GM-CSF treated) | | | | Uni-ZAP XR |
| S0146 | prostate-edited | prostate BPH | Prostate | | | Uni-ZAP XR |
| S0148 | Normal Prostate | Prostate | prostate | | | Uni-ZAP XR |
| S0150 | LNCAP prostate cell line | LNCAP Cell Line | Prostate | Cell Line | | Uni-ZAP XR |
| S0152 | PC3 Prostate cell line | PC3 prostate cell line | | | | Uni-ZAP XR |
| S0168 | Prostate/LNCAP, subtraction I | PC3 prostate cell line | | | | pBluescript |
| S0176 | Prostate, normal, subtraction I | Prostate | prostate | | | Uni-ZAP XR |
| S0180 | Bone Marrow Stroma, TNF&LPS | Bone Marrow Stroma, TNF & LPS | | | disease | Uni-ZAP XR |
| | ind | induced | | | | |
| S0182 | Human B Cell 8866 | Human B-Cell 8866 | | | | Uni-ZAP XR |
| S0190 | Prostate BPH, Lib 2, subtracted | Human Prostate BPH | | | | pSport1 |
| S0192 | Synovial Fibroblasts (control) | Synovial Fibroblasts | | | | pSport1 |
| S0194 | Synovial hypoxia | Synovial Fibroblasts | | | | pSport1 |
| S0196 | Synovial IL-1/TNF stimulated | Synovial Fibroblasts | | | | pSport1 |
| S0206 | Smooth Muscle-HASTE | Smooth muscle | Pulmanary artery | Cell Line | | pBluescript |
| | normalized | | | | | |
| S0208 | Messangial cell, frac 1 | Messangial cell | | | | pSport1 |
| S0210 | Messangial cell, frac 2 | Messangial cell | | | | pSport1 |
| S0212 | Bone Marrow Stromal Cell, | Bone Marrow Stromal Cell, untreated | | | | pSport1 |
| | untreated | | | | | |
| S0214 | Human Osteoclastoma, re- | Osteoclastoma | bone | | disease | Uni-ZAP XR |
| | excision | | | | | |
| S0216 | Neutrophils IL-1 and LPS | human neutrophil induced | blood | Cell Line | | Uni-ZAP XR |
| | induced | | | | | |
| S0218 | Apoptotic T-cell, re-excision | apoptotic cells | | Cell Line | | Uni-ZAP XR |
| S0220 | H. hypothalamus, frac A; re- | Hypothalamus | Brain | | | ZAP Express |
| | excision | | | | | |
| S0222 | H. Frontal cortex, epileptic; re- | H. Brain, Frontal Cortex, Epileptic | Brain | | disease | Uni-ZAP XR |
| | excision | | | | | |
| S0242 | Synovial Fibroblasts (III/TNF), | Synovial Fibroblasts | | | | pSport1 |
| | subt | | | | | |
| S0250 | Human Osteoblasts II | Human Osteoblasts | Femur | | disease | pCMVSport 2.0 |
| S0260 | Spinal Cord, re-excision | Spinal cord | spinal cord | | | Uni-ZAP XR |
| S0276 | Synovial hypoxia-RSF subtracted | Synovial fobroblasts (rheumatoid) | Synovial tissue | | | pSport1 |
| S0278 | H Macrophage (GM-CSF | Macrophage (GM-CSF treated) | | | | Uni-ZAP XR |
| | treated), re-excision | | | | | |
| S0280 | Human Adipose Tissue, re- | Human Adipose Tissue | | | | Uni-ZAP XR |
| | excision | | | | | |
| S0282 | Brain Frontal Cortex, re-excision | Brain frontal cortex | Brain | | | Lambda ZAP II |
| S0292 | Osteoarthritis (OA-4) | Human Osteoarthritic Cartilage | Bone | | disease | pSport1 |
| S0294 | Larynx tumor | Larynx tumor | Larynx, vocal cord | | disease | pSport1 |
| S0298 | Bone marrow stroma, treated | Bone marrow stroma, treatedSB | Bone marrow | | | pSport1 |
| S0300 | Frontal lobe, dementia; re-excision | Frontal Lobe dementia/Alzheimer''s | Brain | | | Uni-ZAP XR |
| S0306 | Larynx normal #10 261-273 | Larynx normal | | | | pSport1 |
| S0308 | Spleen/normal | Spleen normal | | | | pSport1 |
| S0310 | Normal trachea | Normal trachea | | | | pSport1 |
| S0312 | Human osteoarthritic; fraction II | Human osteoarthritic cartilage | | | disease | pSport1 |
| S0314 | Human osteoarthritis; fraction I | Human osteoarthritic cartilage | | | disease | pSport1 |
| S0316 | Human Normal | Human Normal Cartilage | | | | pSport1 |
| | Cartilage, Fraction I | | | | | |
| S0318 | Human Normal Cartilage | Human Normal Cartilage | | | | pSport1 |
| | Fraction II | | | | | |
| S0328 | Palate carcinoma | Palate carcinoma | Uvula | | disease | pSport1 |
| S0330 | Palate normal | Palate normal | Uvula | | | pSport1 |
| S0332 | Pharynx carcinoma | Pharynx carcinoma | Hypopharynx | | | pSport1 |
| S0334 | Human Normal Cartilage | Human Normal Cartilage | | | | pSport1 |
| | Fraction III | | | | | |
| S0336 | Human Normal Cartilage | Human Normal Cartilage | | | | pSport1 |
| | Fraction IV | | | | | |
| S0338 | Human Osteoarthritic Cartilage | Human osteoarthritic cartilage | | | disease | pSport1 |
| | Fraction III | | | | | |
| S0340 | Human Osteoarthritic Cartilage | Human osteoarthritic cartilage | | | disease | pSport1 |
| | Fraction IV | | | | | |
| S0342 | Adipocytes; re-excision | Human Adipocytes from Osteoclastoma | | | | Uni-ZAP XR |
| S0344 | Macrophage-oxLDL; re-excision | macrophage-oxidized LDL treated | blood | Cell Line | | Uni-ZAP XR |
| S0346 | Human Amygdala; re-excision | Amygdala | | | | Uni-ZAP XR |
| S0348 | Cheek Carcinoma | Cheek Carcinoma | | | disease | pSport1 |
| S0350 | Pharynx Carcinoma | Pharynx carcinoma | Hypopharynx | | disease | pSport1 |
| S0354 | Colon Normal II | Colon Normal | Colon | | | pSport1 |
| S0356 | Colon Carcinoma | Colon Carcinoma | Colon | | disease | pSport1 |
| S0358 | Colon Normal III | Colon Normal | Colon | | | pSport1 |
| S0360 | Colon Tumor II | Colon Tumor | Colon | | disease | pSport1 |
| S0362 | Human Gastrocnemius | Gastrocnemius muscle | | | | pSport1 |
| S0364 | Human Quadriceps | Quadriceps muscle | | | | pSport1 |
| S0366 | Human Soleus | Soleus Muscle | | | | pSport1 |
| S0368 | Human Pancreatic Langerhans | Islets of Langerhans | | | | pSport1 |
| S0370 | Larynx carcinoma II | Larynx carcinoma | | | disease | pSport1 |
| S0372 | Larynx carcinoma III | Larynx carcinoma | | | disease | pSport1 |
| S0374 | Normal colon | Normal colon | | | | pSport1 |
| S0376 | Colon Tumor | Colon Tumor | | | disease | pSport1 |
| S0378 | Pancreas normal PCA4 No | Pancreas Normal PCA4 No | | | | pSport1 |
| S0380 | Pancreas Tumor PCA4 Tu | Pancreas Tumor PCA4 Tu | | | disease | pSport1 |
| S0382 | Larynx carcinoma IV | Larynx carcinoma | | | disease | pSport1 |
| S0386 | Human Whole Brain, re-excision | Whole brain | Brain | | | ZAP Express |
| S0388 | Human | Human Hypothalamus, Schizophrenia | | | disease | Uni-ZAP XR |
| | Hypothalamus, schizophrenia, re- | | | | | |
| | excision | | | | | |
| S0390 | Smooth muscle, control; re- | Smooth muscle | Pulmanary artery | Cell Line | | Uni-ZAP XR |
| | excision | | | | | |
| S0392 | Salivary Gland | Salivary gland; normal | | | | pSport1 |
| S0394 | Stomach; normal | Stomach; normal | | | | pSport1 |
| S0398 | Testis; normal | Testis; normal | | | | pSport1 |
| S0400 | Brain; normal | Brain; normal | | | | pSport1 |
| S0402 | Adrenal Gland, normal | Adrenal gland; normal | | | | pSport1 |
| S0404 | Rectum normal | Rectum, normal | | | | pSport1 |
| S0406 | Rectum tumour | Rectum tumour | | | | pSport1 |
| S0408 | Colon, normal | Colon, normal | | | | pSport1 |
| S0410 | Colon, tumour | Colon, tumour | | | | pSport1 |
| S0412 | Temporal cortex-Alzheizmer; | Temporal cortex, alzheimer | | | disease | Other |
| | subtracted | | | | | |
| S0414 | Hippocampus, Alzheimer | Hippocampus, Alzheimer Subtracted | | | | Other |
| | Subtracted | | | | | |
| S0418 | CHME Cell Line; treated 5 hrs | CHME Cell Line; treated | | | | pCMVSport 3.0 |
| S0420 | CHME Cell Line, untreated | CHME Cell line, untreatetd | | | | pSport1 |
| S0422 | Mo7e Cell Line GM-CSF treated | Mo7e Cell Line GM-CSF treated | | | | pCMVSport 3.0 |
| | (1 ng/ml) | (1 ng/ml) | | | | |
| S0424 | TF-1 Cell Line GM-CSF Treated | TF-1 Cell Line GM-CSF Treated | | | | pSport1 |
| S0426 | Monocyte activated; re-excision | Monocyte-activated | blood | Cell Line | | Uni-ZAP XR |
| S0428 | Neutrophils control; re-excision | human neutrophils | blood | Cell Line | | Uni-ZAP XR |
| S0430 | Aryepiglottis Normal | Aryepiglottis Normal | | | | pSport1 |
| S0432 | Sinus piniformis Tumour | Sinus piniformis Tumour | | | | pSport1 |
| S0434 | Stomach Normal | Stomach Normal | | | disease | pSport1 |
| S0436 | Stomach Tumour | Stomach Tumour | | | disease | pSport1 |
| S0438 | Liver Normal Met5No | Liver Normal Met5No | | | | pSport1 |
| S0440 | Liver Tumour Met 5 Tu | Liver Tumour | | | | pSport1 |
| S0442 | Colon Normal | Colon Normal | | | | pSport1 |
| S0444 | Colon Tumor | Colon Tumour | | | disease | pSport1 |
| S0446 | Tongue Tumour | Tongue Tumour | | | | pSport1 |
| S0448 | Larynx Normal | Larynx Normal | | | | pSport1 |
| S0450 | Larynx Tumour | Larynx Tumour | | | | pSport1 |
| S0452 | Thymus | Thymus | | | | pSport1 |
| S0454 | Placenta | Placenta | Placenta | | | pSport1 |
| S0456 | Tongue Normal | Tongue Normal | | | | pSport1 |
| S0458 | Thyroid Normal (SDCA2 No) | Thyroid normal | | | | pSport1 |
| S0460 | Thyroid Tumour | Thyroid Tumour | | | | pSport1 |
| S0462 | Thyroid Thyroiditis | Thyroid Thyroiditis | | | | pSport1 |
| S0464 | Larynx Normal | Larynx Normal | | | | pSport1 |
| S0468 | Ea.hy.926 cell line | Ea.hy.926 cell line | | | | pSport1 |
| S0470 | Adenocarcinoma | PYFD | | | disease | pSport1 |
| S0474 | Human blood platelets | Platelets | Blood platelets | | | Other |
| S0665 | Human Amygdala; re-excission | Amygdala | | | | Uni-ZAP XR |
| S3012 | Smooth Muscle Serum Treated, | Smooth muscle | Pulmanary artery | Cell Line | | pBluescript |
| | Norm | | | | | |
| S3014 | Smooth muscle, serum | Smooth muscle | Pulmanary artery | Cell Line | | pBluescript |
| | induced, re-exc | | | | | |
| S6014 | H. hypothalamus, frac A | Hypothalamus | Brain | | | ZAP Express |
| S6016 | H. Frontal Cortex, Epileptic | H. Brain, Frontal Cortex, Epileptic | Brain | | disease | Uni-ZAP XR |
| S6022 | H. Adipose Tissue | Human Adipose Tissue | | | | Uni-ZAP XR |
| S6024 | Alzheimers, spongy change | Alzheimer''s/Spongy change | Brain | | disease | Uni-ZAP XR |
| S6026 | Frontal Lobe, Dementia | Frontal Lobe dementia/Alzheimer''s | Brain | | | Uni-ZAP XR |
| S6028 | Human Manic Depression Tissue | Human Manic depression tissue | Brain | | disease | Uni-ZAP XR |
| T0002 | Activated T-cells | Activated T-Cell, PBL fraction | Blood | Cell Line | | pBluescript SK− |
| T0003 | Human Fetal Lung | Human Fetal Lung | | | | pBluescript SK− |
| T0004 | Human White Fat | Human White Fat | | | | pBluescript SK− |
| T0006 | Human Pineal Gland | Human Pinneal Gland | | | | pBluescript SK− |
| T0008 | Colorectal Tumor | Colorectal Tumor | | | disease | pBluescript SK− |
| T0010 | Human Infant Brain | Human Infant Brain | | | | Other |
| T0023 | Human Pancreatic Carcinoma | Human Pancreatic Carcinoma | | | disease | pBluescript SK− |
| T0039 | HSA 172 Cells | Human HSA172 cell line | | | | pBluescript SK− |
| T0040 | HSC172 cells | SA172 Cells | | | | pBluescript SK− |
| T0041 | Jurkat T-cell G1 phase | Jurkat T-cell | | | | pBluescript SK− |
| T0042 | Jurkat T-Cell, S phase | Jurkat T-Cell Line | | | | pBluescript SK− |
| T0048 | Human Aortic Endothelium | Human Aortic Endothilium | | | | pBluescript SK− |
| T0049 | Aorta endothelial cells + TNF-a | Aorta endothelial cells | | | | pBluescript SK− |
| T0060 | Human White Adipose | Human White Fat | | | | pBluescript SK− |
| T0067 | Human Thyroid | Human Thyroid | | | | pBluescript SK− |
| T0068 | Normal Ovary, Premenopausal | Normal Ovary, Premenopausal | | | | pBluescript SK− |
| T0069 | Human Uterus, normal | Human Uterus, normal | | | | pBluescript SK− |
| T0071 | Human Bone Marrow | Human Bone Marrow | | | | pBluescript SK− |
| T0082 | Human Adult Retina | Human Adult Retina | | | | pBluescript SK− |
| T0103 | Human colon carcinoma (HCC) | | | | | pBluescript SK− |
| | cell line | | | | | |
| T0104 | HCC cell line metastisis to liver | | | | | pBluescript SK− |
| T0109 | Human (HCC) cell line liver | | | | | pBluescript SK− |
| | (mouse) metastasis, remake | | | | | |
| T0110 | Human colon carcinoma (HCC) | | | | | pBluescript SK− |
| | cell line, remake | | | | | |
| T0112 | Human (Caco-2) cell line, | | | | | pBluescript SK− |
| | adenocarcinoma, colon | | | | | |
| T0114 | Human (Caco-2) cell line, | | | | | pBluescript SK− |
| | adenocarcinoma, colon, remake | | | | | |
| T0115 | Human Colon Carcinoma (HCC) | | | | | pBluescript SK− |
| | cell line | | | | | |
| L0002 | Atrium cDNA library Human | | | | | |
| | heart | | | | | |
| L0005 | Clontech human aorta polyA+ | | | | | |
| | mRNA (#6572) | | | | | |
| L0015 | Human | | | | | |
| L0018 | Human (M. Lovett) | | | | | |
| L0021 | Human adult (K. Okubo) | | | | | |
| L0022 | Human adult lung 3″ directed | | | | | |
| | Mbol cDNA | | | | | |
| L0040 | Human colon mucosa | | | | | |
| L0041 | Human epidermal keratinocyte | | | | | |
| L0045 | Human keratinocyte differential | | | | | |
| | display (B. Lin) | | | | | |
| L0053 | Human pancreatic tumor | | | | | |
| L0055 | Human promyelocyte | | | | | |
| L0060 | Human thymus NSTH II | | | | | |
| L0065 | Liver HepG2 cell line. | | | | | |
| L0070 | Selected chromosome 21 cDNA | | | | | |
| | library | | | | | |
| L0096 | Subtracted human retina | | | | | |
| L0103 | DKFZphamy1 | amygdala | | | | |
| L0105 | Human aorta polyA+ (TFujiwara) | aorta | | | | |
| L0142 | Human placenta cDNA | placenta | | | | |
| | (TFujiwara) | | | | | |
| L0143 | Human placenta polyA+ | placenta | | | | |
| | (TFujiwara) | | | | | |
| L0157 | Human fetal brain (TFujiwara) | | brain | | | |
| L0163 | Human heart cDNA | | heart | | | |
| | (YNakamura) | | | | | |
| L0183 | Human HeLa cells (M. Lovett) | | | HeLa | | |
| L0194 | Human pancreatic cancer cell line | pancreatic cancer | | Patu 8988t | | |
| | Patu 8988t | | | | | |
| L0351 | Infant brain, Bento Soares | | | | | BA, M13-derived |
| L0352 | Normalized infant brain, Bento | | | | | BA, M13-derived |
| | Soares | | | | | |
| L0355 | P, Human foetal Brain Whole tissue | | | | | Bluescript |
| L0356 | S, Human foetal Adrenals tissue | | | | | Bluescript |
| L0361 | Stratagene ovary (#937217) | | ovary | | | Bluescript SK |
| L0362 | Stratagene ovarian cancer | | | | | Bluescript SK− |
| | (#937219) | | | | | |
| L0363 | NCI_CGAP_GC2 | germ cell tumor | | | | Bluescript SK− |
| L0364 | NCI_CGAP_GC5 | germ cell tumor | | | | Bluescript SK− |
| L0365 | NCI_CGAP_Phe1 | pheochromocytoma | | | | Bluescript SK− |
| L0366 | Stratagene schizo brain S11 | schizophrenic brain S-11 frontal lobe | | | | Bluescript SK− |
| L0367 | NCI_CGAP_Sch1 | Schwannoma tumor | | | | Bluescript SK− |
| L0368 | NCI_CGAP_SS1 | synovial sarcoma | | | | Bluescript SK− |
| L0369 | NCI_CGAP_AA1 | adrenal adenoma | adrenal gland | | | Bluescript SK− |
| L0370 | Johnston frontal cortex | pooled frontal lobe | brain | | | Bluescript SK− |
| L0371 | NCI_CGAP_Br3 | breast tumor | breast | | | Bluescript SK− |
| L0372 | NCI_CGAP_Co12 | colon tumor | colon | | | Bluescript SK− |
| L0373 | NCI_CGAP_Co11 | tumor | colon | | | Bluescript SK− |
| L0374 | NCI_CGAP_Co2 | tumor | colon | | | Bluescript SK− |
| L0375 | NCI_CGAP_Kid6 | kidney tumor | kidney | | | Bluescript SK− |
| L0376 | NCI_CGAP_Lar1 | larynx | larynx | | | Bluescript SK− |
| L0378 | NCI_CGAP_Lu1 | lung tumor | lung | | | Bluescript SK− |
| L0381 | NCI_CGAP_HN4 | squamous cell carcinoma | pharynx | | | Bluescript SK− |
| L0382 | NCI_CGAP_Pr25 | epithelium (cell line) | prostate | | | Bluescript SK− |
| L0383 | NCI_CGAP_Pr24 | invasive tumor (cell line) | prostate | | | Bluescript SK− |
| L0384 | NCI_CGAP_Pr23 | prostate tumor | prostate | | | Bluescript SK− |
| L0385 | NCI_CGAP_Gas1 | gastric tumor | stomach | | | Bluescript SK− |
| L0386 | NCI_CGAP_HN3 | squamous cell carcinoma from base of tongue | tongue | | | Bluescript SK− |
| L0387 | NCI_CGAP_GCB0 | germinal center B-cells | tonsil | | | Bluescript SK− |
| L0388 | NCI_CGAP_HN6 | normal gingiva (cell line from | | | | Bluescript SK− |
| | | immortalized kerati | | | | |
| L0394 | H, Human adult Brain Cortex | | | | | gt11 |
| | tissue | | | | | |
| L0411 | 1-NIB | | | | | Lafmid BA |
| L0415 | b4HB3MA Cot8-HAP-Ft | | | | | Lafmid BA |
| L0428 | Cot1374Ft-4HB3MA | | | | | Lafmid BA |
| L0435 | Infant brain, LLNL array of Dr. | | | | | lafmid BA |
| | M. Soares 1NIB | | | | | |
| L0438 | normalized infant brain cDNA | total brain | brain | | | lafmid BA |
| L0439 | Soares infant brain 1NIB | | whole brain | | | Lafmid BA |
| L0446 | N4HB3MK | | | | | Lafmid BK |
| L0454 | Clontech adult human fat cell | | | | | lambda gt10 |
| | library HL1108A | | | | | |
| L0455 | Human retina cDNA randomly | retina | eye | | | lambda gt10 |
| | primed sublibrary | | | | | |
| L0456 | Human retina cDNA Tsp509I- | retina | eye | | | lambda gt10 |
| | cleaved sublibrary | | | | | |
| L0457 | multi-tissue normalized short- | multi-tissue | pooled | | | lambda gt10 |
| | fragment | | | | | |
| L0462 | WATM1 | | | | | lambda gt11 |
| L0463 | fetal brain cDNA | brain | brain | | | lambda gt11 |
| L0471 | Human fetal heart, Lambda ZAP | | | | | Lambda ZAP Express |
| | Express | | | | | |
| L0475 | KG1-a Lambda Zap Express | | | KG1-a | | Lambda Zap Express |
| | cDNA library | | | | | (Stratagene) |
| L0476 | Fetal brain, Stratagene | | | | | Lambda ZAP II |
| L0480 | Stratagene cat#937212(1992) | | | | | Lambda ZAP, pBluescript |
| | | | | | | SK(−) |
| L0481 | CD34+DIRECTIONAL | | | | | Lambda ZAPII |
| L0483 | Human pancreatic islet | | | | | Lambda ZAPII |
| L0485 | STRATAGENE Human skeletal muscle cDNA | skeletal muscle | leg muscle | | | Lambda ZAPII |
| | library, cat. | | | | | |
| | #936215. | | | | | |
| L0493 | NCI_CGAP_Ov26 | papillary serous carcinoma | ovary | | | pAMP1 |
| L0497 | NCI_CGAP_HSC4 | CD34+, CD38− from normal bone | bone marrow | | | pAMP1 |
| | | marrow donor | | | | |
| L0498 | NCI_CGAP_HSC3 | CD34+, T negative, patient with chronic | bone marrow | | | pAMP1 |
| | | myelogenou | | | | |
| L0499 | NCI_CGAP_HSC2 | stem cell 34+/38+ | bone marrow | | | pAMP1 |
| L0500 | NCI_CGAP_Brn20 | oligodendroglioma | brain | | | pAMP1 |
| L0502 | NCI_CGAP_Br15 | adenocarcinoma | breast | | | pAMP1 |
| L0503 | NCI_CGAP_Br17 | adenocarcinoma | breast | | | pAMP1 |
| L0504 | NCI_CGAP_Br13 | breast carcinoma in situ | breast | | | pAMP1 |
| L0505 | NCI_CGAP_Br12 | invasive carcinoma | breast | | | pAMP1 |
| L0506 | NCI_CGAP_Br16 | lobullar carcinoma in situ | breast | | | pAMP1 |
| L0507 | NCI_CGAP_Br14 | normal epithelium | breast | | | pAMP1 |
| L0508 | NCI_CGAP_Lu25 | bronchioalveolar carcinoma | lung | | | pAMP1 |
| L0509 | NCI_CGAP_Lu26 | invasive adenocarcinoma | lung | | | pAMP1 |
| L0510 | NCI_CGAP_Ov33 | borderline ovarian carcinoma | ovary | | | pAMP1 |
| L0511 | NCI_CGAP_Ov34 | borderline ovarian carcinoma | ovary | | | pAMP1 |
| L0512 | NCI_CGAP_Ov36 | borderline ovarian carcinoma | ovary | | | pAMP1 |
| L0513 | NCI_CGAP_Ov37 | early stage papillary serous carcinoma | ovary | | | pAMP1 |
| L0514 | NCI_CGAP_Ov31 | papillary serous carcinoma | ovary | | | pAMP1 |
| L0515 | NCI_CGAP_Ov32 | papillary serous carcinoma | ovary | | | pAMP1 |
| L0517 | NCI_CGAP_Pr1 | | | | | pAMP10 |
| L0518 | NCI_CGAP_Pr2 | | | | | pAMP10 |
| L0519 | NCI_CGAP_Pr3 | | | | | pAMP10 |
| L0520 | NCI_CGAP_Alv1 | alveolar rhabdomyosarcoma | | | | pAMP10 |
| L0521 | NCI_CGAP_Ew1 | Ewing''s sarcoma | | | | pAMP10 |
| L0522 | NCI_CGAP_Kid1 | kidney | | | | pAMP10 |
| L0523 | NCI_CGAP_Lip2 | liposarcoma | | | | pAMP10 |
| L0526 | NCI_CGAP_Pr12 | metastatic prostate bone lesion | | | | pAMP10 |
| L0527 | NCI_CGAP_Ov2 | ovary | | | | pAMP10 |
| L0528 | NCI_CGAP_Pr5 | prostate | | | | pAMP10 |
| L0529 | NCI_CGAP_Pr6 | prostate | | | | pAMP10 |
| L0530 | NCI_CGAP_Pr8 | prostate | | | | pAMP10 |
| L0532 | NCI_CGAP_Thy1 | thyroid | | | | pAMP10 |
| L0534 | Chromosome 7 Fetal Brain | brain | brain | | | pAMP10 |
| | cDNA Library | | | | | |
| L0539 | Chromosome 7 Placental cDNA | | placenta | | | pAMP10 |
| | Library | | | | | |
| L0540 | NCI_CGAP_Pr10 | invasive prostate tumor | prostate | | | pAMP10 |
| L0542 | NCI_CGAP_Pr11 | normal prostatic epithelial cells | prostate | | | pAMP10 |
| L0543 | NCI_CGAP_Pr9 | normal prostatic epithelial cells | prostate | | | pAMP10 |
| L0544 | NCI_CGAP_Pr4 | prostatic intraepithelial neoplasia - high | prostate | | | pAMP10 |
| | | grade | | | | |
| L0545 | NCI_CGAP_Pr4.1 | prostatic intraepithelial neoplasia - high | prostate | | | pAMP10 |
| | | grade | | | | |
| L0547 | NCI_CGAP_Pr16 | tumor | prostate | | | pAMP10 |
| L0549 | NCI_CGAP_HN10 | carcinoma in situ from retromolar trigone | | | | pAMP10 |
| L0550 | NCI_CGAP_HN9 | normal squamous epithelium from | | | | pAMP10 |
| | | retromolar trigone | | | | |
| L0551 | NCI_CGAP_HN7 | normal squamous epithelium, floor of | | | | pAMP10 |
| | | mouth | | | | |
| L0553 | NCI_CGAP_Co22 | colonic adenocarcinoma | colon | | | pAMP10 |
| L0558 | NCI_CGAP_Ov40 | endometrioid ovarian metastasis | ovary | | | pAMP10 |
| L0559 | NCI_CGAP_Ov39 | papillary serous ovarian metastasis | ovary | | | pAMP10 |
| L0560 | NCI_CGAP_HN12 | moderate to poorly differentiated invasive carcino | tongue | | | pAMP10 |
| L0561 | NCI_CGAP_HN11 | normal squamous epithelium | tongue | | | pAMP10 |
| L0562 | Chromosome 7 HeLa cDNA | | | HeLa cell line; | | pAMP10 |
| | Library | | | ATCC | | |
| L0564 | Jia bone marrow stroma | bone marrow stroma | | | | pBluescript |
| L0565 | Normal Human Trabecular Bone | Bone | Hip | | | pBluescript |
| | Cells | | | | | |
| L0581 | Stratagene liver (#937224) | | liver | | | pBluescript SK |
| L0586 | HTCDL1 | | | | | pBluescript SK(−) |
| L0587 | Stratagene colon HT29 | | | | | pBluescript SK− |
| | (#937221) | | | | | |
| L0588 | Stratagene endothelial cell | | | | | pBluescript SK− |
| | 937223 | | | | | |
| L0589 | Stratagene fetal retina 937202 | | | | | pBluescript SK− |
| L0590 | Stratagene fibroblast (#937212) | | | | | pBluescript SK− |
| L0591 | Stratagene HeLa cell s3 937216 | | | | | pBluescript SK− |
| L0592 | Stratagene hNT neuron | | | | | pBluescript SK− |
| | (#937233) | | | | | |
| L0593 | Stratagene neuroepithelium | | | | | pBluescript SK− |
| | (#937231) | | | | | |
| L0594 | Stratagene neuroepithelium | | | | | pBluescript SK− |
| | NT2RAMI 937234 | | | | | |
| L0595 | Stratagene NT2 neuronal | neuroepithelial cells | brain | | | pBluescript SK− |
| | precursor 937230 | | | | | |
| L0596 | Stratagene colon (#937204) | | colon | | | pBluescript SK− |
| L0597 | Stratagene corneal stroma | | cornea | | | pBluescript SK− |
| | (#937222) | | | | | |
| L0598 | Morton Fetal Cochlea | cochlea | ear | | | pBluescript SK− |
| L0599 | Stratagene lung (#937210) | | lung | | | pBluescript SK− |
| L0600 | Weizmann Olfactory Epithelium | olfactory epithelium | nose | | | pBluescript SK− |
| L0601 | Stratagene pancreas (#937208) | | pancreas | | | pBluescript SK− |
| L0602 | Pancreatic Islet | pancreatic islet | pancreas | | | pBluescript SK− |
| L0603 | Stratagene placenta (#937225) | | placenta | | | pBluescript SK− |
| L0604 | Stratagene muscle 937209 | muscle | skeletal muscle | | | pBluescript SK− |
| L0605 | Stratagene fetal spleen (#937205) | fetal spleen | spleen | | | pBluescript SK− |
| L0606 | NCI_CGAP_Lym5 | follicular lymphoma | lymph node | | | pBluescript SK− |
| L0607 | NCI_CGAP_Lym6 | mantle cell lymphoma | lymph node | | | pBluescript SK− |
| L0608 | Stratagene lung carcinoma | lung carcinoma | lung | NCI-H69 | | pBluescript SK− |
| | 937218 | | | | | |
| L0609 | Schiller astrocytoma | astrocytoma | brain | | | pBluescript SK− (Stratagene) |
| L0611 | Schiller meningioma | meningioma | brain | | | pBluescript SK− (Stratagene) |
| L0612 | Schiller oligodendroglioma | oligodendroglioma | brain | | | pBluescript SK− (Stratagene) |
| L0615 | 22 week old human fetal liver | | | | | pBluescriptII SK(−) |
| | cDNA library | | | | | |
| L0617 | Chromosome 22 exon | | | | | pBluscriptIIKS+ |
| L0622 | HM1 | | | | | pcDNAII (Invitrogen) |
| L0623 | HM3 | pectoral muscle (after mastectomy) | | | | pcDNAII (Invitrogen) |
| L0625 | NCI_CGAP_AR1 | bulk alveolar tumor | | | | pCMV-SPORT2 |
| L0626 | NCI_CGAP_GC1 | bulk germ cell seminoma | | | | pCMV-SPORT2 |
| L0628 | NCI_CGAP_Ov1 | ovary bulk tumor | ovary | | | pCMV-SPORT2 |
| L0629 | NCI_CGAP_Mel3 | metastatic melanoma to bowel | bowel (skin primary) | | | pCMV-SPORT4 |
| L0630 | NCI_CGAP_CNS1 | substantia nigra | brain | | | pCMV-SPORT4 |
| L0632 | NCI_CGAP_Li5 | hepatic adenoma | liver | | | pCMV-SPORT4 |
| L0633 | NCI_CGAP_Lu6 | small cell carcinoma | lung | | | pCMV-SPORT4 |
| L0634 | NCI_CGAP_Ov8 | serous adenocarcinoma | ovary | | | pCMV-SPORT4 |
| L0635 | NCI_CGAP_PNS1 | dorsal root ganglion | peripheral nervous | | | pCMV-SPORT4 |
| | | | system | | | |
| L0636 | NCI_CGAP_Pit1 | four pooled pituitary adenomas | brain | | | pCMV-SPORT6 |
| L0637 | NCI_CGAP_Brn53 | three pooled meningiomas | brain | | | pCMV-SPORT6 |
| L0638 | NCI_CGAP_Brn35 | tumor, 5 pooled (see description) | brain | | | pCMV-SPORT6 |
| L0639 | NCI_CGAP_Brn52 | tumor, 5 pooled (see description) | brain | | | pCMV-SPORT6 |
| L0640 | NCI_CGAP_Br18 | four pooled high-grade tumors, including | breast | | | pCMV-SPORT6 |
| | | two prima | | | | |
| L0641 | NCI_CGAP_Co17 | juvenile granulosa tumor | colon | | | pCMV-SPORT6 |
| L0642 | NCI_CGAP_Co18 | moderately differentiated | colon | | | pCMV-SPORT6 |
| | | adenocarcinoma | | | | |
| L0643 | NCI_CGAP_Co19 | moderately differentiated | colon | | | pCMV-SPORT6 |
| | | adenocarcinoma | | | | |
| L0644 | NCI_CGAP_Co20 | moderately differentiated | colon | | | pCMV-SPORT6 |
| | | adenocarcinoma | | | | |
| L0645 | NCI_CGAP_Co21 | moderately differentiated | colon | | | pCMV-SPORT6 |
| | | adenocarcinoma | | | | |
| L0646 | NCI_CGAP_Co14 | moderately-differentiated | colon | | | pCMV-SPORT6 |
| | | adenocarcinoma | | | | |
| L0647 | NCI_CGAP_Sar4 | five pooled sarcomas, including myxoid | connective tissue | | | pCMV-SPORT6 |
| | | liposarcoma | | | | |
| L0648 | NCI_CGAP_Eso2 | squamous cell carcinoma | esophagus | | | pCMV-SPORT6 |
| L0649 | NCI_CGAP_GU1 | 2 pooled high-grade transitional cell | genitourinary tract | | | pCMV-SPORT6 |
| | | tumors | | | | |
| L0650 | NCI_CGAP_Kid13 | 2 pooled Wilms'' tumors, one primary | kidney | | | pCMV-SPORT6 |
| | | and one metast | | | | |
| L0651 | NCI_CGAP_Kid8 | renal cell tumor | kidney | | | pCMV-SPORT6 |
| L0652 | NCI_CGAP_Lu27 | four pooled poorly-differentiated | lung | | | pCMV-SPORT6 |
| | | adenocarcinomas | | | | |
| L0653 | NCI_CGAP_Lu28 | two pooled squamous cell carcinomas | lung | | | pCMV-SPORT6 |
| L0654 | NCI_CGAP_Lu31 | | lung, cell line | | | pCMV-SPORT6 |
| L0655 | NCI_CGAP_Lym12 | lymphoma, follicular mixed small and | lymph node | | | pCMV-SPORT6 |
| | | large cell | | | | |
| L0656 | NCI_CGAP_Ov38 | normal epithelium | ovary | | | pCMV-SPORT6 |
| L0657 | NCI_CGAP_Ov23 | tumor, 5 pooled (see description) | ovary | | | pCMV-SPORT6 |
| L0658 | NCI_CGAP_Ov35 | tumor, 5 pooled (see description) | ovary | | | pCMV-SPORT6 |
| L0659 | NCI_CGAP_Pan1 | adenocarcinoma | pancreas | | | pCMV-SPORT6 |
| L0661 | NCI_CGAP_Mel15 | malignant melanoma, metastatic to | skin | | | pCMV-SPORT6 |
| | | lymph node | | | | |
| L0662 | NCI_CGAP_Gas4 | poorly differentiated adenocarcinoma | stomach | | | pCMV-SPORT6 |
| | | with signet r | | | | |
| L0663 | NCI_CGAP_Ut2 | moderately-differentiated endometrial | uterus | | | pCMV-SPORT6 |
| | | adenocarcino | | | | |
| L0664 | NCI_CGAP_Ut3 | poorly-differentiated endometrial | uterus | | | pCMV-SPORT6 |
| | | adenocarcinoma, | | | | |
| L0665 | NCI_CGAP_Ut4 | serous papillary carcinoma, high grade, 2 | uterus | | | pCMV-SPORT6 |
| | | pooled t | | | | |
| L0666 | NCI_CGAP_Ut1 | well-differentiated endometrial | uterus | | | pCMV-SPORT6 |
| | | adenocarcinoma, 7 | | | | |
| L0667 | NCI_CGAP_CML1 | myeloid cells, 18 pooled CML cases, | whole blood | | | pCMV-SPORT6 |
| | | BCR/ABL rearra | | | | |
| L0683 | Stanley Frontal NS pool 2 | frontal lobe (see description) | brain | | | pCR2.1-TOPO (Invitrogen) |
| L0686 | Stanley Frontal SN pool 2 | frontal lobe (see description) | brain | | | pCR2.1-TOPO (Invitrogen) |
| L0698 | Testis 2 | | | | | PGEM 5zf(+) |
| L0708 | NIH_MGC_17 | rhabdomyosarcoma | muscle | | | pOTB7 |
| L0709 | NIH_MGC_21 | choriocarcinoma | placenta | | | pOTB7 |
| L0710 | NIH_MGC_7 | small cell carcinoma | lung | MGC3 | | pOTB7 |
| L0717 | Gessler Wilms tumor | | | | | pSPORT1 |
| L0718 | Testis 5 | | | | | pSPORT1 |
| L0731 | Soares_pregnant_uterus_NbHPU | | uterus | | | pT7T3-Pac |
| L0738 | Human colorectal cancer | | | | | pT7T3D |
| L0740 | Soares melanocyte 2NbHM | melanocyte | | | | pT7T3D (Pharmacia) with a |
| | | | | | | modified polylinker |
| L0741 | Soares adult brain N2b4HB55Y | | brain | | | pT7T3D (Pharmacia) with a |
| | | | | | | modified polylinker |
| L0742 | Soares adult brain N2b5HB55Y | | brain | | | pT7T3D (Pharmacia) with a |
| | | | | | | modified polylinker |
| L0743 | Soares breast 2NbHBst | | breast | | | pT7T3D (Pharmacia) with a |
| | | | | | | modified polylinker |
| L0744 | Soares breast 3NbHBst | | breast | | | pT7T3D (Pharmacia) with a |
| | | | | | | modified polylinker |
| L0745 | Soares retina N2b4HR | retina | eye | | | pT7T3D (Pharmacia) with a |
| | | | | | | modified polylinker |
| L0746 | Soares retina N2b5HR | retina | eye | | | pT7T3D (Pharmacia) with a |
| | | | | | | modified polylinker |
| L0747 | Soares_fetal_heart_NbHH19W | | heart | | | pT7T3D (Pharmacia) with a |
| | | | | | | modified polylinker |
| L0748 | Soares fetal liver spleen 1NFLS | | Liver and Spleen | | | pT7T3D (Pharmacia) with a |
| | | | | | | modified polylinker |
| L0749 | Soares_fetal_liver_spleen_1NFLS_S1 | | Liver and Spleen | | | pT7T3D (Pharmacia) with a |
| | | | | | | modified polylinker |
| L0750 | Soares_fetal_lung_NbHL19W | | lung | | | pT7T3D (Pharmacia) with a |
| | | | | | | modified polylinker |
| L0751 | Soares ovary tumor NbHOT | ovarian tumor | ovary | | | pT7T3D (Pharmacia) with a |
| | | | | | | modified polylinker |
| L0752 | Soares_parathyroid_tumor_NbHPA | parathyroid tumor | parathyroid gland | | | pT7T3D (Pharmacia) with a |
| | | | | | | modified polylinker |
| L0753 | Soares_pineal_gland_N3HPG | | pineal gland | | | pT7T3D (Pharmacia) with a |
| | | | | | | modified polylinker |
| L0754 | Soares placenta Nb2HP | | placenta | | | pT7T3D (Pharmacia) with a |
| | | | | | | modified polylinker |
| L0755 | Soares_placenta_8to9weeks_2NbHP8to9W | | placenta | | | pT7T3D (Pharmacia) with a |
| | | | | | | modified polylinker |
| L0756 | Soares_multiple_sclerosis_2NbHMSP | multiple sclerosis lesions | | | | pT7T3D (Pharmacia) with a |
| | | | | | | modified polylinker V_TYPE |
| L0757 | Soares_senescent_fibroblasts_NbHSF | senescent fibroblast | | | | pT7T3D (Pharmacia) with a |
| | | | | | | modified polylinker V_TYPE |
| L0758 | Soares_testis_NHT | | | | | pT7T3D-Pac (Pharmacia) with |
| | | | | | | a modified polylinker |
| L0759 | Soares_total_fetus_Nb2HF8_9w | | | | | pT7T3D-Pac (Pharmacia) with |
| | | | | | | a modified polylinker |
| L0761 | NCI_CGAP_CLL1 | B-cell, chronic lymphotic leukemia | | | | pT7T3D-Pac (Pharmacia) with |
| | | | | | | a modified polylinker |
| L0762 | NCI_CGAP_Brl.1 | breast | | | | pT7T3D-Pac (Pharmacia) with |
| | | | | | | a modified polylinker |
| L0763 | NCI_CGAP_Br2 | breast | | | | pT7T3D-Pac (Pharmacia) with |
| | | | | | | a modified polylinker |
| L0764 | NCI_CGAP_Co3 | colon | | | | pT7T3D-Pac (Pharmacia) with |
| | | | | | | a modified polylinker |
| L0765 | NCI_CGAP_Co4 | colon | | | | pT7T3D-Pac (Pharmacia) with |
| | | | | | | a modified polylinker |
| L0766 | NCI_CGAP_GCB1 | germinal center B cell | | | | pT7T3D-Pac (Pharmacia) with |
| | | | | | | a modified polylinker |
| L0767 | NCI_CGAP_GC3 | pooled germ cell tumors | | | | pT7T3D-Pac (Pharmacia) with |
| | | | | | | a modified polylinker |
| L0768 | NCI_CGAP_GC4 | pooled germ cell tumors | | | | pT7T3D-Pac (Pharmacia) with |
| | | | | | | a modified polylinker |
| L0769 | NCI_CGAP_Brn25 | anaplastic oligodendroglioma | brain | | | pT7T3D-Pac (Pharmacia) with |
| | | | | | | a modified polylinker |
| L0770 | NCI_CGAP_Brn23 | glioblastoma (pooled) | brain | | | pT7T3D-Pac (Pharmacia) with |
| | | | | | | a modified polylinker |
| L0771 | NCI_CGAP_Co8 | adenocarcinoma | colon | | | pT7T3D-Pac (Pharmacia) with |
| | | | | | | a modified polylinker |
| L0772 | NCI_CGAP_Co10 | colon tumor RER+ | colon | | | pT7T3D-Pac (Pharmacia) with |
| | | | | | | a modified polylinker |
| L0773 | NCI_CGAP_Co9 | colon tumor RER+ | colon | | | pT7T3D-Pac (Pharmacia) with |
| | | | | | | a modified polylinker |
| L0774 | NCI_CGAP_Kid3 | | kidney | | | pT7T3D-Pac (Pharmacia) with |
| | | | | | | a modified polylinker |
| L0775 | NCI_CGAP_Kid5 | 2 pooled tumors (clear cell type) | kidney | | | pT7T3D-Pac (Pharmacia) with |
| | | | | | | a modified polylinker |
| L0776 | NCI_CGAP_Lu5 | carcinoid | lung | | | pT7T3D-Pac (Pharmacia) with |
| | | | | | | a modified polylinker |
| L0777 | Soares_NhHMPu_S1 | Pooled human melanocyte, fetal heart, | mixed (see below) | | | pT7T3D-Pac (Pharmacia) with |
| | | and pregnant | | | | a modified polylinker |
| L0779 | Soares_NFL_T_GBC_S1 | | pooled | | | pT7T3D-Pac (Pharmacia) with |
| | | | | | | a modified polylinker |
| L0780 | Soares_NSF_F8_9W_OT_PA_P_S1 | | pooled | | | pT7T3D-Pac (Pharmacia) with |
| | | | | | | a modified polylinker |
| L0782 | NCI_CGAP_Pr21 | normal prostate | prostate | | | pT7T3D-Pac (Pharmacia) with |
| | | | | | | a modified polylinker |
| L0783 | NCI_CGAP_Pr22 | normal prostate | prostate | | | pT7T3D-Pac (Pharmacia) with |
| | | | | | | a modified polylinker |
| L0784 | NCI_CGAP_Lei2 | leiomyosarcoma | soft tissue | | | pT7T3D-Pac (Pharmacia) with |
| | | | | | | a modified polylinker |
| L0785 | Barstead spleen HPLRB2 | | spleen | | | pT7T3D-Pac (Pharmacia) with |
| | | | | | | a modified polylinker |
| L0786 | Soares_NbHFB | | whole brain | | | pT7T3D-Pac (Pharmacia) with |
| | | | | | | a modified polylinker |
| L0787 | NCI_CGAP_Sub1 | | | | | pT7T3D-Pac (Pharmacia) with |
| | | | | | | a modified polylinker |
| L0788 | NCI_CGAP_Sub2 | | | | | pT7T3D-Pac (Pharmacia) with |
| | | | | | | a modified polylinker |
| L0789 | NCI_CGAP_Sub3 | | | | | pT7T3D-Pac (Pharmacia) with |
| | | | | | | a modified polylinker |
| L0790 | NCI_CGAP_Sub4 | | | | | pT7T3D-Pac (Pharmacia) with |
| | | | | | | a modified polylinker |
| L0791 | NCI_CGAP_Sub5 | | | | | pT7T3D-Pac (Pharmacia) with |
| | | | | | | a modified polylinker |
| L0792 | NCI_CGAP_Sub6 | | | | | pT7T3D-Pac (Pharmacia) with |
| | | | | | | a modified polylinker |
| L0793 | NCI_CGAP_Sub7 | | | | | pT7T3D-Pac (Pharmacia) with |
| | | | | | | a modified polylinker |
| L0794 | NCI_CGAP_GC6 | pooled germ cell tumors | | | | pT7T3D-Pac (Pharmacia) with |
| | | | | | | a modified polylinker |
| L0796 | NCI_CGAP_Brn50 | medulloblastoma | brain | | | pT7T3D-Pac (Pharmacia) with |
| | | | | | | a modified polylinker |
| L0800 | NCI_CGAP_Co16 | colon tumor, RER+ | colon | | | pT7T3D-Pac (Pharmacia) with |
| | | | | | | a modified polylinker |
| L0803 | NCI_CGAP_Kid11 | | kidney | | | pT7T3D-Pac (Pharmacia) with |
| | | | | | | a modified polylinker |
| L0804 | NCI_CGAP_Kid12 | 2 pooled tumors (clear cell type) | kidney | | | pT7T3D-Pac (Pharmacia) with |
| | | | | | | a modified polylinker |
| L0805 | NCI_CGAP_Lu24 | carcinoid | lung | | | pT7T3D-Pac (Pharmacia) with |
| | | | | | | a modified polylinker |
| L0806 | NCI_CGAP Lu19 | squamous cell carcinoma, poorly | lung | | | pT7T3D-Pac (Pharmacia) with |
| | | differentiated (4 | | | | a modified polylinker |
| L0807 | NCI_CGAP_Ov18 | fibrotheoma | ovary | | | pT7T3D-Pac (Pharmacia) with |
| | | | | | | a modified polylinker |
| L0809 | NCI_CGAP_Pr28 | | prostate | | | pT7T3D-Pac (Pharmacia) with |
| | | | | | | a modified polylinker |
| L0811 | BATM2 | | | | | PTZ18 |
| L0946 | BT0333 | | breast | | | puc18 |
| L1446 | CT0254 | | colon | | | puc18 |
| L1819 | HT0268 | | head_neck | | | puc18 |
| L1942 | HT0452 | | head_neck | | | puc18 |
| L2138 | ST0186 | | stomach | | | puc18 |
| L2174 | ST0240 | | stomach | | | puc18 |
| L2251 | Human fetal lung | Fetal lung | | | | |
| L2252 | Human placenta | placenta | | | | |
| L2255 | GLC | corresponding non cancerous liver tissue | | | | pBluescript sk(−) |
| L2257 | NIH_MGC_65 | adenocarcinoma | colon | | | pCMV-SPORT6 |
| L2258 | NIH_MGC_67 | retinoblastoma | eye | | | pCMV-SPORT6 |
| L2259 | NIH_MGC_68 | large cell carcinoma | lung | | | pCMV-SPORT6 |
| L2260 | NIH_MGC_69 | large cell carcinoma, undifferentiated | lung | | | pCMV-SPORT6 |
| L2261 | NIH_MGC_70 | epithelioid carcinoma | pancreas | | | pCMV-SPORT6 |
| L2262 | NIH_MGC_72 | melanotic melanoma | skin | | | pCMV-SPORT6 |
| L2263 | NIH_MGC_66 | adenocarcinoma | ovary | | | pCMV-SPORT6 |
| L2264 | NIH_MGC_71 | leiomyosarcoma | uterus | | | pCMV-SPORT6 |
| L2265 | NIH_MGC_39 | adenocarcinoma | pancreas | | | pOTB7 |
| L2270 | Lupski_dorsal_root_ganglion | dorsal root ganglia | | | | pCMV-SPORT6 (Life |
| | | | | | | Technologies) |
| L2289 | BT0757 | | breast | | | puc18 |
| L2333 | CT0417 | | colon | | | puc18 |
| L2338 | CT0432 | | colon | | | puc18 |
| L2346 | CT0483 | | colon | | | puc18 |
| L2367 | UT0039 | | uterus_tumor | | | puc18 |
| L2380 | NN0068 | | nervous_normal | | | puc18 |
| L2400 | NN0116 | | nervous_normal | | | puc18 |
| L2412 | NN0136 | | nervous_normal | | | puc18 |
| L2439 | NN1022 | | nervous_normal | | | puc18 |
| L2477 | HT0408 | | head_neck | | | puc18 |
| L2490 | HT0545 | | head_neck | | | puc18 |
| L2495 | HT0594 | | head_neck | | | puc18 |
| L2504 | HT0636 | | head_neck | | | puc18 |
| L2518 | HT0697 | | head_neck | | | puc18 |
| L2522 | HT0704 | | head_neck | | | puc18 |
| L2539 | HT0727 | | head_neck | | | puc18 |
| L2540 | HT0728 | | head_neck | | | puc18 |
| L2543 | HT0734 | | head_neck | | | puc18 |
| L2562 | HT0760 | | head_neck | | | puc18 |
| L2570 | HT0771 | | head_neck | | | puc18 |
| L2634 | HT0872 | | head_neck | | | puc18 |
| L2637 | HT0877 | | head_neck | | | puc18 |
| L2647 | HT0894 | | head_neck | | | puc18 |
| L2651 | NIH_MGC_20 | melanotic melanoma | skin | | | pOTB7 |
| L2653 | NIH_MGC_58 | hypernephroma | kidney | | | pDNR-LIB (Clontech) |
| L2654 | NIH_MGC_9 | adenocarcinoma cell line | ovary | | | pOTB7 |
| L2655 | NIH_MGC_55 | from acute myelogenous leukemia | bone marrow | | | pDNR-LIB (Clontech) |
| L2657 | NIH_MGC_54 | from chronic myelogenous leukemia | bone marrow | | | pDNR-LIB (Clontech) |
| L2702 | NT0098 | | nervous_tumor | | | puc18 |
| L2738 | GN0049 | | placenta_normal | | | puc18 |
| L2791 | FT0077 | | prostate_tumor | | | puc18 |
| L2799 | FT0096 | | prostate_tumor | | | puc18 |
| L2804 | FT0103 | | prostate_tumor | | | puc18 |
| L2831 | FT0162 | | prostate_tumor | | | puc18 |
| L2854 | UM0091 | | uterus | | | puc18 |
| L2877 | AN0027 | | amnion_normal | | | puc18 |
| L2884 | AN0041 | | amnion_normal | | | puc18 |
| L2906 | BN0047 | | breast_normal | | | puc18 |
| L2910 | BN0070 | | breast_normal | | | puc18 |
| L2915 | BN0098 | | breast_normal | | | puc18 |
| L2991 | BN0264 | | breast_normal | | | puc18 |
| L2999 | BN0273 | | breast_normal | | | puc18 |
| L3002 | BN0276 | | breast_normal | | | puc18 |
| L3019 | BN0303 | | breast_normal | | | puc18 |
| L3071 | EN0026 | | lung_normal | | | puc18 |
| L3081 | ET0005 | | lung_tumor | | | puc18 |
| L3089 | ET0018 | | lung_tumor | | | puc18 |
| L3092 | ET0023 | | lung_tumor | | | puc18 |
| L3104 | ET0041 | | lung_tumor | | | puc18 |
| L3117 | ET0068 | | lung_tumor | | | puc18 |
| L3119 | ET0072 | | lung_tumor | | | puc18 |
| L3127 | ET0084 | | lung_tumor | | | puc18 |
| L3140 | MT0031 | | marrow | | | puc18 |
| L3154 | MT0050 | | marrow | | | puc18 |
| L3210 | OT0067 | | ovary | | | puc18 |
| L3212 | OT0076 | | ovary | | | puc18 |
| L3215 | OT0083 | | ovary | | | puc18 |
| L3255 | FN0064 | | prostate_normal | | | puc18 |
| L3262 | FN0073 | | prostate_normal | | | puc18 |
| L3316 | FN0188 | | prostate_normal | | | puc18 |
| L3352 | TN0027 | | testis_normal | | | puc18 |
| L3357 | TN0034 | | testis_normal | | | puc18 |
| L3372 | TN0068 | | testis_normal | | | puc18 |
| L3374 | TN0070 | | testis_normal | | | puc18 |
| L3388 | GKC | hepatocellular carcinoma | | | | pBluescript sk(−) |
| L3391 | NIH_MGC_53 | carcinoma, cell line | bladder | | | pDNR-LIB (Clontech) |
| L3435 | CT0465 | | colon | | | puc18 |
| L3450 | CT0508 | | colon | | | puc18 |
| L3459 | FT0175 | | prostate_tumor | | | puc18 |
| L3480 | GN0057 | | placenta_normal | | | puc18 |
| L3484 | GN0067 | | placenta_normal | | | puc18 |
| L3491 | GN0076 | | placenta_normal | | | puc18 |
| L3499 | HT0617 | | head_neck | | | puc18 |
| L3504 | HT0873 | | head_neck | | | puc18 |
| L3516 | HT0913 | | head_neck | | | puc18 |
| L3521 | HT0919 | | head_neck | | | puc18 |
| L3562 | TN0030 | | testis_normal | | | puc18 |
| L3603 | UM0093 | | uterus | | | puc18 |
| L3612 | UT0011 | | uterus_tumor | | | puc18 |
| L3618 | UT0050 | | uterus_tumor | | | puc18 |
| L3632 | UT0074 | | uterus_tumor | | | puc18 |
| L3636 | NIH_MGC_73 | | brain | | | pDNR-LIB (Clontech) |
| L3642 | ADA | Adrenal gland | | | | pBluescript sk(−) |
| L3643 | ADB | Adrenal gland | | | | pBluescript sk(−) |
| L3644 | ADC | Adrenal gland | | | | pBluescript sk(−) |
| L3645 | Cu | adrenal cortico adenoma for Cushing''s syndrome | | | | pBluescript sk(−) |
| L3646 | DCA | | | | | pTriplEx2 |
| L3649 | DCB | | | | | pTriplEx2 |
| L3653 | HTB | Hypothalamus | | | | pBluescript sk(−) |
| L3655 | HTC | Hypothalamus | | | | pBluescript sk(−) |
| L3657 | HTF | Hypothalamus | | | | pBluescript sk(−) |
| L3658 | cdA | pheochromocytoma | | | | pTriplEx2 |
| L3659 | CB | cord blood | | | | pBluescript |
| L3667 | NIH_MGC_79 | | placenta | | | pDNR-LIB (Clontech) |
| L3729 | GN0079 | | placenta_normal | | | puc18 |
| L3750 | HT0945 | | head_neck | | | puc18 |
| L3783 | TN0136 | | testis_normal | | | puc18 |
| L3807 | UT0077 | | uterus_tumor | | | puc18 |
| L3808 | UT0078 | | uterus_tumor | | | puc18 |
| L3811 | NPC | pituitary | | | | pBluescript sk(−) |
| L3812 | NPD | pituitary | | | | pBluescript sk(−) |
| L3814 | BM | Bone marrow | | | | pTriplEx2 |
| L3815 | MDS | Bone marrow | | | | pTriplEx2 |
| L3816 | HEMBA1 | whole embryo, mainly head | | | | pME18SFL3 |
| L3817 | HEMBB1 | whole embryo, mainly body | | | | pME18SFL3 |
| L3823 | NT2RM1 | | | NT2 | | pUC19FL3 |
| L3825 | NT2RM4 | | | NT2 | | pME18SFL3 |
| L3827 | NT2RP2 | | | NT2 | | pME18SFL3 |
| L3828 | NT2RP3 | | | NT2 | | pME18SFL3 |
| L3829 | NT2RP4 | | | NT2 | | pME18SFL3 |
| L3831 | OVARC1 | ovary, tumor tissue | | | | pME18SFL3 |
| L3832 | PLACE1 | placenta | | | | pME18SFL3 |
| L3833 | PLACE2 | placenta | | | | pME18SFL3 |
| L3834 | PLACE3 | placenta | | | | pME18SFL3 |
| L3872 | NCI_CGAP_Skn1 | | skin, normal, 4 pooled | | | pCMV-SPORT6 |
| | | | sa | | | |
| L3904 | NCI_CGAP_Brn64 | glioblastoma with EGFR amplification | brain | | | pCMV-SPORT6 |
| L3905 | NCI_CGAP_Brn67 | anaplastic oligodendroglioma with | brain | | | pCMV-SPORT6 |
| | | 1p/19q loss | | | | |
| L4497 | NCI_CGAP_Br22 | invasive ductal carcinoma, 3 pooled | breast | | | pCMV-SPORT6 |
| | | samples | | | | |
| L4501 | NCI_CGAP_Sub8 | | | | | pT7T3D-Pac (Pharmacia) with |
| | | | | | | a modified polylinker |
| L4537 | NCI_CGAP_Thy7 | follicular adenoma (benign lesion) | thyroid | | | pAMP10 |
| L4556 | NCI_CGAP_HN13 | squamous cell carcinoma | tongue | | | pCMV-SPORT6 |
| L4560 | NCI_CGAP_Ut7 | tumor | uterus | | | pCMV-SPORT6 |
| L4669 | NCI_CGAP_Ov41 | serous papillary tumor | ovary | | | pCMV-SPORT6 |
| L4747 | NCI_CGAP_Brn41 | oligodendroglioma | brain | | | pT7T3D-Pac (Pharmacia) with a modified |
| | | | | | | polylinker |
| L5564 | NCI_CGAP_HN20 | | normal head/neck | | | pAMP1 |
| | | | tissue | | | |
| L5565 | NCI_CGAP_Brn66 | glioblastoma with probably TP53 | brain | | | pCMV-SPORT6 |
| | | mutation and witho | | | | |
| L5566 | NCI_CGAP_Brn70 | anaplastic oligodendroglioma | brain | | | pCMV-SPORT6.ccdb |
| L5568 | NCI_CGAP_HN21 | nasopharyngeal carcinoma | head/neck | | | pAMP1 |
| L5569 | NCI_CGAP_HN17 | normal epithelium | nasopharynx | | | pAMP10 |
| L5574 | NCI_CGAP_HN19 | normal epithelium | nasopharynx | | | pAMP10 |
| L5575 | NCI_CGAP_Brn65 | glioblastoma without EGFR | brain | | | pCMV-SPORT6 |
| | | amplification | | | | |
| L5622 | NCI_CGAP_Skn3 | | skin | | | pCMV-SPORT6 |
| L5623 | NCI_CGAP_Skn4 | squamous cell carcinoma | skin | | | pCMV-SPORT6 |

Description of Table 5

[0160] Table 5 provides a key to the OMIM reference identification numbers disclosed in Table 1B.1. OMIM reference identification numbers (Column 1) were derived from Online Mendelian Inheritance in Man (Online Mendelian Inheritance in Man, OMIM. McKusick-Nathans Institute for Genetic Medicine, Johns Hopkins University (Baltimore, Md.) and National Center for Biotechnology Information, National Library of Medicine, Bethesda, Md.) 2000. World Wide Web URL: http://www.ncbi.nim.nih.gov/omim/). Column 2 provides diseases associated with the cytologic band disclosed in Table 1B.1, as determined using the Morbid Map database.

TABLE 5

| OMIM | |
|---|---|
| Reference | Description |
| 101000 | Meningioma, NF2-related, sporadic Schwannoma, sporadic |
| 101000 | Neurofibromatosis, type 2 |
| 101000 | Neurolemmomatosis |
| 101000 | Malignant mesothelioma, sporadic |
| 102200 | Somatotrophinoma |
| 102578 | Leukemia, acute promyelocytic, PML/RARA type |
| 102770 | Myoadenylate deaminase deficiency |
| 102772 | [AMP deaminase deficiency, erythrocytic] |
| 103050 | Autism, succinylpurinemic |
| 103050 | Adenylosuccinase deficiency |
| 103600 | [Dysalbuminemic hyperthyroxinemia] |
| 103600 | [Dysalbuminemic hyperzincemia], 194470 |
| 103600 | Analbuminemia |
| 103850 | Aldolase A deficiency |
| 104150 | [AFP deficiency, congenital] |
| 104150 | [Hereditary persistence of alpha-fetoprotein] |
| 104500 | Amelogenesis imperfecta-2, hypoplastic local type |
| 104770 | Amyloidosis, secondary, susceptibility to |
| 106100 | Angioedema, hereditary |
| 106165 | Hypertension, essential, 145500 |
| 106210 | Peters anomaly |
| 106210 | Cataract, congenital, with late-onset corneal dystrophy |
| 106210 | Foveal hypoplasia, isolated, 136520 |
| 106210 | Aniridia |
| 107271 | CD59 deficiency |
| 107300 | Antithrombin III deficiency |
| 107670 | Apolipoprotein A-II deficiency |
| 107741 | Hyperlipoproteinemia, type III |
| 107777 | Diabetes insipidus, nephrogenic, autosomal recessive, 222000 |
| 108725 | Atherosclerosis, susceptibility to |
| 109270 | Renal tubular acidosis, distal, 179800 |
| 109270 | Spherocytosis, hereditary |
| 109270 | [Acanthocytosis, one form] |
| 109270 | [Elliptocytosis, Malaysian-Melanesian type] |
| 109270 | Hemolytic anemia due to band 3 defect |
| 109560 | Leukemia/lymphoma, B-cell, 3 |
| 109700 | Hemodialysis-related amyloidosis |
| 110100 | Blepharophimosis, epicanthus inversus, and ptosis, type 1 |
| 110700 | Vivax malaria, susceptibility to |
| 112261 | Fibrodysplasia ossificans progressiva |
| 113100 | Brachydactyly, type C |
| 113900 | Heart block, progressive familial, type I |
| 114550 | Hepatocellular carcinoma |
| 114835 | Monocyte carboxyesterase deficiency |
| 115500 | Acatalasemia |
| 116800 | Cataract, Marner type |
| 116806 | Colorectal cancer |
| 116860 | Cavernous angiomatous malformations |
| 117700 | [Hypoceruloplasminemia, hereditary] |
| 117700 | Hemosiderosis, systemic, due to aceruloplasminemia |
| 118485 | Polycystic ovary syndrome with hyperandrogenemia |
| 120070 | Alport syndrome, autosomal recessive, 203780 |
| 120131 | Alport syndrome, autosomal recessive, 203780 |
| 120131 | Hematuria, familial benign |
| 120140 | Osteoarthrosis, precocious |
| 120140 | SED congenita |
| 120140 | SMED Strudwick type |
| 120140 | Stickler syndrome, type I |
| 120140 | Wagner syndrome, type II |
| 120140 | Achondrogenesis-hypochondrogenesis, type II |
| 120140 | Kniest dysplasia |
| 120150 | Osteogenesis imperfecta, 4 clinical forms, |
| | 166200, 166210, 259420, 166220 |
| 120150 | Osteoporosis, idiopathic, 166710 |
| 120150 | Ehlers-Danlos syndrome, type VIIA1, 130060 |
| 120220 | Bethlem myopathy, 158810 |
| 120240 | Bethlem myopathy, 158810 |
| 120260 | Epiphyseal dysplasia, multiple, type 2, 600204 |
| 120435 | Muir-Torre syndrome, 158320 |
| 120435 | Colorectal cancer, hereditary, |
| | nonpolyposis, type 1 Ovarian cancer |
| 120550 | C1q deficiency, type A |
| 120570 | C1q deficiency, type B |
| 120575 | C1q deficiency, type C |
| 120700 | C3 deficiency |
| 120950 | C8 deficiency, type I |
| 120960 | C8 deficiency, type II |
| 121800 | Corneal dystrophy, crystalline, Schnyder |
| 122720 | Nicotine addiction, protection from |
| 122720 | Coumarin resistance, 122700 |
| 123000 | Craniometaphyseal dysplasia |
| 123580 | Cataract, congenital, autosomal dominant |
| 123620 | Cataract, cerulean, type 2, 601547 |
| 123940 | White sponge nevus, 193900 |
| 124030 | Parkinsonism, susceptibility to |
| 124030 | Debrisoquine sensitivity |
| 124200 | Darier disease (keratosis follicularis) |
| 126060 | Anemia, megaloblastic, due to DHFR deficiency |
| 126090 | Hyperphenylalaninemia due to pterin-4a-carbinolamine |
| | dehydratase deficiency, 264070 |
| 126337 | Myxoid liposarcoma |
| 126340 | Xeroderma pigmentosum, group D, 278730 |
| 126391 | DNA ligase I deficiency |
| 126600 | Doyne honeycomb retinal dystrophy |
| 126600 | Drusen, radial, autosomal dominant |
| 129010 | Neuropathy, congenital hypomyelinating, 1 |
| 129900 | EEC syndrome-1 |
| 130410 | Glutaricaciduria, type IIB |
| 130500 | Elliptocytosis-1 |
| 131100 | Multiple endocrine neoplasia I |
| 131100 | Prolactinoma, hyperparathyroidism, carcinoid syndrome |
| 131100 | Carcinoid tumor of lung |
| 131210 | Atherosclerosis, susceptibility to |
| 131400 | Eosinophilia, familial |
| 133171 | [Erythrocytosis, familial], 133100 |
| 133200 | Erythrokeratodermia variabilis |
| 133530 | Xeroderma pigmentosum, group G, 278780 |
| 133701 | Exostoses, multiple, type 2 |
| 133780 | Vitreoretinopathy, exudative, familial |
| 134790 | Hyperferritinemia-cataract syndrome, 600886 |
| 135300 | Fibromatosis, gingival |
| 135940 | Ichthyosis vulgaris, 146700 |
| 136132 | [Fish-odor syndrome], 602079 |
| 136435 | Ovarian dysgenesis, hypergonadotropic, |
| | with normal karyotype, 233300 |
| 136530 | Male infertility, familial |
| 136836 | Fucosyltransferase-6 deficiency |
| 138030 | [Hyperproglucagonemia] |
| 138140 | Glucose transport defect, blood-brain barrier |
| 138570 | Non-insulin dependent diabetes mellitus, susceptibility to |
| 138760 | [Glyoxalase II deficiency] |
| 138981 | Pulmonary alveolar proteinosis, 265120 |
| 139350 | Epidermolytic hyperkeratosis, 113800 |
| 139350 | Keratoderma, palmoplantar, nonepidermolytic |
| 140100 | [Anhaptoglobinemia] |
| 140100 | [Hypohaptogloginemia] |
| 142600 | Hemolytic anemia due to hexokinase deficiency |
| 143200 | Wagner syndrome |
| 143200 | Erosive vitreoretinopathy |
| 145001 | Hyperparathyroidism-jaw tumor syndrome |
| 145260 | Pseudohypoaldosteronism, type II |
| 145981 | Hypocalciuric hypercalcemia, type II |
| 146760 | [IgG receptor I, phagocytic, familial deficiency of] |
| 146790 | Lupus nephritis, susceptibility to |
| 147050 | Atopy |
| 147141 | Leukemia, acute lymphoblastic |
| 147440 | Growth retardation with deafness and mental retardation |
| 148040 | Epidermolysis bullosa simplex, Koebner, Dowling-Meara, |
| | and Weber-Cockayne types, 131900, 131760, 131800 |
| 148041 | Pachyonychia congenita, |
| | Jadassohn-Lewandowsky type, 167200 |
| 148043 | Meesmann corneal dystrophy, 122100 |
| 148065 | White sponge nevus, 193900 |
| 148070 | Liver disease, susceptibility to, from hepatotoxins or viruses |
| 148080 | Epidermolytic hyperkeratosis, 113800 |
| 148370 | Keratolytic winter erythema |
| 148900 | Klippel-Feil syndrome with laryngeal malformation |
| 150210 | Lactoferrin-deficient neutrophils, 245480 |
| 151385 | Leukemia, acute myeloid |
| 151390 | Leukemia, acute T-cell |
| 151670 | Hepatic lipase deficiency |
| 152445 | Vohwinkel syndrome, 124500 |
| 152445 | Erythrokeratoderma, progressive symmetric, 602036 |
| 152780 | Hypogonadism, hypergonadotropic |
| 152780 | Male pseudohermaphroditism due to defective LH |
| 152790 | Precocious puberty, male, 176410 |
| 152790 | Leydig cell hypoplasia |
| 153454 | Ehlers-Danlos syndrome, type VI, 225400 |
| 153700 | Macular dystrophy, vitelliform type |
| 154275 | Malignant hyperthermia susceptibility 2 |
| 154276 | Malignant hyperthermia susceptibility 3 |
| 154545 | Chronic infections, due to opsonin defect |
| 154550 | Carbohydrate-deficient glycoprotein |
| | syndrome, type Ib, 602579 |
| 155555 | [Red hair/fair skin] |
| 155555 | UV-induced skin damage, vulnerability to |
| 157147 | Abetalipoproteinemia, 200100 |
| 157170 | Holoprosencephaly-2 |
| 158590 | Spinal muscular atrophy-4 |
| 159000 | Muscular dystrophy, limb-girdle, type 1A |
| 159001 | Muscular dystrophy, limb-girdle, type 1B |
| 160760 | Cardiomyopathy, familial hypertrophic, 1, 192600 |
| 160760 | Central core disease, one form |
| 160781 | Cardiomyopathy, hypertrophic, |
| | mid-left ventricular chamber type |
| 160900 | Myotonic dystrophy |
| 160980 | Carney myxoma-endocrine complex |
| 161015 | Mitochondrial complex I deficiency, 252010 |
| 162150 | Obestiy with impaired prohormone processing, 600955 |
| 162200 | Neurofibromatosis, type 1 |
| 162200 | Watson syndrome, 193520 |
| 163950 | Noonan syndrome-1 |
| 163950 | Cardiofaciocutaneous syndrome, 115150 |
| 164009 | Leukemia, acute promyelocytic, NUMA/RARA type |
| 164500 | Spinocerebellar ataxia-7 |
| 164731 | Ovarian carcinoma, 167000 |
| 164920 | Piebaldism |
| 164920 | Mast cell leukemia |
| 164920 | Mastocytosis with associated hematologic disorder |
| 164953 | Liposarcoma |
| 168360 | Paraneoplastic sensory neuropathy |
| 168450 | Hypoparathyroidism, autosomal dominant |
| 168450 | Hypoparathyroidism, autosomal recessive |
| 168461 | Multiple myeloma, 254250 |
| 168461 | Parathyroid adenomatosis 1 |
| 168461 | Centrocytic lymphoma |
| 168468 | Metaphyseal chondrodysplasia, Murk Jansen type, 156400 |
| 168500 | Parietal foramina |
| 169600 | Hailey-Hailey disease |
| 170650 | Periodontitis, juvenile |
| 171190 | Hypertension, essential, 145500 |
| 171650 | Lysosomal acid phosphatase deficiency |
| 171760 | Hypophosphatasia, adult, 146300 |
| 171760 | Hypophosphatasia, infantile, 241500 |
| 171860 | Hemolytic anemia due to phosphofructokinase deficiency |
| 172400 | Hemolytic anemia due to |
| | glucosephosphate isomerase deficiency |
| 172400 | Hydrops fetalis, one form |
| 173470 | Glanzmann thrombasthenia, type B |
| 173610 | Platelet alpha/delta storage pool deficiency |
| 173850 | Polio, susceptibility to |
| 174000 | Medullary cystic kidney disease, AD |
| 174810 | Osteolysis, familial expansile |
| 174900 | Polyposis, juvenile intestinal |
| 176100 | Porphyria cutanea tarda |
| 176100 | Porphyria, hepatoerythropoietic |
| 176640 | Creutzfeldt-Jakob disease, 123400 |
| 176640 | Gerstmann-Straussler disease, 137440 |
| 176640 | Insomnia, fatal familial |
| 176880 | Protein S deficiency |
| 176930 | Dysprothrombinemia |
| 176930 | Hypoprothrombinemia |
| 178300 | Ptosis, hereditary congenital, 1 |
| 179615 | Reticulosis, familial histiocytic, 267700 |
| 179615 | Severe combined immunodeficiency, B cell-negative, 601457 |
| 179616 | Severe combined immunodeficiency, B cell-negative, 601457 |
| 179755 | Renal cell carcinoma, papillary, 1 |
| 180069 | Retinal dystrophy, autosomal recessive, childhood-onset |
| 180069 | Retinitis pigmentosa-20 |
| 180069 | Leber congenital amaurosis-2, 204100 |
| 180071 | Retinitis pigmentosa, autosomal recessive |
| 180105 | Retinitis pigmentosa-10 |
| 180200 | Osteosarcoma, 259500 |
| 180200 | Pinealoma with bilateral retinoblastoma |
| 180200 | Retinoblastoma |
| 180200 | Bladder cancer, 109800 |
| 180380 | Night blindness, congenital stationery, rhodopsin-related |
| 180380 | Retinitis pigmentosa, autosomal recessive |
| 180380 | Retinitis pigmentosa-4, autosomal dominant |
| 180385 | Leukemia, acute T-cell |
| 180721 | Retinitis pigmentosa, digenic |
| 180840 | Susceptibility to IDDM |
| 180901 | Malignant hyperthermia susceptibility 1, 145600 |
| 180901 | Central core disease, 117000 |
| 181405 | Scapuloperoneal spinal muscular atrophy, New England type |
| 181460 | Schistosoma mansoni, susceptibility/resistance to |
| 181510 | Schizophrenia |
| 182138 | Anxiety-related personality traits |
| 182280 | Small-cell cancer of lung |
| 182380 | Glucose/galactose malabsorption |
| 182600 | Spastic paraplegia-3A |
| 182601 | Spastic paraplegia-4 |
| 182860 | Pyropoikilocytosis |
| 182860 | Spherocytosis, recessive |
| 182860 | Elliptocytosis-2 |
| 185800 | Symphalangism, proximal |
| 186580 | Arthrocutaneouveal granulomatosis |
| 186880 | Leukemia/lymphoma, T-cell |
| 187040 | Leukemia-1, T-cell acute lymphoblastic |
| 188070 | Bleeding disorder due to defective thromboxane A2 receptor |
| 188826 | Sorsby fundus dystrophy, 136900 |
| 189800 | Preeclampsia/eclampsia |
| 190040 | Meningioma, SIS-related |
| 190040 | Dermatofibrosarcoma protuberans |
| 190040 | Giant-cell fibroblastoma |
| 190195 | Ichthyosiform erythroderma, congenital, 242100 |
| 190195 | Ichthyosis, lamellar, autosomal recessive, 242300 |
| 190685 | Down syndrome |
| 191044 | Cardiomyopathy, familial hypertrophic |
| 191181 | Cervical carcinoma |
| 191315 | Insensitivity to pain, congenital, with anhidrosis, 256800 |
| 192090 | Ovarian carcinoma |
| 192090 | Breast cancer, lobular |
| 192090 | Endometrial carcinoma |
| 192090 | Gastric cancer, familial, 137215 |
| 192340 | Diabetes insipidus, neurohypophyseal, 125700 |
| 193235 | Vitreoretinopathy, neovascular inflammatory |
| 193300 | Renal cell carcinoma |
| 193300 | von Hippel-Lindau syndrome |
| 194070 | Wilms tumor, type 1 |
| 194070 | Denys-Drash syndrome |
| 194070 | Frasier syndrome, 136680 |
| 201450 | Acyl-CoA dehydrogenase, medium chain, deficiency of |
| 201810 | 3-beta-hydroxysteroid dehydrogenase, type II, deficiency |
| 203300 | Hermansky-Pudlak syndrome |
| 203500 | Alkaptonuria |
| 205900 | Anemia, Diamond-Blackfan |
| 207750 | Hyperlipoproteinemia, type Ib |
| 208400 | Aspartylglucosaminuria |
| 209901 | Bardet-Biedl syndrome 1 |
| 212138 | Carnitine-acylcarnitine translocase deficiency |
| 216550 | Cohen syndrome |
| 221770 | Polycystic lipomembranous osteodysplasia |
| | with sclerosing leukencephalopathy |
| 221820 | Gliosis, familial progressive subcortical |
| 222700 | Lysinuric protein intolerance |
| 222800 | Hemolytic anemia due to |
| | bisphosphoglycerate mutase deficiency |
| 222900 | Sucrose intolerance |
| 227646 | Fanconi anemia, type D |
| 227650 | Fanconi anemia, type A |
| 230000 | Fucosidosis |
| 230800 | Gaucher disease |
| 230800 | Gaucher disease with cardiovascular calcification |
| 231550 | Achalasia-addisonianism-alacrimia syndrome |
| 231675 | Glutaricaciduria, type IIC |
| 231680 | Glutaricaciduria, type IIA |
| 232500 | Glycogen storage disease IV |
| 232600 | McArdle disease |
| 233700 | Chronic granulomatous disease due to deficiency of NCF-1 |
| 234200 | Neurodegeneration with brain iron accumulation |
| 236100 | Holoprosencephaly-1 |
| 236200 | Homocystinuria, B6-responsive and nonresponsive types |
| 236250 | Homocystinuria due to MTHFR deficiency |
| 236700 | McKusick-Kaufman syndrome |
| 236730 | Urofacial syndrome |
| 239100 | Van Buchem disease |
| 240300 | Autoimmune polyglandular disease, type I |
| 245349 | Lacticacidemia due to PDX1 deficiency |
| 245900 | Norum disease |
| 245900 | Fish-eye disease |
| 248510 | Mannosidosis, beta- |
| 248600 | Maple syrup urine disease, type Ia |
| 248610 | Maple syrup urine disease, type II |
| 249000 | Meckel syndrome |
| 249100 | Familial Mediterranean fever |
| 250850 | Hypermethioninemia, persistent, autosomal dominant, due to |
| | methionine adenosyltransferase I/III deficiency |
| 251170 | Mevalonicaciduria |
| 253000 | Mucopolysaccharidosis IVA |
| 253200 | Maroteaux-Lamy syndrome, several forms |
| 253250 | Mulibrey nanism |
| 255800 | Schwartz-Jampel syndrome |
| 256700 | Neuroblastoma |
| 257200 | Niemann-Pick disease, type A |
| 257200 | Niemann-Pick disease, type B |
| 258501 | 3-methylglutaconicaciduria, type III |
| 259700 | Osteopetrosis, recessive |
| 259770 | Osteoporosis-pseudoglioma syndrome |
| 259900 | Hyperoxaluria, primary, type 1 |
| 266200 | Anemia, hemolytic, due to PK deficiency |
| 266600 | Inflammatory bowel disease-1 |
| 267750 | Knobloch syndrome |
| 268800 | Sandhoff disease, infantile, juvenile, and adult forms |
| 268800 | Spinal muscular atrophy, HEXB-related |
| 272750 | GM2-gangliosidosis, AB variant |
| 272800 | Tay-Sachs disease |
| 272800 | [Hex A pseudodeficiency] |
| 272800 | GM2-gangliosidosis, juvenile, adult |
| 273800 | Thrombocytopenia, neonatal alloimmune |
| 273800 | Glanzmann thrombasthenia, type A |
| 274180 | Thromboxane synthase deficiency |
| 276600 | Tyrosinemia, type II |
| 276700 | Tyrosinemia, type I |
| 276710 | Tyrosinemia, type III |
| 276901 | Usher syndrome, type 2 |
| 276902 | Usher syndrome, type 3 |
| 300011 | Menkes disease, 309400 |
| 300011 | Occipital horn syndrome, 304150 |
| 300011 | Cutis laxa, neonatal |
| 300031 | Mental retardation, X-linked, FRAXF type |
| 300044 | Wernicke-Korsakoff syndrome, susceptibility to |
| 300046 | Mental retardation, X-linked 23, nonspecific |
| 300047 | Mental retardation, X-linked 20 |
| 300048 | Intestinal pseudoobstruction, neuronal, X-linked |
| 300049 | Nodular heterotopia, bilateral periventricular |
| 300049 | BPNH/MR syndrome |
| 300055 | Mental retardation with psychosis, |
| | pyramidal signs, and macroorchidism |
| 300067 | Subcortical laminar heterotopia, X-linked dominant |
| 300067 | Lissencephaly, X-linked |
| 300071 | Night blindness, congenital stationary, type 2 |
| 300075 | Coffin-Lowry syndrome, 303600 |
| 300077 | Mental retardation, X-linked 29 |
| 300100 | Adrenoleukodystrophy |
| 300100 | Adrenomyeloneuropathy |
| 300104 | Mental retardation, X-linked nonspecific, 309541 |
| 300110 | Night blindness, congenital stationary, |
| | X-linked incomplete, 300071 |
| 300121 | Subcortical laminal heteropia, X-linked, 300067 |
| 300121 | Lissencephaly, X-linked, 300067 |
| 300126 | Dyskeratosis congenita-1, 305000 |
| 300127 | Mental retardation, X-linked, 60 |
| 300600 | Ocular albinism, Forsius-Eriksson type |
| 301000 | Thrombocytopenia, X-linked, 313900 |
| 301000 | Wiskott-Aldrich syndrome |
| 301200 | Amelogenesis imperfecta |
| 301201 | Amelogenesis imperfecta-3, hypoplastic type |
| 301590 | Anophthalmos-1 |
| 301830 | Arthrogryposis, X-linked (spinal |
| | muscular atrophy, infantile, X-linked) |
| 301835 | Arts syndrome |
| 302060 | Noncompaction of left ventricular myocardium, isolated |
| 302060 | Barth syndrome |
| 302060 | Cardiomyopathy, X-linked dilated, 300069 |
| 302060 | Endocardial fibroelastosis-2 |
| 302350 | Nance-Horan syndrome |
| 302801 | Charcot-Marie-Tooth neuropathy, X-linked-2, recessive |
| 302960 | Chondrodysplasia punctata, X-linked dominant |
| 303700 | Colorblindness, blue monochromatic |
| 303800 | Colorblindness, deutan |
| 303900 | Colorblindness, protan |
| 304040 | Charcot-Marie-Tooth neuropathy, |
| | X-linked-1, dominant, 302800 |
| 304800 | Diabetes insipidus, nephrogenic |
| 305100 | Anhidrotic ectodermal dysplasia |
| 305435 | Heterocellular hereditary persistence |
| | of fetal hemoglobin, Swiss type |
| 305450 | FG syndrome |
| 305900 | Favism |
| 305900 | G6PD deficiency |
| 305900 | Hemolytic anemia due to G6PD deficiency |
| 306000 | Glycogenosis, X-linked hepatic, type I |
| 306000 | Glycogenosis, X-linked hepatic, type II |
| 306700 | Hemophilia A |
| 306995 | [Homosexuality, male] |
| 307800 | Hypophosphatemia, hereditary |
| 308310 | Incontinentia pigmenti, familial |
| 308800 | Keratosis follicularis spinulosa decalvans |
| 308840 | Spastic paraplegia, 312900 |
| 308840 | Hydrocephalus due to aqueductal stenosis, 307000 |
| 308840 | MASA syndrome, 303350 |
| 309200 | Manic-depressive illness, X-linked |
| 309470 | Mental retardation, X-linked, |
| | syndromic-3, with spastic diplegia |
| 309500 | Renpenning syndrome-1 |
| 309510 | Mental retardation, X-linked, |
| | syndromic-1, with dystonic movements, ataxia, and seizures |
| 309548 | Mental retardation, X-linked, FRAXE type |
| 309605 | Mental retardation, X-linked, syndromic-4, with congenital |
| | contractures and low fingertip arches |
| 309610 | Mental retardation, X-linked, syndromic-2, |
| | with dysmorphism and cerebral atrophy |
| 309620 | Mental retardation-skeletal dysplasia |
| 309850 | Brunner syndrome |
| 309900 | Mucopolysaccharidosis II |
| 310300 | Emery-Dreifuss muscular dystrophy |
| 310400 | Myotubular myopathy, X-linked |
| 310460 | Myopia-1 |
| 310460 | Bornholm eye disease |
| 311050 | Optic atrophy, X-linked |
| 311200 | Oral-facial-digital syndrome 1 |
| 311300 | Otopalatodigital syndrome, type I |
| 311510 | Waisman parkinsonism-mental retardation syndrome |
| 311850 | Phosphoribosyl pyrophosphate synthetase-related gout |
| 312040 | N syndrome, 310465 |
| 312060 | Properdin deficiency, X-linked |
| 312170 | Pyruvate dehydrogenase deficiency |
| 312700 | Retinoschisis |
| 312760 | Turner syndrome |
| 313400 | Spondyloepiphyseal dysplasia tarda |
| 313700 | Perineal hypospadias |
| 313700 | Prostate cancer |
| 313700 | Spinal and bulbar muscular atrophy of Kennedy, 313200 |
| 313700 | Breast cancer, male, with Reifenstein syndrome |
| 313700 | Androgen insensitivity, several forms |
| 314250 | Dystonia-3, torsion, with parkinsonism, Filipino type |
| 314300 | Goeminne TKCR syndrome |
| 314400 | Cardiac valvular dysplasia-1 |
| 314580 | Wieacker-Wolff syndrome |
| 600040 | Colorectal cancer |
| 600045 | Xeroderma pigmentosum, group E, subtype 2 |
| 600065 | Leukocyte adhesion deficiency, 116920 |
| 600079 | Colon cancer |
| 600101 | Deafness, autosomal dominant 2 |
| 600119 | Muscular dystrophy, Duchenne-like, type 2 |
| 600119 | Adhalinopathy, primary |
| 600138 | Retinitis pigmentosa-11 |
| 600151 | Bardet-Biedl syndrome 3 |
| 600163 | Long QT syndrome-3 |
| 600175 | Spinal muscular atrophy, congenital |
| | nonprogressive, of lower limbs |
| 600194 | Ichthyosis bullosa of Siemens, 146800 |
| 600223 | Spinocerebellar ataxia-4 |
| 600231 | Palmoplantar keratoderma, Bothnia type |
| 600243 | Temperature-sensitive apoptosis |
| 600309 | Atrioventricular canal defect-1 |
| 600319 | Diabetes mellitus, insulin-dependent, 4 |
| 600332 | Rippling muscle disease-1 |
| 600354 | Spinal muscular atrophy-1, 253300 |
| 600354 | Spinal muscular atrophy-2, 253550 |
| 600354 | Spinal muscular atrophy-3, 253400 |
| 600359 | Bartter syndrome, type 2 |
| 600374 | Bardet-Biedl syndrome 4 |
| 600525 | Trichodontoosseous syndrome, 190320 |
| 600528 | CPT deficiency, hepatic, type I, 255120 |
| 600536 | Myopathy, congenital |
| 600623 | Prostate cancer, 176807 |
| 600631 | Enuresis, nocturnal, 1 |
| 600650 | Myopathy due to CPT II deficiency, 255110 |
| 600650 | CPT deficiency, hepatic, type II, 600649 |
| 600652 | Deafness, autosomal dominant 4 |
| 600678 | Cancer susceptibility |
| 600722 | Ceroid lipofuscinosis, neuronal, variant juvenile |
| | type, with granular osmiophilic deposits |
| 600722 | Ceroid lipofuscinosis, neuronal-1, infantile, 256730 |
| 600757 | Orofacial cleft-3 |
| 600759 | Alzheimer disease-4 |
| 600760 | Pseudohypoaldosteronism, type I, 264350 |
| 600760 | Liddle syndrome, 177200 |
| 600761 | Pseudohypoaldosteronism, type I, 264350 |
| 600761 | Liddle syndrome, 177200 |
| 600792 | Deafness, autosomal recessive 5 |
| 600795 | Dementia, familial, nonspecific |
| 600807 | Bronchial asthma |
| 600808 | Enuresis, nocturnal, 2 |
| 600811 | Xeroderma pigmentosum, |
| | group E, DDB-negative subtype, 278740 |
| 600850 | Schizophrenia disorder-4 |
| 600881 | Cataract, congenital, zonular, with sutural opacities |
| 600882 | Charcot-Marie-Tooth neuropathy-2B |
| 600887 | Endometrial carcinoma |
| 600897 | Cataract, zonular pulverulent-1, 116200 |
| 600900 | Muscular dystrophy, limb-girdle, type 2E |
| 600918 | Cystinuria, type III |
| 600956 | Persistent Mullerian duct syndrome, type II, 261550 |
| 600957 | Persistent Mullerian duct syndrome, type I, 261550 |
| 600958 | Cardiomyopathy, familial hypertrophic, 4, 115197 |
| 600975 | Glaucoma 3, primary infantile, B |
| 601072 | Deafness, autosomal recessive 8 |
| 601105 | Pycnodysostosis, 265800 |
| 601145 | Epilepsy, progressive myoclonic 1, 254800 |
| 601199 | Neonatal hyperparathyroidism, 239200 |
| 601199 | Hypocalcemia, autosomal dominant, 601198 |
| 601199 | Hypocalciuric hypercalcemia, type I, 145980 |
| 601238 | Cerebellar ataxia, Cayman type |
| 601284 | Hereditary hemorrhagic telangiectasia-2, 600376 |
| 601295 | Bile acid malabsorption, primary |
| 601362 | DiGeorge syndrome/velocardiofacial syndrome complex-2 |
| 601369 | Deafness, autosomal dominant 9 |
| 601386 | Deafness, autosomal recessive 12 |
| 601412 | Deafness, autosomal dominant 7 |
| 601414 | Retinitis pigmentosa-18 |
| 601493 | Cardiomyopathy, dilated 1C |
| 601517 | Spinocerebellar ataxia-2, 183090 |
| 601518 | Prostate cancer, hereditary, 1, 176807 |
| 601567 | Combined factor V and VIII deficiency, 227300 |
| 601596 | Charcot-Marie-Tooth neuropathy, demyelinating |
| 601652 | Glaucoma 1A, primary open angle, juvenile-onset, 137750 |
| 601669 | Hirschsprung disease, one form |
| 601676 | Acute insulin response |
| 601682 | Glaucoma 1C, primary open angle |
| 601691 | Retinitis pigmentosa-19, 601718 |
| 601691 | Stargardt disease-1, 248200 |
| 601691 | Cone-rod dystrophy 3 |
| 601691 | Fundus flavimaculatus with macular dystrophy, 248200 |
| 601718 | Retinitis pigmentosa-19 |
| 601744 | Systemic lupus erythematosus, susceptibility to, 1 |
| 601769 | Osteoporosis, involutional |
| 601769 | Rickets, vitamin D-resistant, 277440 |
| 601771 | Glaucoma 3A, primary infantile, 231300 |
| 601780 | Ceroid-lipofuscinosis, neuronal-6, variant late infantile |
| 601844 | Pseudohypoaldosteronism type II |
| 601846 | Muscular dystrophy with rimmed vacuoles |
| 601863 | Bare lymphocyte syndrome, complementation group C |
| 601884 | [High bone mass] |
| 601920 | Alagille syndrome, 118450 |
| 601928 | Monilethrix, 158000 |
| 601954 | Muscular dystrophy, limb-girdle, type 2G |
| 601975 | Ectodermal dysplasia/skin fragility syndrome |
| 602080 | Paget disease of bone-2 |
| 602086 | Arrhythmogenic right ventricular dysplasia-3 |
| 602089 | Hemangioma, capillary, hereditary |
| 602092 | Deafness, autosomal recessive 18 |
| 602094 | Lipodystrophy, familial partial |
| 602116 | Glioma |
| 602136 | Refsum disease, infantile, 266510 |
| 602136 | Zellweger syndrome-1, 214100 |
| 602136 | Adrenoleukodystrophy, neonatal, 202370 |
| 602153 | Monilethrix, 158000 |
| 602216 | Peutz-Jeghers syndrome, 175200 |
| 602225 | Cone-rod retinal dystrophy-2, 120970 |
| 602225 | Leber congenital amaurosis, type III |
| 602279 | Oculopharyngeal muscular dystorphy, 164300 |
| 602279 | Oculopharyngeal muscular dystrophy, |
| | autosomal recessive, 257950 |
| 602403 | Alzheimer disease, susceptibility to |
| 602447 | Coronary artery disease, susceptibility to |
| 602477 | Febrile convulsions, familial, 2 |
| 602491 | Hyperlipidemia, familial combined, 1 |
| 602522 | Bartter syndrome, infantile, with sensorineural deafness |
| 602568 | Homocystinuria-megaloblastic anemia, cb1 E type, 236270 |
| 602574 | Deafness, autosomal dominant 12, 601842 |
| 602574 | Deafness, autosomal dominant 8, 601543 |
| 602716 | Nephrosis-1, congenital, Finnish type, 256300 |
| 602782 | Faisalabad histiocylosis |
| 602783 | Spastic paraplegia-7 |

Mature Polypeptides

[0161] The present invention also encompasses mature forms of a polypeptide having the amino acid sequence of SEQ ID NO:Y and/or the amino acid sequence encoded by the cDNA in a deposited clone. Polynucleotides encoding the mature forms (such as, for example, the polynucleotide sequence in SEQ ID NO:X and/or the polynucleotide sequence contained in the cDNA of a deposited clone) are also encompassed by the invention. Moreover, fragments or variants of these polypeptides (such as, fragments as described herein, polypeptides at least 80%, 85%, 90%, 95%, 96%, 97%, 98%, 99%, or 100% identical to these polypeptides, or polypeptides encoded by a polynucleotide that hybridizes under stringent conditions to the complementary strand of the polynucleotide encoding these polypeptides) are also encompassed by the invention. In preferred embodiments, these fragments or variants retain one or more functional acitivities of the full-length or mature form of the polypeptide (e.g., biological activity (such as, for example, activity useful in detecting, preventing, diagnosing, prognosticating, treating, and/or ameliorating cardiovascular disorders), antigenicity (ability to bind, or compete with a polypeptide of the invention for binding, to an anti-polypeptide of the invention antibody), immunogenicity (ability to generate antibody which binds to a specific polypeptide of the invention), ability to form multimers with polypeptides of the invention, and ability to bind to a receptor or ligand for a polypeptide of the invention). Antibodies that bind the polypeptides of the invention, and polynucleotides encoding these polypeptides are also encompassed by the invention.

[0162] According to the signal hypothesis, proteins secreted by mammalian cells have a signal or secretary leader sequence which is cleaved from the mature protein once export of the growing protein chain across the rough endoplasmic reticulum has been initiated. Most mammalian cells and even insect cells cleave secreted proteins with the same specificity. However, in some cases, cleavage of a secreted protein is not entirely uniform, which results in two or more mature species of the protein. Further, it has long been known that cleavage specificity of a secreted protein is ultimately determined by the primary structure of the complete protein, that is, it is inherent in the amino acid sequence of the polypeptide.

[0163] Methods for predicting whether a protein has a signal sequence, as well as the cleavage point for that sequence, are available. For instance, the method of McGeoch, Virus Res. 3:271-286 (1985), uses the information from a short N-terminal charged region and a subsequent uncharged region of the complete (uncleaved) protein. The method of von Heinje, Nucleic Acids Res. 14:4683-4690 (1986) uses the information from the residues surrounding the cleavage site, typically residues −13 to +2, where +1 indicates the amino terminus of the secreted protein. The accuracy of predicting the cleavage points of known mammalian secretory proteins for each of these methods is in the range of 75-80%. (von Heinje, supra.) However, the two methods do not always produce the same predicted cleavage point(s) for a given protein.

[0164] In the present case, the deduced amino acid sequence of the secreted polypeptide was analyzed by a computer program called SignalP (Henrik Nielsen et al., Protein Engineering 10:1-6 (1997)), which predicts the cellular location of a protein based on the amino acid sequence. As part of the computational prediction of localization, the methods of McGeoch and von Heinje are incorporated. The analysis of the amino acid sequences of the secreted proteins described herein by this program provided the results shown in Table 1A.

[0165] In specific embodiments, polypeptides of the invention comprise, or alternatively consist of, the predicted mature form of the polypeptide as delineated in columns 14 and 15 of Table 1A. Moreover, fragments or variants of these polypeptides (such as, fragments as described herein, polypeptides at least 80%, 85%, 90%, 95%, 96%, 97%, 98%, 99%, or 100% identical to these polypeptides encoded by a polynucleotide that hybridizes under stringent conditions to the complementary strand of the polynucleotide encoding these polypeptides) are also encompassed by the invention. In preferred embodiments, these fragments or variants retain one or more functional acitivities of the full-length or mature form of the polypeptide (e.g., biological activity (such as, for example, activity useful in detecting, preventing, diagnosing, prognosticating, treating and/or ameliorating cardiovascular disorders), antigenicity (ability to bind, or compete with a polypeptide of the invention for binding, to an anti-polypeptide of the invention antibody), immunogenicity (ability to generate antibody which binds to a specific polypeptide of the invention), ability to form multimers with polypeptides of the invention, and ability to bind to a receptor or ligand for a polypeptide of the invention). Antibodies that bind the polypeptides of the invention, and polynucleotides encoding these polypeptides are also encompassed by the invention.

[0166] Polynucleotides encoding proteins comprising, or consisting of, the predicted mature form of polypeptides of the invention (e.g., polynucleotides having the sequence of SEQ ID NO: X (Table 1A, column 4), the sequence delineated in columns 7 and 8 of Table 1A, and a sequence encoding the mature polypeptide delineated in columns 14 and 15 of Table 1A (e.g., the sequence of SEQ ID NO:X encoding the mature polypeptide delineated in columns 14 and 15 of Table 1)) are also encompassed by the invention, as are fragments or variants of these polynucleotides (such as, fragments as described herein, polynucleotides at least 80%, 85%, 90%, 95%, 96%, 97%, 98%, 99%, or 100% identical to these polyncueotides, and nucleic acids which hybridizes under stringent conditions to the complementary strand of the polynucleotide).

[0167] As one of ordinary skill would appreciate, however, cleavage sites sometimes vary from organism to organism and cannot be predicted with absolute certainty. Accordingly, the present invention provides secreted polypeptides having a sequence shown in SEQ ID NO:Y which have an N-terminus beginning within 15 residues of the predicted cleavage point (i.e., having 1, 2, 3, 4, 5,6, 7, 8 , 9, 10, 11, 12, 13, 14, or 15 more or less contiguous residues of SEQ ID NO:Y at the N-terminus when compared to the predicted mature form of the polypeptide (e.g., the mature polypeptide delineated in columns 14 and 15 of Table 1). Similarly, it is also recognized that in some cases, cleavage of the signal sequence protein is not entirely uniform, resulting in more than one secreted species. These polypeptides, and the polynucleotides encoding such polypeptides, are contemplated by the present invention.

[0168] Moreover, the signal sequence identified by the above analysis may not necessarily predict the naturally occurring signal sequence. For example, the naturally occurring signal sequence may be further upstream from the predicted signal sequence. However, it is likely that the predicted signal sequence will be capable of directing the secreted protein to the ER. Nonetheless, the present invention provides the mature protein produced by expression of the polynucleotide sequence of SEQ ID NO:X and/or the polynucleotide sequence contained in the cDNA of a deposited clone, in a mammalian cell (e.g., COS cells, as desribed below). These polypeptides, and the polynucleotides encoding such polypeptides, are contemplated by the present invention.

Polynucleotide and Polypeptide Variants

[0169] The present invention is also directed to variants of the polynucleotide sequence disclosed in SEQ ID NO:X or the complementary strand thereto, nucleotide sequences encoding the polypeptide of SEQ ID NO:Y, the nucleotide sequence of SEQ ID NO:X that encodes the polypeptide sequence as defined in columns 13 and 14 of Table 1A, nucleotide sequences encoding the polypeptide sequence as defined in columns 13 and 14 of Table 1A, the nucleotide sequence of SEQ ID NO:X encoding the polypeptide sequence as defined in column 7 of Table 1B.1, nucleotide sequences encoding the polypeptide as defined in Table 1B.1, the nucleotide sequence as defined in columns 8 and 9 of Table 2, nucleotide sequences encoding the polypeptide encoded by the nucleotide sequence as defined in columns 8 and 9 of Table 2, the nucleotide sequence as defined in column 6 of Table 1C, nucleotide sequences encoding the polypeptide encoded by the nucleotide sequence as defined in column 6 of Table 1C, the cDNA sequence contained in ATCC Deposit No:Z, nucleotide sequences encoding the polypeptide encoded by the cDNA sequence contained in ATCC Deposit No:Z, and/or nucleotide sequences encoding a mature (secreted) polypeptide encoded by the cDNA sequence contained in ATCC Deposit No:Z.

[0170] The present invention also encompasses variants of the polypeptide sequence disclosed in SEQ ID NO:Y, the polypeptide as defined in columns 13 and 14 of Table 1A, the polypeptide sequence as defined in Table 1B.1, a polypeptide sequence encoded by the polynucleotides sequence in SEQ ID NO:X, a polypeptide sequence encoded by the nucleotide sequence as defined in columns 8 and 9 of Table 2, a polypeptide sequence encoded by the nucleotide sequence as defined in column 6 of Table 1C, a polypeptide sequence encoded by the complement of the polynucleotide sequence in SEQ ID NO:X, the polypeptide sequence encoded by the cDNA sequence contained in ATCC Deposit No:Z and/or a mature (secreted) polypeptide encoded by the cDNA sequence contained in ATCC Deposit No:Z.

[0171] “Variant” refers to a polynucleotide or polypeptide differing from the polynucleotide or polypeptide of the present invention, but retaining essential properties thereof Generally, variants are overall closely similar, and, in many regions, identical to the polynucleotide or polypeptide of the present invention.

[0172] Thus, one aspect of the invention provides an isolated nucleic acid molecule comprising, or alternatively consisting of, a polynucleotide having a nucleotide sequence selected from the group consisting of: (a) a nucleotide sequence described in SEQ ID NO:X or contained in the cDNA sequence of ATCC Deposit No:Z; (b) a nucleotide sequence in SEQ ID NO:X or the cDNA in ATCC Deposit No:Z which encodes the complete amino acid sequence of SEQ ID NO:Y or the complete amino acid sequence encoded by the cDNA in ATCC Deposit No:Z; (c) a nucleotide sequence in SEQ ID NO:X or the cDNA in ATCC Deposit No:Z which encodes a mature polypeptide (i.e., a secreted polypeptide (e.g., as delineated in columns 14 and 15 of Table 1A)); (d) a nucleotide sequence in SEQ ID NO:X or the cDNA sequence of ATCC Deposit No:Z, which encodes a biologically active fragment of a polypeptide; (e) a nucleotide sequence in SEQ ID NO:X or the cDNA sequence of ATCC Deposit No:Z, which encodes an antigenic fragment of a polypeptide; (f) a nucleotide sequence encoding a polypeptide comprising the complete amino acid sequence of SEQ ID NO:Y or the complete amino acid sequence encoded by the cDNA in ATCC Deposit No:Z; (g) a nucleotide sequence encoding a mature polypeptide of the amino acid sequence of SEQ ID NO:Y (i.e., a secreted polypeptide (e.g., as delineated in columns 14 and 15 of Table 1A)) or a mature polypeptide of the amino acid sequence encoded by the cDNA in ATCC Deposit No:Z; (h) a nucleotide sequence encoding a biologically active fragment of a polypeptide having the complete amino acid sequence of SEQ ID NO:Y or the complete amino acid sequence encoded by the cDNA in ATCC Deposit No:Z; (i) a nucleotide sequence encoding an antigenic fragment of a polypeptide having the complete amino acid sequence of SEQ ID NO:Y or the complete amino acid sequence encoded by the cDNA in ATCC Deposit No:Z; and (j) a nucleotide sequence complementary to any of the nucleotide sequences in (a), (b), (c), (d), (e), (f), (g), (h), or (i) above.

[0173] The present invention is also directed to nucleic acid molecules which comprise, or alternatively consist of, a nucleotide sequence which is at least 80%, 85%, 90%, 95%, 96%, 97%, 98%, 99% or 100%, identical to, for example, any of the nucleotide sequences in (a), (b), (c), (d), (e), (f), (g), (h), (i), or (j) above, the nucleotide coding sequence in SEQ ID NO:X or the complementary strand thereto, the nucleotide coding sequence of the cDNA contained in ATCC Deposit No:Z or the complementary strand thereto, a nucleotide sequence encoding the polypeptide of SEQ ID NO:Y, a nucleotide sequence encoding a polypeptide sequence encoded by the nucleotide sequence in SEQ ID NO:X, a polypeptide sequence encoded by the complement of the polynucleotide sequence in SEQ ED NO:Y, a nucleotide sequence encoding the polypeptide encoded by the cDNA contained in ATCC Deposit No:Z, the nucleotide coding sequence in SEQ ID NO:X as defined in columns 8 and 9 of Table 2 or the complementary strand thereto, a nucleotide sequence encoding the polypeptide encoded by the nucleotide sequence in SEQ ID NO:X as defined in columns 8 and 9 of Table 2 or the complementary strand thereto, the nucleotide coding sequence in SEQ ID NO:B as defined in column 6 of Table 1C or the complementary strand thereto, a nucleotide sequence encoding the polypeptide encoded by the nucleotide sequence in SEQ ID NO:B as defined in column 6 of Table 1C or the complementary strand thereto, the nucleotide sequence in SEQ ID NO:X encoding the polypeptide sequence as defined in Table 1B.1 or the complementary strand thereto, nucleotide sequences encoding the polypeptide as defined in Table 1B.1 or the complementary strand thereto, and/or polynucleotide fragments of any of these nucleic acid molecules (e.g., those fragments described herein). Polynucleotides which hybridize to the complement of these nucleic acid molecules under stringent hybridization conditions or alternatively, under lower stringency conditions, are also encompassed by the invention, as are polypeptides encoded by these polynucleotides and nucleic acids.

[0174] In a preferred embodiment, the invention encompasses nucleic acid molecules which comprise, or alternatively, consist of a polynucleotide which hybridizes under stringent hybridization conditions, or alternatively, under lower stringency conditions, to a polynucleotide in (a), (b), (c), (d), (e), (f), (g), (h), or (i), above, as are polypeptides encoded by these polynucleotides. In another preferred embodiment, polynucleotides which hybridize to the complement of these nucleic acid molecules under stringent hybridization conditions, or alternatively, under lower stringency conditions, are also encompassed by the invention, as are polypeptides encoded by these polynucleotides.

[0175] In another embodiment, the invention provides a purified protein comprising, or alternatively consisting of, a polypeptide having an amino acid sequence selected from the group consisting of. (a) the complete amino acid sequence of SEQ ID NO:Y or the complete amino acid sequence encoded by the cDNA in ATCC Deposit No:Z; (b) the amino acid sequence of a mature (secreted) form of a polypeptide having the amino acid sequence of SEQ ID NO:Y (e.g., as delineated in columns 14 and 15 of Table 1A) or a mature form of the amino acid sequence encoded by the cDNA in ATCC Deposit No:Z mature; (c) the amino acid sequence of a biologically active fragment of a polypeptide having the complete amino acid sequence of SEQ ID NO:Y or the complete amino acid sequence encoded by the cDNA in ATCC Deposit No:Z; and (d) the amino acid sequence of an antigenic fragment of a polypeptide having the complete amino acid sequence of SEQ ID NO:Y or the complete amino acid sequence encoded by the cDNA in ATCC Deposit No:Z.

[0176] The present invention is also directed to proteins which comprise, or alternatively consist of, an amino acid sequence which is at least 80%, 85%, 90%, 95%, 96%, 97%, 98%, 99% or 100%, identical to, for example, any of the amino acid sequences in (a), (b), (c), or (d), above, the amino acid sequence shown in SEQ ID NO:Y, the amino acid sequence encoded by the cDNA contained in ATCC Deposit No:Z, the amino acid sequence of the polypeptide encoded by the nucleotide sequence in SEQ ID NO:X as defined in columns 8 and 9 of Table 2, the amino acid sequence of the polypeptide encoded by the nucleotide sequence in SEQ ID NO:B as defined in column 6 of Table 1C, the amino acid sequence as defined in Table 1B.1, an amino acid sequence encoded by the nucleotide sequence in SEQ ID NO:X, and an amino acid sequence encoded by the complement of the polynucleotide sequence in SEQ ID NO:X. Fragments of these polypeptides are also provided (e.g., those fragments described herein). Further proteins encoded by polynucleotides which hybridize to the complement of the nucleic acid molecules encoding these amino acid sequences under stringent hybridization conditions or alternatively, under lower stringency conditions, are also encompassed by the invention, as are the polynucleotides encoding these proteins.

[0177] By a nucleic acid having a nucleotide sequence at least, for example, 95% “identical” to a reference nucleotide sequence of the present invention, it is intended that the nucleotide sequence of the nucleic acid is identical to the reference sequence except that the nucleotide sequence may include up to five point mutations per each 100 nucleotides of the reference nucleotide sequence encoding the polypeptide. In other words, to obtain a nucleic acid having a nucleotide sequence at least 95% identical to a reference nucleotide sequence, up to 5% of the nucleotides in the reference sequence may be deleted or substituted with another nucleotide, or a number of nucleotides up to 5% of the total nucleotides in the reference sequence may be inserted into the reference sequence. The query sequence may be an entire sequence referred to in Table 1B.1 or Table 2 as the ORF (open reading frame), or any fragment specified as described herein.

[0178] As a practical matter, whether any particular nucleic acid molecule or polypeptide is at least 80%, 85%, 90%, 95%, 96%, 97%, 98% or 99% identical to a nucleotide sequence of the present invention can be determined conventionally using known computer programs. A preferred method for determining the best overall match between a query sequence (a sequence of the present invention) and a subject sequence, also referred to as a global sequence alignment, can be determined using the FASTDB computer program based on the algorithm of Brutlag et al. (Comp. App. Biosci. 6:237-245 (1990)). In a sequence alignment the query and subject sequences are both DNA sequences. An RNA sequence can be compared by converting U's to T's. The result of said global sequence alignment is expressed as percent identity. Preferred parameters used in a FASTDB alignment of DNA sequences to calculate percent identity are: Matrix=Unitary, k-tuple=4, Mismatch Penalty=1, Joining Penalty=30, Randomization Group Length=0, Cutoff Score=1, Gap Penalty=5, Gap Size Penalty 0.05, Window Size=500 or the length of the subject nucleotide sequence, whichever is shorter.

[0179] If the subject sequence is shorter than the query sequence because of 5′ or 3′ deletions, not because of internal deletions, a manual correction must be made to the results. This is because the FASTDB program does not account for 5′ and 3′ truncations of the subject sequence when calculating percent identity. For subject sequences truncated at the 5′ or 3′ ends, relative to the query sequence, the percent identity is corrected by calculating the number of bases of the query sequence that are 5′ and 3′ of the subject sequence, which are not matched/aligned, as a percent of the total bases of the query sequence. Whether a nucleotide is matched/aligned is determined by results of the FASTDB sequence alignment. This percentage is then subtracted from the percent identity, calculated by the above FASTDB program using the specified parameters, to arrive at a final percent identity score. This corrected score is what is used for the purposes of the present invention. Only bases outside the 5′ and 3′ bases of the subject sequence, as displayed by the FASTDB alignment, which are not matched/aligned with the query sequence, are calculated for the purposes of manually adjusting the percent identity score.

[0180] For example, a 90 base subject sequence is aligned to a 100 base query sequence to determine percent identity. The deletions occur at the 5′ end of the subject sequence and therefore, the FASTDB alignment does not show a matched/alignment of the first 10 bases at 5′ end. The 10 unpaired bases represent 10% of the sequence (number of bases at the 5′ and 3′ ends not matched/total number of bases in the query sequence) so 10% is subtracted from the percent identity score calculated by the FASTDB program. If the remaining 90 bases were perfectly matched the final percent identity would be 90%. In another example, a 90 base subject sequence is compared with a 100 base query sequence. This time the deletions are internal deletions so that there are no bases on the 5′ or 3′ of the subject sequence which are not matched/aligned with the query. In this case the percent identity calculated by FASTDB is not manually corrected. Once again, only bases 5′ and 3′ of the subject sequence which are not matched/aligned with the query sequence are manually corrected for. No other manual corrections are to be made for the purposes of the present invention.

[0181] By a polypeptide having an amino acid sequence at least, for example, 95% “identical” to a query amino acid sequence of the present invention, it is intended that the amino acid sequence of the subject polypeptide is identical to the query sequence except that the subject polypeptide sequence may include up to five amino acid alterations per each 100 amino acids of the query amino acid sequence. In other words, to obtain a polypeptide having an amino acid sequence at least 95% identical to a query amino acid sequence, up to 5% of the amino acid residues in the subject sequence may be inserted, deleted, (indels) or substituted with another amino acid. These alterations of the reference sequence may occur at the amino or carboxy terminal positions of the reference amino acid sequence or anywhere between those terminal positions, interspersed either individually among residues in the reference sequence or in one or more contiguous groups within the reference sequence.

[0182] As a practical matter, whether any particular polypeptide is at least 80%, 85%, 90%, 95%, 96%, 97%, 98%, 99% identical to, for instance, the amino acid sequence of a polypeptide referred to in Table 1A (e.g., the amino acid sequence delineated in columns 14 and 15) or a fragment thereof, Table 1B (e.g., the amino acid sequence identified in column 6) or a fragment thereof, Table 2 (e.g., the amino acid sequence of the polypeptide encoded by the polynucleotide sequence defined in columns 8 and 9 of Table 2) or a fragment thereof, the amino acid sequence of the polypeptide encoded by the polynucleotide sequence in SEQ ID NO:B as defined in column 6 of Table 1C or a fragment thereof, the amino acid sequence of the polypeptide encoded by the nucleotide sequence in SEQ ID NO:X or a fragment thereof, or the amino acid sequence of the polypeptide encoded by cDNA contained in ATCC Deposit No:Z, or a fragment thereof, the amino acid sequence of a mature (secreted) polypeptide encoded by cDNA contained in ATCC Deposit No:Z, or a fragment thereof, can be determined conventionally using known computer programs. A preferred method for determining the best overall match between a query sequence (a sequence of the present invention) and a subject sequence, also referred to as a global sequence alignment, can be determined using the FASTDB computer program based on the algorithm of Brutlag et al. (Comp. App. Biosci.6:237-245 (1990)). In a sequence alignment the query and subject sequences are either both nucleotide sequences or both amino acid sequences. The result of said global sequence alignment is expressed as percent identity. Preferred parameters used in a FASTDB amino acid alignment are: Matrix=PAM 0, k-tuple=2, Mismatch Penalty=1, Joining Penalty-20, Randomization Group Length=0, Cutoff Score=1, Window Size=sequence length, Gap Penalty=5, Gap Size Penalty=0.05, Window Size=500 or the length of the subject amino acid sequence, whichever is shorter.

[0183] If the subject sequence is shorter than the query sequence due to N- or C-terminal deletions, not because of internal deletions, a manual correction must be made to the results. This is because the FASTDB program does not account for N- and C-terminal truncations of the subject sequence when calculating global percent identity. For subject sequences truncated at the N- and C-termini, relative to the query sequence, the percent identity is corrected by calculating the number of residues of the query sequence that are N- and C-terminal of the subject sequence, which are not matched/aligned with a corresponding subject residue, as a percent of the total bases of the query sequence. Whether a residue is matched/aligned is determined by results of the FASTDB sequence alignment. This percentage is then subtracted from the percent identity, calculated by the above FASTDB program using the specified parameters, to arrive at a final percent identity score. This final percent identity score is what is used for the purposes of the present invention. Only residues to the N- and C-termini of the subject sequence, which are not matched/aligned with the query sequence, are considered for the purposes of manually adjusting the percent identity score. That is, only query residue positions outside the farthest N- and C-terminal residues of the subject sequence.

[0184] For example, a 90 amino acid residue subject sequence is aligned with a 100 residue query sequence to determine percent identity. The deletion occurs at the N-terminus of the subject sequence and therefore, the FASTDB alignment does not show a matching/alignment of the first 10 residues at the N-terminus. The 10 unpaired residues represent 10% of the sequence (number of residues at the N- and C-termini not matched/total number of residues in the query sequence) so 10% is subtracted from the percent identity score calculated by the FASTDB program. If the remaining 90 residues were perfectly matched the final percent identity would be 90%. In another example, a 90 residue subject sequence is compared with a 100 residue query sequence. This time the deletions are internal deletions so there are no residues at the N- or C-termini of the subject sequence which are not matched/aligned with the query. In this case the percent identity calculated by FASTDB is not manually corrected. Once again, only residue positions outside the N- and C-terminal ends of the subject sequence, as displayed in the FASTDB alignment, which are not matched/aligned with the query sequence are manually corrected for. No other manual corrections are to made for the purposes of the present invention.

[0185] The polynucleotide variants of the invention may contain alterations in the coding regions, non-coding regions, or both. Especially preferred are polynucleotide variants containing alterations which produce silent substitutions, additions, or deletions, but do not alter the properties or activities of the encoded polypeptide. Nucleotide variants produced by silent substitutions due to the degeneracy of the genetic code are preferred. Moreover, polypeptide variants in which less than 50, less than 40, less than 30, less than 20, less than 10, or 5-50, 5-25, 5-10, 1-5, or 1-2 amino acids are substituted, deleted, or added in any combination are also preferred. Polynucleotide variants can be produced for a variety of reasons, e.g., to optimize codon expression for a particular host (change codons in the human mRNA to those preferred by a bacterial host such as E. coli).

[0186] Naturally occurring variants are called “allelic variants,” and refer to one of several alternate forms of a gene occupying a given locus on a chromosome of an organism. (Genes II, Lewin, B., ed., John Wiley & Sons, New York (1985)). These allelic variants can vary at either the polynucleotide and/or polypeptide level and are included in the present invention. Alternatively, non-naturally occurring variants may be produced by mutagenesis techniques or by direct synthesis.

[0187] Using known methods of protein engineering and recombinant DNA technology, variants may be generated to improve or alter the characteristics of the polypeptides of the present invention. For instance, one or more amino acids can be deleted from the N-terminus or C-terminus of the polypeptide of the present invention without substantial loss of biological function. As an example, Ron et al. (J. Biol. Chem. 268: 2984-2988 (1993)) reported variant KGF proteins having heparin binding activity even after deleting 3, 8, or 27 amino-terminal amino acid residues. Similarly, Interferon gamma exhibited up to ten times higher activity after deleting 8-10 amino acid residues from the carboxy terminus of this protein. (Dobeli et al., J. Biotechnology 7:199-216 (1988).)

[0188] Moreover, ample evidence demonstrates that variants often retain a biological activity similar to that of the naturally occuring protein. For example, Gayle and coworkers (J. Biol. Chem. 268:22105-22111 (1993)) conducted extensive mutational analysis of human cytokine IL-1a. They used random mutagenesis to generate over 3,500 individual IL-1a mutants that averaged 2.5 amino acid changes per variant over the entire length of the molecule. Multiple mutations were examined at every possible amino acid position. The investigators found that “[m]ost of the molecule could be altered with little effect on either [binding or biological activity].” In fact, only 23 unique amino acid sequences, out of more than 3,500 nucleotide sequences examined, produced a protein that significantly differed in activity from wild-type.

[0189] Furthermore, even if deleting one or more amino acids from the N-terminus or C-terminus of a polypeptide results in modification or loss of one or more biological functions, other biological activities may still be retained. For example, the ability of a deletion variant to induce and/or to bind antibodies which recognize the secreted form will likely be retained when less than the majority of the residues of the secreted form are removed from the N-terminus or C-terminus. Whether a particular polypeptide lacking N- or C-terminal residues of a protein retains such immunogenic activities can readily be determined by routine methods described herein and otherwise known in the art.

[0190] Thus, the invention further includes polypeptide variants which show a biological or functional activity of the polypeptides of the polypeptides of the invention (such as, for example, activity useful in detecting, preventing, diagnosing, prognosticating, treating, and/or ameliorating cardiovascular disorders). Such variants include deletions, insertions, inversions, repeats, and substitutions selected according to general rules known in the art so as have little effect on activity.

[0191] The present application is directed to nucleic acid molecules at least 80%, 85%, 90%, 95%, 96%, 97%, 98%, 99% or 100% identical to the nucleic acid sequences disclosed herein, (e.g., encoding a polypeptide having the amino acid sequence of an N and/or C terminal deletion), irrespective of whether they encode a polypeptide having functional activity. This is because even where a particular nucleic acid molecule does not encode a polypeptide having functional activity, one of skill in the art would still know how to use the nucleic acid molecule, for instance, as a hybridization probe or a polymerase chain reaction (PCR) primer. Uses of the nucleic acid molecules of the present invention that do not encode a polypeptide having functional activity include, inter alia, (1) isolating a gene or allelic or splice variants thereof in a cDNA library; (2) in situ hybridization (e.g., “FISH”) to metaphase chromosomal spreads to provide precise chromosomal location of the gene, as described in Verma et al., Human Chromosomes: A Manual of Basic Techniques, Pergamon Press, New York (1988); (3) Northern Blot analysis for detecting mRNA expression in specific tissues (e.g., normal or diseased tissues); and (4) in situ hybridization (e.g., histochemistry) for detecting mRNA expression in specific tissues (e.g., normal or diseased tissues).

[0192] Preferred, however, are nucleic acid molecules having sequences at least 80%, 85%, 90%, 95%/, 96%, 97%, 98%, 99% or 100% identical to the nucleic acid sequences disclosed herein, which do, in fact, encode a polypeptide having functional activity. By a polypeptide having “functional activity” is meant, a polypeptide capable of displaying one or more known functional activities associated with a full-length (complete) protein and/or a mature (secreted) protein of the invention. Such functional activities include, but are not limited to, biological activity (such as, for example, activity useful in detecting, preventing, diagnosing, prognosticating, treating, and/or ameliorating cardiovascular diseases and disorders), antigenicity (ability to bind, or compete with a polypeptide of the invention for binding, to an anti-polypeptide of the invention antibody), immunogenicity (ability to generate antibody which binds to a specific polypeptide of the invention), ability to form multimers with polypeptides of the invention, and ability to bind to a receptor or ligand for a polypeptide of the invention.

[0193] The functional activity of the polypeptides, and fragments, variants and derivatives of the invention, can be assayed by various methods.

[0194] For example, in one embodiment where one is assaying for the ability to bind or compete with a full-length polypeptide of the present invention for binding to an anti-polypetide antibody, various immunoassays known in the art can be used, including but not limited to, competitive and non-competitive assay systems using techniques such as radioimmunoassays, ELISA (enzyme linked immunosorbent assay), “sandwich” immunoassays, immunoradiometric assays, gel diffusion precipitation reactions, immunodiffusion assays, in situ immunoassays (using colloidal gold, enzyme or radioisotope labels, for example), western blots, precipitation reactions, agglutination assays (e.g., gel agglutination assays, hemagglutination assays), complement fixation assays, immunofluorescence assays, protein A assays, and immunoelectrophoresis assays, etc. In one embodiment, antibody binding is detected by detecting a label on the primary antibody. In another embodiment, the primary antibody is detected by detecting binding of a secondary antibody or reagent to the primary antibody. In a further embodiment, the secondary antibody is labeled. Many means are known in the art for detecting binding in an immunoassay and are within the scope of the present invention.

[0195] In another embodiment, where a ligand is identified, or the ability of a polypeptide fragment, variant or derivative of the invention to multimerize is being evaluated, binding can be assayed, e.g., by means well-known in the art, such as, for example, reducing and non-reducing gel chromatography, protein affinity chromatography, and affinity blotting. See generally, Phizicky et al., Microbiol. Rev. 59:94-123 (1995). In another embodiment, the ability of physiological correlates of a polypeptide of the present invention to bind to a substrate(s) of the polypeptide of the invention can be routinely assayed using techniques known in the art.

[0196] In addition, assays described herein (see Examples) and otherwise known in the art may routinely be applied to measure the ability of polypeptides of the present invention and fragments, variants and derivatives thereof to elicit polypeptide related biological activity (either in vitro or in vivo). Other methods will be known to the skilled artisan and are within the scope of the invention.

[0197] Of course, due to the degeneracy of the genetic code, one of ordinary skill in the art will immediately recognize that a large number of the nucleic acid molecules having a sequence at least 80%, 85%, 90%, 95%, 96%, 97%, 98%, 99%, or 100% identical to, for example, the nucleic acid sequence of the cDNA contained in ATCC Deposit No:Z, the nucleic acid sequence referred to in Table 1B (SEQ ID NO:X), the nucleic acid sequence disclosed in Table 1A (e.g., the nucleic acid sequence delineated in columns 7 and 8), the nucleic acid sequence disclosed in Table 2 (e.g., the nucleic acid sequence delineated in columns 8 and 9) or fragments thereof, will encode polypeptides “having functional activity.” In fact, since degenerate variants of any of these nucleotide sequences all encode the same polypeptide, in many instances, this will be clear to the skilled artisan even without performing the above described comparison assay. It will be further recognized in the art that, for such nucleic acid molecules that are not degenerate variants, a reasonable number will also encode a polypeptide having functional activity. This is because the skilled artisan is fully aware of amino acid substitutions that are either less likely or not likely to significantly effect protein function (e.g., replacing one aliphatic amino acid with a second aliphatic amino acid), as further described below.

[0198] For example, guidance concerning how to make phenotypically silent amino acid substitutions is provided in Bowie et al., “Deciphering the Message in Protein Sequences: Tolerance to Amino Acid Substitutions,” Science 247:1306-1310 (1990), wherein the authors indicate that there are two main strategies for studying the tolerance of an amino acid sequence to change.

[0199] The first strategy exploits the tolerance of amino acid substitutions by natural selection during the process of evolution. By comparing amino acid sequences in different species, conserved amino acids can be identified. These conserved amino acids are likely important for protein function. In contrast, the amino acid positions where substitutions have been tolerated by natural selection indicates that these positions are not critical for protein function. Thus, positions tolerating amino acid substitution could be modified while still maintaining biological activity of the protein.

[0200] The second strategy uses genetic engineering to introduce amino acid changes at specific positions of a cloned gene to identify regions critical for protein function. For example, site directed mutagenesis or alanine-scanning mutagenesis (introduction of single alanine mutations at every residue in the molecule) can be used. See Cunningham and Wells, Science 244:1081-1085 (1989). The resulting mutant molecules can then be tested for biological activity.

[0201] As the authors state, these two strategies have revealed that proteins are surprisingly tolerant of amino acid substitutions. The authors further indicate which amino acid changes are likely to be permissive at certain amino acid positions in the protein. For example, most buried (within the tertiary structure of the protein) amino acid residues require nonpolar side chains, whereas few features of surface side chains are generally conserved. Moreover, tolerated conservative amino acid substitutions involve replacement of the aliphatic or hydrophobic amino acids Ala, Val, Leu and Ile; replacement of the hydroxyl residues Ser and Thr; replacement of the acidic residues Asp and Glu; replacement of the amide residues Asn and Gln, replacement of the basic residues Lys, Arg, and His; replacement of the aromatic residues Phe, Tyr, and Trp, and replacement of the small-sized amino acids Ala, Ser, Thr, Met, and Gly.

[0202] Besides conservative amino acid substitution, variants of the present invention include (i) substitutions with one or more of the non-conserved amino acid residues, where the substituted amino acid residues may or may not be one encoded by the genetic code, or (ii) substitutions with one or more of the amino acid residues having a substituent group, or (iii) fusion of the mature polypeptide with another compound, such as a compound to increase the stability and/or solubility of the polypeptide (for example, polyethylene glycol), (iv) fusion of the polypeptide with additional amino acids, such as, for example, an IgG Fc fusion region peptide, serum albumin (preferably human serum albumin) or a fragment thereof, or leader or secretory sequence, or a sequence facilitating purification, or (v) fusion of the polypeptide with another compound, such as albumin (including but not limited to recombinant albumin (see, e.g., U.S. Pat. No. 5,876,969, issued Mar. 2, 1999, EP Patent 0 413 622, and U.S. Pat. No. 5,766,883, issued Jun. 16, 1998, herein incorporated by reference in their entirety)). Such variant polypeptides are deemed to be within the scope of those skilled in the art from the teachings herein.

[0203] For example, polypeptide variants containing amino acid substitutions of charged amino acids with other charged or neutral amino acids may produce proteins with improved characteristics, such as less aggregation. Aggregation of pharmaceutical formulations both reduces activity and increases clearance due to the aggregate's immunogenic activity. See Pinckard et al., Clin. Exp. Immunol. 2:331-340 (1967); Robbins et al., Diabetes 36: 838-845 (1987); Cleland et al., Crit. Rev. Therapeutic Drug Carrier Systems 10:307-377 (1993).

[0204] A further embodiment of the invention relates to polypeptides which comprise the amino acid sequence of a polypeptide having an amino acid sequence which contains at least one amino acid substitution, but not more than 50 amino acid substitutions, even more preferably, not more than 40 amino acid substitutions, still more preferably, not more than 30 amino acid substitutions, and still even more preferably, not more than 20 amino acid substitutions from a polypeptide sequence disclosed herein. Of course it is highly preferable for a polypeptide to have an amino acid sequence which, for example, comprises the amino acid sequence of a polypeptide of SEQ ID NO:Y, the amino acid sequence of the mature (e.g., secreted) polypeptide of SEQ ID NO:Y, an amino acid sequence encoded by SEQ ID NO:X, an amino acid sequence encoded by the portion of SEQ ID NO:X as defined in columnns 8 and 9 of Table 2, an amino acid sequence encoded by the complement of SEQ ID NO:X, an amino acid sequence encoded by cDNA contained in ATCC Deposit No:Z, and/or the amino acid sequence of a mature (secreted) polypeptide encoded by cDNA contained in ATCC Deposit No:Z, or a fragment thereof, which contains, in order of ever-increasing preference, at least one, but not more than 10, 9, 8, 7, 6, 5, 4, 3, 2 or 1 amino acid substitutions.

[0205] In specific embodiments, the polypeptides of the invention comprise, or alternatively, consist of, fragments or variants of a reference amino acid sequence selected from: (a) the amino acid sequence of SEQ ID NO:Y or fragments thereof (e.g., the mature formand/or other fragments described herein); (b) the amino acid sequence encoded by SEQ ID NO:X or fragments thereof, (c) the amino acid sequence encoded by the complement of SEQ ID NO:X or fragments thereof, (d) the amino acid sequence encoded by the portion of SEQ ID NO:X as defined in columns 8 and 9 of Table 2 or fragments thereof, and (e) the amino acid sequence encoded by cDNA contained in ATCC Deposit No:Z or fragments thereof; wherein the fragments or variants have 1-5, 5-10, 5-25, 5-50, 10-50 or 50-150, amino acid residue additions, substitutions, and/or deletions when compared to the reference amino acid sequence. In preferred embodiments, the amino acid substitutions are conservative. Polynucleotides encoding these polypeptides are also encompassed by the invention.

Polynucleotide and Polypeptide Fragments

[0206] The present invention is also directed to polynucleotide fragments of the polynucleotides (nucleic acids) of the invention. In the present invention, a “polynucleotide fragment” refers to a polynucleotide having a nucleic acid sequence which, for example: is a portion of the cDNA contained in ATCC Deposit No:Z or the complementary strand thereto; is a portion of the polynucleotide sequence encoding the polypeptide encoded by the cDNA contained in ATCC Deposit No:Z or the complementary strand thereto; is a portion of the polynucleotide sequence encoding the mature (secreted) polypeptide encoded by the cDNA contained in ATCC Deposit No:Z or the complementary strand thereto; is a portion of a polynucleotide sequence encoding the mature amino acid sequence as defined in columns 14 and 15 of Table 1A or the complementary strand thereto; is a portion of a polynucleotide sequence encoding the amino acid sequence encoded by the region of SEQ ID NO:X as defined in columns 8 and 9 of Table 2 or the complementary strand thereto; is a portion of the polynucleotide sequence of SEQ ID NO:X as defined in columns 8 and 9 of Table 2 or the complementary strand thereto; is a portion of the polynucleotide sequence in SEQ ID NO:X or the complementary strand thereto; is a polynucleotide sequence encoding a portion of the polypeptide of SEQ ID NO:Y; is a polynucleotide sequence encoding a portion of a polypeptide encoded by SEQ ID NO:X; is a polynucleotide sequence encoding a portion of a polypeptide encoded by the complement of the polynucleotide sequence in SEQ ID NO:X; is a portion of a polynucleotide sequence encoding the amino acid sequence encoded by the region of SEQ ID NO:B as defined in column 6 of Table 1C or the complementary strand thereto; or is a portion of the polynucleotide sequence of SEQ ID NO:B as defined in column 6 of Table 1C or the complementary strand thereto.

[0207] The polynucleotide fragments of the invention are preferably at least about 15 nt, and more preferably at least about 20 nt, still more preferably at least about 30 nt, and even more preferably, at least about 40 nt, at least about 50 nt, at least about 75 nt, or at least about 150 nt in length. A fragment “at least 20 nt in length,” for example, is intended to include 20 or more contiguous bases from the cDNA sequence contained in ATCC Deposit No:Z, or the nucleotide sequence shown in SEQ ID NO:X or the complementary stand thereto. In this context “about” includes the particularly recited value or a value larger or smaller by several (5, 4, 3, 2, or 1) nucleotides, at either terminus or at both termini. These nucleotide fragments have uses that include, but are not limited to, as diagnostic probes and primers as discussed herein. Of course, larger fragments (e.g., at least 160, 170, 180, 190, 200, 250, 500, 600, 1000, or 2000 nucleotides in length ) are also encompassed by the invention.

[0208] Moreover, representative examples of polynucleotide fragments of the invention comprise, or alternatively consist of, a sequence from about nucleotide number 1-50, 51-100, 101-150, 151-200, 201-250, 251-300, 301-350, 351-400, 401-450, 451-500, 501-550, 551-600, 601-650, 651-700, 701-750, 751-800, 801-850, 851-900, 901-950, 951-1000, 1001-1050, 1051-1100, 1101-1150, 1151-1200, 1201-1250, 1251-1300, 1301-1350, 1351-1400, 1401-1450, 1451-1500, 1501-1550, 1551-1600, 1601-1650, 1651-1700, 1701-1750, 1751-1800, 1801-1850, 1851-1900, 1901-1950, 1951-2000, 2001-2050, 2051-2100, 2101-2150, 2151-2200, 2201-2250, 2251-2300, 2301-2350, 2351-2400, 2401-2450, 2451-2500, 2501-2550, 2551-2600, 2601-2650, 2651-2700, 2701-2750, 2751-2800, 2801-2850, 2851-2900, 2901-2950, 2951-3000, 3001-3050, 3051-3100, 3101-3150, 3151-3200, 3201-3250, 3251-3300, 3301-3350, 3351-3400, 3401-3450, 3451-3500, 3501-3550, 3551-3600, 3601-3650, 3651-3700, 3701-3750, 3751-3800, 3801-3850, 3851-3900, 3901-3950, 3951-4000, 4001-4050, 4051-4100, 4101-4150, 4151-4200, 4201-4250, 4251-4300, 4301-4350, 4351-4400, 4401-4450, 4451-4500, 4501-4550, 4551-4600, 4601-4650, 4651-4700, 4701-4750, 4751-4800, 4801-4850, 4851-4900, 4901-4950, 4951-5000, 5001-5050, 5051-5100, 5101-5150, 5151-5200, 5201-5250, 5251-5300, 5301-5350, 5351-5400, 5401-5450, 5451-5500, 5501-5550, 5551-5600, 5601-5650, 5651-5700, 5701-5750, 5751-5800, 5801-5850, 5851-5900, 5901-5950, 5951-6000, 6001-6050, 6051-6100, 6101-6150, 6151-6200, 6201-6250, 6251-6300, 6301-6350, 6351-6400, 6401-6450, 6451-6500, 6501-6550, 6551-6600, 6601-6650, 6651-6700, 6701-6750, 6751-6800, 6801-6850, 6851-6900, 6901-6950, 6951-7000, 7001-7050, 7051-7100, 7101-7150, 7151-7200, 7201-7250, 7251-7300 or 7301 to the end of SEQ ID NO:X, or the complementary strand thereto. In this context “about” includes the particularly recited range or a range larger or smaller by several (5, 4, 3, 2, or 1) nucleotides, at either terminus or at both termini. Preferably, these fragments encode a polypeptide which has a functional activity (e.g., biological activity; such as, for example, activity useful in detecting, preventing, diagnosing, prognosticating, treating, and/or ameliorating cardiovascular diseases and disorders). More preferably, these polynucleotides can be used as probes or primers as discussed herein. Polynucleotides which hybridize to one or more of these polynucleotides under stringent hybridization conditions or alternatively, under lower stringency conditions are also encompassed by the invention, as are polypeptides encoded by these polynucleotides.

[0209] Further representative examples of polynucleotide fragments of the invention comprise, or alternatively consist of, a sequence from about nucleotide number 1-50, 51-100, 101-150, 151-200, 201-250, 251-300, 301-350, 351-400, 401-450, 451-500, 501-550, 551-600, 601-650, 651-700, 701-750, 751-800, 801-850, 851-900, 901-950, 951-1000, 1001-1050, 1051-1100, 1101-1150, 1151-1200, 1201-1250, 1251-1300, 1301-1350, 1351-1400, 1401-1450, 1451-1500, 1501-1550, 1551-1600, 1601-1650, 1651-1700, 1701-1750, 1751-1800, 1801-1850, 1851-1900, 1901-1950, 1951-2000, 2001-2050, 2051-2100, 2101-2150, 2151-2200, 2201-2250, 2251-2300, 2301-2350, 2351-2400, 2401-2450, 2451-2500, 2501-2550, 2551-2600, 2601-2650, 2651-2700, 2701-2750, 2751-2800, 2801-2850, 2851-2900, 2901-2950, 2951-3000, 3001-3050, 3051-3100, 3101-3150, 3151-3200, 3201-3250, 3251-3300, 3301-3350, 3351-3400, 3401-3450, 3451-3500, 3501-3550, 3551-3600, 3601-3650, 3651-3700, 3701-3750, 3751-3800, 3801-3850, 3851-3900, 3901-3950, 3951-4000, 4001-4050, 4051-4100, 4101-4150, 4151-4200, 4201-4250, 4251-4300, 4301-4350, 4351-4400, 4401-4450, 4451-4500, 4501-4550, 4551-4600, 4601-4650, 4651-4700, 4701-4750, 4751-4800, 4801-4850, 4851-4900, 4901-4950, 4951-5000, 5001-5050, 5051-5100, 5101-5150, 5151-5200, 5201-5250, 5251-5300, 5301-5350, 5351-5400, 5401-5450, 5451-5500, 5501-5550, 5551-5600, 5601-5650, 5651-5700, 5701-5750, 5751-5800, 5801-5850, 5851-5900, 5901-5950, 5951-6000, 6001-6050, 6051-6100, 6101-6150, 6151-6200, 6201-6250, 6251-6300, 6301-6350, 6351-6400, 6401-6450, 6451-6500, 6501-6550, 6551-6600, 6601-6650, 6651-6700, 6701-6750, 6751-6800, 6801-6850, 6851-6900, 6901-6950, 6951-7000, 7001-7050, 7051-7100, 7101-7150, 7151-7200, 7201-7250, 7251-7300 or 7301 to the end of the cDNA sequence contained in ATCC Deposit No:Z, or the complementary strand thereto. In this context “about” includes the particularly recited range or a range larger or smaller by several (5, 4, 3, 2, or 1) nucleotides, at either terminus or at both termini. Preferably, these fragments encode a polypeptide which has a functional activity (e.g., biological activity). More preferably, these polynucleotides can be used as probes or primers as discussed herein. Polynucleotides which hybridize to one or more of these polynucleotides under stringent hybridization conditions or alternatively, under lower stringency conditions are also encompassed by the invention, as are polypeptides encoded by these polynucleotides.

[0210] Moreover, representative examples of polynucleotide fragments of the invention comprise, or alternatively consist of, a nucleic acid sequence comprising one, two, three, four, five, six, seven, eight, nine, ten, or more of the above described polynucleotide fragments of the invention in combination with a polynucleotide sequence delineated in Table 1C column 6. Additional, representative examples of polynucleotide fragments of the invention comprise, or alternatively consist of, a nucleic acid sequence comprising one, two, three, four, five, six, seven, eight, nine, ten, or more of the above described polynucleotide fragments of the invention in combination with a polynucleotide sequence that is the complementary strand of a sequence delineated in column 6 of Table 1C. In further embodiments, the above-described polynucleotide fragments of the invention comprise, or alternatively consist of, sequences delineated in Table 1C, column 6, and have a nucleic acid sequence which is different from that of the BAC fragment having the sequence disclosed in SEQ ID NO:B (see Table 1C, column 5). In additional embodiments, the above-described polynucleotide fragments of the invention comprise, or alternatively consist of, sequences delineated in Table 1C, column 6, and have a nucleic acid sequence which is different from that published for the BAC clone identified as BAC ID NO:A (see Table 1C, column 4). In additional embodiments, the above-described polynucleotides of the invention comprise, or alternatively consist of, sequences delineated Table 1C, column 6, and have a nucleic acid sequence which is different from that contained in the BAC clone identified as BAC ID NO:A (see Table 1C, column 4). Polypeptides encoded by these polynucleotides, other polynucleotides that encode these polypeptides, and antibodies that bind these polypeptides are also encompassed by the invention. Additionally, fragments and variants of the above-described polynucleotides and polypeptides are also encompassed by the invention.

[0211] In additional specific embodiments, polynucleotides of the invention comprise, or alternatively consist of, one, two, three, four, five, six, seven, eight, nine, ten, or more fragments of the sequences delineated in column 6 of Table 1C, and the polynucleotide sequence of SEQ ID NO:X (e.g., as defined in Table 1C, column 2) or fragments or variants thereof Polypeptides encoded by these polynucleotides, other polynucleotides that encode these polypeptides, and antibodies that bind these polypeptides are also encompassed by the invention.

[0212] In additional specific embodiments, polynucleotides of the invention comprise, or alternatively consist of, one, two, three, four, five, six, seven, eight, nine, ten, or more fragments of the sequences delineated in column 6 of Table 1C which correspond to the same ATCC Deposit No:Z (see Table 1C, column 1), and the polynucleotide sequence of SEQ ID NO:X (e.g., as defined in Table 1A, 1B, or 1C) or fragments or variants thereof. Polypeptides encoded by these polynucleotides, other polynucleotides that encode these polypeptides, and antibodies that bind these polypeptides are also encompassed by the invention.

[0213] In further specific embodiments, polynucleotides of the invention comprise, or alternatively consist of, one, two, three, four, five, six, seven, eight, nine, ten, or more fragments of the sequences delineated in the same row of column 6 of Table 1C, and the polynucleotide sequence of SEQ ID NO:X (e.g., as defined in Table 1A, 1B, or 1C) or fragments or variants thereof. Polypeptides encoded by these polynucleotides, other polynucleotides that encode these polypeptides, and antibodies that bind these polypeptides are also encompassed by the invention.

[0214] In additional specific embodiments, polynucleotides of the invention comprise, or alternatively consist of a polynucleotide sequence in which the 3′ 10 polynucleotides of one of the sequences delineated in column 6 of Table 1C and the 5′ 10 polynucleotides of the sequence of SEQ ID NO:X are directly contiguous. Nucleic acids which hybridize to the complement of these 20 contiguous polynucleotides under stringent hybridization conditions or alternatively, under lower stringency conditions, are also encompassed by the invention. Polypeptides encoded by these polynucleotides and/or nucleic acids, other polynucleotides and/or nucleic acids that encode these polypeptides, and antibodies that bind these polypeptides are also encompassed by the invention. Additionally, fragments and variants of the above-described polynucleotides, nucleic acids, and polypeptides are also encompassed by the invention.

[0215] In additional specific embodiments, polynucleotides of the invention comprise, or alternatively consist of a polynucleotide sequence in which the 3′ 10 polynucleotides of one of the sequences delineated in column 6 of Table 1C and the 5′ 10 polynucleotides of a fragment or variant of the sequence of SEQ ID NO:X (e.g., as described herein) are directly contiguous Nucleic acids which hybridize to the complement of these 20 contiguous polynucleotides under stringent hybridization conditions or alternatively, under lower stringency conditions, are also encompassed by the invention. Polypeptides encoded by these polynucleotides and/or nucleic acids, other polynucleotides and/or nucleic acids encoding these polypeptides, and antibodies that bind these polypeptides are also encompassed by the invention. Additionally, fragments and variants of the above-described polynucleotides, nucleic acids, and polypeptides are also encompassed by the invention.

[0216] In further specific embodiments, polynucleotides of the invention comprise, or alternatively consist of a polynucleotide sequence in which the 3′ 10 polynucleotides of a fragment or variant of the sequence of SEQ ID NO:X and the 5′ 10 polynucleotides of the sequences delineated in column 6 of Table 1C are directly contiguous. Nucleic acids which hybridize to the complement of these 20 contiguous polynucleotides under stringent hybridization conditions or alternatively, under lower stringency conditions, are also encompassed by the invention. Polypeptides encoded by these polynucleotides and/or nucleic acids, other polynucleotides and/or nucleic acids encoding these polypeptides, and antibodies that bind these polypeptides are also encompassed by the invention. Additionally, fragments and variants of the above-described polynucleotides, nucleic acids, and polypeptides are also encompassed by the invention.

[0217] In specific embodiments, polynucleotides of the invention comprise, or alternatively consist of a polynucleotide sequence in which 3′ 10 polynucleotides of one of the sequences delineated in column 6 of Table 1C and the 5′ 10 polynucleotides of another sequence in column 6 are directly contiguous. In preferred embodiments, the 3′ 10 polynucleotides of one of the sequences delineated in column 6 of Table 1C is directly contiguous with the 5′ 10 polynucleotides of the next sequential exon delineated in Table 1C, column 6. Nucleic acids which hybridize to the complement of these 20 contiguous polynucleotides under stringent hybridization conditions or alternatively, under lower stringency conditions, are also encompassed by the invention. Polypeptides encoded by these polynucleotides and/or nucleic acids, other polynucleotides and/or nucleic acids encoding these polypeptides, and antibodies that bind these polypeptides are also encompassed by the invention. Additionally, fragments and variants of the above-described polynucleotides, nucleic acids, and polypeptides are also encompassed by the invention.

[0218] In the present invention, a “polypeptide fragment” refers to an amino acid sequence which is a portion of the amino acid sequence contained in SEQ ID NO:Y, is a portion of the mature form of SEQ ID NO:Y as defined in columns 14 and 15 of Table 1A, a portion of an amino acid sequence encoded by the portion of SEQ ID NO:X as defined in columnns 8 and 9 of Table 2, is a portion of an amino acid sequence encoded by the polynucleotide sequence of SEQ ID NO:X, is a portion of an amino acid sequence encoded by the complement of the polynucleotide sequence in SEQ ID NO:X, is a portion of the amino acid sequence of a mature (secreted) polypeptide encoded by the cDNA contained in ATCC Deposit No:Z, and/or is a portion of an amino acid sequence encoded by the cDNA contained in ATCC Deposit No:Z. Protein (polypeptide) fragments may be “free-standing,” or comprised within a larger polypeptide of which the fragment forms a part or region, most preferably as a single continuous region. Representative examples of polypeptide fragments of the invention, include, for example, fragments comprising, or alternatively consisting of, from about amino acid number 1-20, 21-40, 41-60, 61-80, 81-100, 101-120, 121-140, 141-160, 161-180, 181-200, 201-220, 221-240, 241-260, 261-280, 281-300, 301-320, 321-340, 341-360, 361-380, 381-400, 401-420, 421-440, 441-460, 461-480, 481-500, 501-520, 521-540, 541-560, 561-580, 581-600, 601-620, 621-640, 641-660, 661-680, 681-700, 701-720, 721-740, 741-760, 761-780, 781-800, 801-820, 821-840, 841-860, 861-880, 881-900, 901-920, 921-940, 941-960, 961-980, 981-1000, 1001-1020, 1021-1040, 1041-1060, 1061-1080, 1081-1100, 1101-1120, 1121-1140, 1141-1160, 1161-1180, 1181-1200, 1201-1220, 1221-1240, 1241-1260, 1261-1280, 1281-1300, 1301-1320, 1321-1340, 1341-1360, 1361-1380, 1381-1400, 1401-1420, 1421-1440, or 1441 to the end of the coding region of cDNA and SEQ ID NO: Y. In a preferred embodiment, polypeptide fragments of the invention include, for example, fragments comprising, or alternatively consisting of, from about amino acid number 1-20, 2140, 41-60, 61-80, 81-100, 101-120, 121-140, 141-160, 161-180, 181-200, 201-220, 221-240, 241-260, 261-280, 281-300, 301-320, 321-340, 341-360, 361-380, 381-400, 401-420, 421-440, 441-460, 461-480, 481-500, 501-520, 521-540, 541-560, 561-580, 581-600, 601-620, 621-640, 641-660, 661-680, 681-700, 701-720, 721-740, 741-760, 761-780, 781-800, 801-820, 821-840, 841-860, 861-880, 881-900, 901-920, 921-940, 941-960, 961-980, 981-1000, 1001-1020, 1021-1040, 1041-1060, 1061-1080, 1081-1100, 1101-1120, 1121-1140, 1141-1160, 1161-1180, 1181-1200, 1201-1220, 1221-1240, 1241-1260, 1261-1280, 1281-1300, 1301-1320, 1321-1340, 1341-1360, 1361-1380, 1381-1400, 1401-1420, 1421-1440, or 1441 to the end of the coding region of SEQ ID NO:Y. Moreover, polypeptide fragments of the invention may be at least about 10, 15, 20, 25,30, 35, 40, 45, 50, 55, 60, 65, 70, 75, 80, 85, 90, 100, 110, 120, 130, 140, or 150 amino acids in length. In this context “about” includes the particularly recited ranges or values, or ranges or values larger or smaller by several (5, 4, 3, 2, or 1) amino acids, at either extreme or at both extremes. Polynucleotides encoding these polypeptide fragments are also encompassed by the invention.

[0219] Even if deletion of one or more amino acids from the N-terminus of a protein results in modification of loss of one or more biological functions of the protein, other functional activities (e.g., biological activities; such as, for example, activity useful in detecting, preventing, diagnosing, prognosticating, treating, and/or ameliorating cardiovascular diseases and disorders; ability to multimerize; ability to bind a ligand; antigenic ability useful for production of polypeptide specific antibodies) may still be retained. For example, the ability of shortened muteins to induce and/or bind to antibodies which recognize the complete or mature forms of the polypeptides generally will be retained when less than the majority of the residues of the complete or mature polypeptide are removed from the N-terminus. Whether a particular polypeptide lacking N-terminal residues of a complete polypeptide retains such immunologic activities can readily be determined by routine methods described herein and otherwise known in the art. It is not unlikely that a mutein with a large number of deleted N-terminal amino acid residues may retain some biological or immunogenic activities. In fact, peptides composed of as few as six amino acid residues may often evoke an immune response.

[0220] Accordingly, polypeptide fragments include the secreted protein as well as the mature form. Further preferred polypeptide fragments include the secreted protein or the mature form having a continuous series of deleted residues from the amino or the carboxy terminus, or both. For example, any number of amino acids, ranging from 1-60, can be deleted from the amino terminus of either the secreted polypeptide or the mature form. Similarly, any number of amino acids, ranging from 1-30, can be deleted from the carboxy terminus of the secreted protein or mature form. Furthermore, any combination of the above amino and carboxy terminus deletions are preferred. Similarly, polynucleotides encoding these polypeptide fragments are also preferred.

[0221] The present invention further provides polypeptides having one or more residues deleted from the amino terminus of the amino acid sequence of a polypeptide disclosed herein (e.g., a polypeptide of SEQ ID NO:Y, a polypeptide as defined in columns 14 and 15 of Table 1A, a polypeptide encoded by the polynucleotide sequence contained in SEQ ID NO:X or the complement thereof, a polypeptide encoded by the portion of SEQ ID NO:X as defined in columns 8 and 9 of Table 2, a polypeptide encoded by the portion of SEQ ID NO:B as defined in column 6 of Table 1C, a polypeptide encoded by the cDNA contained in ATCC Deposit No:Z, and/or a mature polypeptide encoded by the cDNA contained in ATCC Deposit No:Z). In particular, N-terminal deletions may be described by the general formula m-q, where q is a whole integer representing the total number of amino acid residues in a polypeptide of the invention (e.g., the polypeptide disclosed in SEQ ID NO:Y, the mature (secreted) portion of SEQ ID NO:Y as defined in columns 14 and 15 of Table 1A, or the polypeptide encoded by the portion of SEQ ID NO:X as defined in columns 8 and 9 of Table 2), and m is defined as any integer ranging from 2 to q-6. Polynucleotides encoding these polypeptides are also encompassed by the invention.

[0222] The present invention further provides polypeptides having one or more residues from the carboxy terminus of the amino acid sequence of a polypeptide disclosed herein (e.g., a polypeptide of SEQ ID NO:Y, the mature (secreted) portion of SEQ ID NO:Y as defined in columns 14 and 15 of Table 1A, a polypeptide encoded by the polynucleotide sequence contained in SEQ ID NO:X, a polypeptide encoded by the portion of SEQ ID NO:X as defined in columns 8 and 9 of Table 2, a polypeptide encoded by the portion of SEQ ID NO:B as defined in column 6 of Table 1C, a polypeptide encoded by the cDNA contained in ATCC Deposit No:Z, and/or a mature polypeptide encoded by the cDNA contained in ATCC Deposit No:Z). In particular, C-terminal deletions may be described by the general formula I-n, where n is any whole integer ranging from 6 to q-1, and where n corresponds to the position of amino acid residue in a polypeptide of the invention. Polynucleotides encoding these polypeptides are also encompassed by the invention.

[0223] In addition, any of the above described N- or C-terminal deletions can be combined to produce a N- and C-terminal deleted polypeptide. The invention also provides polypeptides having one or more amino acids deleted from both the amino and the carboxyl termini, which may be described generally as having residues m-n of a polypeptide encoded by SEQ ID NO:X (e.g., including, but not limited to, the preferred polypeptide disclosed as SEQ ID NO:Y, the mature (secreted) portion of SEQ ID NO:Y as defined in columns 14 and 15 of Table 1A, and the polypeptide encoded by the portion of SEQ ID NO:X as defined in columns 8 and 9 of Table 2), the cDNA contained in ATCC Deposit No:Z, and/or the complement thereof, where n and m are integers as described above. Polynucleotides encoding these polypeptides are also encompassed by the invention.

[0224] Also as mentioned above, even if deletion of one or more amino acids from the C-terminus of a protein results in modification of loss of one or more biological functions of the protein, other functional activities (e.g., biological activities such as, for example, activity useful in detecting, preventing, diagnosing, prognosticating, treating, and/or ameliorating cardiovascular diseases and disorders; ability to multimerize; ability to bind a ligand; antigenic ability useful for production of polypeptide specific antibodies) may still be retained. For example the ability of the shortened mutein to induce and/or bind to antibodies which recognize the complete or mature forms of the polypeptide generally will be retained when less than the majority of the residues of the complete or mature polypeptide are removed from the C-terminus. Whether a particular polypeptide lacking C-terminal residues of a complete polypeptide retains such immunologic activities can readily be determined by routine methods described herein and otherwise known in the art. It is not unlikely that a mutein with a large number of deleted C-terminal amino acid residues may retain some biological or immunogenic activities. In fact, peptides composed of as few as six amino acid residues may often evoke an immune response.

[0225] The present application is also directed to proteins containing polypeptides at least 80%, 85%, 90%, 95%, 96%, 97%, 98% or 99% identical to a polypeptide sequence set forth herein. In preferred embodiments, the application is directed to proteins containing polypeptides at least 80%, 85%, 90%, 95%, 96%, 97%, 98% or 99% identical to polypeptides having the amino acid sequence of the specific N- and C-terminal deletions. Polynucleotides encoding these polypeptides are also encompassed by the invention.

[0226] Any polypeptide sequence encoded by, for example, the polynucleotide sequences set forth as SEQ ID NO:X or the complement thereof, (presented, for example, in Tables 1A and 2), the cDNA contained in ATCC Deposit No:Z, or the polynucleotide sequence as defined in column 6 of Table 1C, may be analyzed to determine certain preferred regions of the polypeptide. For example, the amino acid sequence of a polypeptide encoded by a polynucleotide sequence of SEQ ID NO:X (e.g., the polypeptide of SEQ ID NO:Y and the polypeptide encoded by the portion of SEQ ID NO:X as defined in columnns 8 and 9 of Table 2) or the cDNA contained in ATCC Deposit No:Z may be analyzed using the default parameters of the DNASTAR computer algorithm (DNASTAR, Inc., 1228 S. Park St., Madison, Wis. 53715 USA; http://www.dnastar.com/).

[0227] Polypeptide regions that may be routinely obtained using the DNASTAR computer algorithm include, but are not limited to, Gamier-Robson alpha-regions, beta-regions, turn-regions, and coil-regions; Chou-Fasman alpha-regions, beta-regions, and turn-regions; Kyte-Doolittle hydrophilic regions and hydrophobic regions; Eisenberg alpha- and beta-amphipathic regions; Karplus-Schulz flexible regions; Emini surface-forming regions; and Jameson-Wolf regions of high antigenic index. Among highly preferred polynucleotides of the invention in this regard are those that encode polypeptides comprising regions that combine several structural features, such as several (e.g., 1, 2, 3 or 4) of the features set out above.

[0228] Additionally, Kyte-Doolittle hydrophilic regions and hydrophobic regions, Emini surface-forming regions, and Jameson-Wolf regions of high antigenic index (i.e., containing four or more contiguous amino acids having an antigenic index of greater than or equal to 1.5, as identified using the default parameters of the Jameson-Wolf program) can routinely be used to determine polypeptide regions that exhibit a high degree of potential for antigenicity. Regions of high antigenicity are determined from data by DNASTAR analysis by choosing values which represent regions of the polypeptide which are likely to be exposed on the surface of the polypeptide in an environment in which antigen recognition may occur in the process of initiation of an immune response.

[0229] Preferred polypeptide fragments of the invention are fragments comprising, or alternatively, consisting of, an amino acid sequence that displays a functional activity (e.g. biological activity such as, for example, activity useful in detecting, preventing, diagnosing, prognosticating, treating, and/or ameliorating cardiovascular diseases and disorders; ability to multimerize; ability to bind a ligand; antigenic ability useful for production of polypeptide specific antibodies) of the polypeptide sequence of which the amino acid sequence is a fragment. By a polypeptide displaying a “functional activity” is meant a polypeptide capable of one or more known functional activities associated with a full-length protein, such as, for example, biological activity, antigenicity, immunogenicity, and/or multimerization, as described herein.

[0230] Other preferred polypeptide fragments are biologically active fragments. Biologically active fragments are those exhibiting activity similar, but not necessarily identical, to an activity of the polypeptide of the present invention. The biological activity of the fragments may include an improved desired activity, or a decreased undesirable activity.

[0231] In preferred embodiments, polypeptides of the invention comprise, or alternatively consist of, one, two, three, four, five or more of the antigenic fragments of the polypeptide of SEQ ID NO:Y, or portions thereof Polynucleotides encoding these polypeptides are also encompassed by the invention.

Epitopes and Antibodies

[0232] The present invention encompasses polypeptides comprising, or alternatively consisting of, an epitope of the polypeptide sequence shown in SEQ ID NO:Y; a polypeptide sequence encoded by SEQ ID NO:X or the complementary strand thereto; the polypeptide sequence encoded by the portion of SEQ ID NO:X as defined in columns 8 and 9 of Table 2; the polypeptide sequence encoded by the portion of SEQ ID NO:B as defined in column 6 of Table 1C or the complement thereto; the polypeptide sequence encoded by the cDNA contained in ATCC Deposit No:Z; or the polypeptide sequence encoded by a polynucleotide that hybridizes to the sequence of SEQ ID NO:X, the complement of the sequence of SEQ ID NO:X, the complement of a portion of SEQ ID NO:X as defined in columns 8 and 9 of Table 2, or the cDNA sequence contained in ATCC Deposit No:Z under stringent hybridization conditions or alternatively, under lower stringency hybridization as defined supra. The present invention further encompasses polynucleotide sequences encoding an epitope of a polypeptide sequence of the invention (such as, for example, the sequence disclosed in SEQ ID NO:X, or a fragment thereof), polynucleotide sequences of the complementary strand of a polynucleotide sequence encoding an epitope of the invention, and polynucleotide sequences which hybridize to the complementary strand under stringent hybridization conditions or alternatively, under lower stringency hybridization conditions defined supra.

[0233] The term “epitopes,” as used herein, refers to portions of a polypeptide having antigenic or immunogenic activity in an animal, preferably a mammal, and most preferably in a human. In a preferred embodiment, the present invention encompasses a polypeptide comprising an epitope, as well as the polynucleotide encoding this polypeptide. An “immunogenic epitope,” as used herein, is defined as a portion of a protein that elicits an antibody response in an animal, as determined by any method known in the art, for example, by the methods for generating antibodies described infra. (See, for example, Geysen et al., Proc. Natl. Acad. Sci. USA 81:3998- 4002 (1983)). The term “antigenic epitope,” as used herein, is defined as a portion of a protein to which an antibody can immunospecifically bind its antigen as determined by any method well known in the art, for example, by the immunoassays described herein. Immunospecific binding excludes non-specific binding but does not necessarily exclude cross-reactivity with other antigens. Antigenic epitopes need not necessarily be immunogenic.

[0234] Fragments which function as epitopes may be produced by any conventional means. (See, e.g., Houghten, R. A., Proc. Natl. Acad. Sci. USA 82:5131-5135 (1985) further described in U.S. Pat. No. 4,631,211.)

[0235] In the present invention, antigenic epitopes preferably contain a sequence of at least 4, at least 5, at least 6, at least 7, more preferably at least 8, at least 9, at least 10, at least 11, at least 12, at least 13, at least 14, at least 15, at least 20, at least 25, at least 30, at least 40, at least 50, and, most preferably, between about 15 to about 30 amino acids. Preferred polypeptides comprising immunogenic or antigenic epitopes are at least 10, 15, 20, 25, 30, 35, 40, 45, 50, 55, 60, 65, 70, 75, 80, 85, 90, 95, or 100 amino acid residues in length. Additional non-exclusive preferred antigenic epitopes include the antigenic epitopes disclosed herein, as well as portions thereof. Antigenic epitopes are useful, for example, to raise antibodies, including monoclonal antibodies, that specifically bind the epitope. Preferred antigenic epitopes include the antigenic epitopes disclosed herein, as well as any combination of two, three, four, five or more of these antigenic epitopes. Antigenic epitopes can be used as the target molecules in immunoassays. (See, for instance, Wilson et al., Cell 37:767-778 (1984); Sutcliffe et al., Science 219:660-666 (1983)).

[0236] Non-limiting examples of epitopes of polypeptides that can be used to generate antibodies of the invention include a polypeptide comprising, or alternatively consisting of, at least one, two, three, four, five, six or more of the portion(s) of SEQ ID NO:Y specified in Table 1B. These polypeptide fragments have been determined to bear antigenic epitopes of the proteins of the invention by the analysis of the Jameson-Wolf antigenic index which is included in the DNAStar suite of computer programs. By “comprise” it is intended that a polypeptide contains at least one, two, three, four, five, six or more of the portion(s) of SEQ ID NO:Y shown in Table 1B, but it may contain additional flanking residues on either the amino or carboxyl termini of the recited portion. Such additional flanking sequences are preferably sequences naturally found adjacent to the portion; i.e., contiguous sequence shown in SEQ ID NO:Y. The flanking sequence may, however, be sequences from a heterolgous polypeptide, such as from another protein described herein or from a heterologous polypeptide not described herein. In particular embodiments, epitope portions of a polypeptide of the invention comprise one, two, three, or more of the portions of SEQ ID NO:Y shown in Table 1B.

[0237] Similarly, immunogenic epitopes can be used, for example, to induce antibodies according to methods well known in the art. See, for instance, Sutcliffe et al., supra; Wilson et al., supra; Chow et al., Proc. Natl. Acad. Sci. USA 82:910-914; and Bittle et al., J. Gen. Virol. 66:2347-2354 (1985). Preferred immunogenic epitopes include the immunogenic epitopes disclosed herein, as well as any combination of two, three, four, five or more of these immunogenic epitopes. The polypeptides comprising one or more immunogenic epitopes may be presented for eliciting an antibody response together with a carrier protein, such as an albumin, to an animal system (such as rabbit or mouse), or, if the polypeptide is of sufficient length (at least about 25 amino acids), the polypeptide may be presented without a carrier. However, immunogenic epitopes comprising as few as 8 to 10 amino acids have been shown to be sufficient to raise antibodies capable of binding to, at the very least, linear epitopes in a denatured polypeptide (e.g., in Western blotting).

[0238] Epitope-bearing polypeptides of the present invention may be used to induce antibodies according to methods well known in the art including, but not limited to, in vivo immunization, in vitro immunization, and phage display methods. See, e.g., Sutcliffe et al., supra; Wilson et al., supra, and Bitle et al., J. Gen. Virol., 66:2347-2354 (1985). If in vivo immunization is used, animals may be immunized with free peptide; however, anti-peptide antibody titer may be boosted by coupling the peptide to a macromolecular carrier, such as keyhole limpet hemacyanin (KLH) or tetanus toxoid. For instance, peptides containing cysteine residues may be coupled to a carrier using a linker such as maleimidobenzoyl-N-hydroxysuccinimide ester (MBS), while other peptides may be coupled to carriers using a more general linking agent such as glutaraldehyde. Animals such as rabbits, rats and mice are immunized with either free or carrier-coupled peptides, for instance, by intraperitoneal and/or intradermal injection of emulsions containing about 100 μg of peptide or carrier protein and Freund's adjuvant or any other adjuvant known for stimulating an immune response. Several booster injections may be needed, for instance, at intervals of about two weeks, to provide a useful titer of anti-peptide antibody which can be detected, for example, by ELISA assay using free peptide adsorbed to a solid surface. The titer of anti-peptide antibodies in serum from an immunized animal may be increased by selection of anti-peptide antibodies, for instance, by adsorption to the peptide on a solid support and elution of the selected antibodies according to methods well known in the art.

[0239] As one of skill in the art will appreciate, and as discussed above, the polypeptides of the present invention (e.g., those comprising an immunogenic or antigenic epitope) can be fused to heterologous polypeptide sequences. For example, polypeptides of the present invention (including fragments or variants thereof), may be fused with the constant domain of immunoglobulins (IgA, IgE, IgG, IgM), or portions thereof (CH1, CH2, CH3, or any combination thereof and portions thereof, resulting in chimeric polypeptides. By way of another non-limiting example, polypeptides and/or antibodies of the present invention (including fragments or variants thereof) may be fused with albumin (including but not limited to recombinant human serum albumin or fragments or variants thereof (see, e.g., U.S. Pat. No. 5,876,969, issued Mar. 2, 1999, EP Patent 0 413 622, and U.S. Pat. No. 5,766,883, issued Jun. 16, 1998, herein incorporated by reference in their entirety)). In a preferred embodiment, polypeptides and/or antibodies of the present invention (including fragments or variants thereof) are fused with the mature form of human serum albumin (i.e., amino acids 1-585 of human serum albumin as shown in FIGS. 1 and 2 of EP Patent 0 322 094) which is herein incorporated by reference in it entirety. In another preferred embodiment, polypeptides and/or antibodies of the present invention (including fragments or variants thereof) are fused with polypeptide fragments comprising, or alternatively consisting of, amino acid residues 1-z of human serum albumin, where z is an integer from 369 to 419, as described in U.S. Pat. No. 5,766,883 herein incorporated by reference in its entirety. Polypeptides and/or antibodies of the present invention (including fragments or variants thereof) may be fused to either the N- or C-terminal end of the heterologous protein (e.g., immunoglobulin Fc polypeptide or human serum albumin polypeptide). Polynucleotides encoding fusion proteins of the invention are also encompassed by the invention.

[0240] Such fusion proteins as those described above may facilitate purification and may increase half-life in vivo. This has been shown for chimeric proteins consisting of the first two domains of the human CD4-polypeptide and various domains of the constant regions of the heavy or light chains of mammalian immunoglobulins. See, e.g., EP 394,827; Traunecker et al., Nature, 331:84-86 (1988). Enhanced delivery of an antigen across the epithelial barrier to the immune system has been demonstrated for antigens (e.g., insulin) conjugated to an FcRn binding partner such as IgG or Fc fragments (see, e.g., PCT Publications WO 96/22024 and WO 99/04813). IgG fusion proteins that have a disulfide-linked dimeric structure due to the IgG portion desulfide bonds have also been found to be more efficient in binding and neutralizing other molecules than monomeric polypeptides or fragments thereof alone. See, e.g., Fountoulakis et al., J. Biochem., 270:3958-3964 (1995). Nucleic acids encoding the above epitopes can also be recombined with a gene of interest as an epitope tag (e.g., the hemagglutinin (HA) tag or flag tag) to aid in detection and purification of the expressed polypeptide. For example, a system described by Janknecht et al. allows for the ready purification of non-denatured fusion proteins expressed in human cell lines (Janknecht et al., 1991, Proc. Natl. Acad. Sci. USA 88:8972-897). In this system, the gene of interest is subcloned into a vaccinia recombination plasmid such that the open reading frame of the gene is translationally fused to an amino-terminal tag consisting of six histidine residues. The tag serves as a matrix binding domain for the fusion protein. Extracts from cells infected with the recombinant vaccinia virus are loaded onto Ni2+ nitriloacetic acid-agarose column and histidine-tagged proteins can be selectively eluted with imidazole-containing buffers.

Fusion Proteins

[0241] Any polypeptide of the present invention can be used to generate fusion proteins. For example, the polypeptide of the present invention, when fused to a second protein, can be used as an antigenic tag. Antibodies raised against the polypeptide of the present invention can be used to indirectly detect the second protein by binding to the polypeptide. Moreover, because secreted proteins target cellular locations based on trafficking signals, polypeptides of the present invention which are shown to be secreted can be used as targeting molecules once fused to other proteins.

[0242] Examples of domains that can be fused to polypeptides of the present invention include not only heterologous signal sequences, but also other heterologous functional regions. The fusion does not necessarily need to be direct, but may occur through linker sequences.

[0243] In certain preferred embodiments, proteins of the invention are fusion proteins comprising an amino acid sequence that is an N and C-terminal deletion of a polypeptide of the invention. In preferred embodiments, the invention is directed to a fusion protein comprising an amino acid sequence that is at least 90%, 95%, 96%, 97%, 98% or 99% identical to a polypeptide sequence of the invention. Polynucleotides encoding these proteins are also encompassed by the invention.

[0244] Moreover, fusion proteins may also be engineered to improve characteristics of the polypeptide of the present invention. For instance, a region of additional amino acids, particularly charged amino acids, may be added to the N-terminus of the polypeptide to improve stability and persistence during purification from the host cell or subsequent handling and storage. Also, peptide moieties may be added to the polypeptide to facilitate purification. Such regions may be removed prior to final preparation of the polypeptide. The addition of peptide moieties to facilitate handling of polypeptides are familiar and routine techniques in the art.

[0245] As one of skill in the art will appreciate that, as discussed above, polypeptides of the present invention, and epitope-bearing fragments thereof, can be combined with heterologous polypeptide sequences. For example, the polypeptides of the present invention may be fused with heterologous polypeptide sequences, for example, the polypeptides of the present invention may be fused with the constant domain of immunoglobulins (IgA, IgE, IgG, IgM) or portions thereof (CH1, CH2, CH3, and any combination thereof, including both entire domains and portions thereof), or albumin (including, but not limited to, native or recombinant human albumin or fragments or variants thereof (see, e.g., U.S. Pat. No. 5,876,969, issued Mar. 2, 1999, EP Patent 0 413 622, and U.S. Pat. No. 5,766,883, issued Jun. 16, 1998, herein incorporated by reference in their entirety)), resulting in chimeric polypeptides. For example, EP-A-0 464 533 (Canadian counterpart 2045869) discloses fusion proteins comprising various portions of constant region of immunoglobulin molecules together with another human protein or part thereof. In many cases, the Fc part in a fusion protein is beneficial in therapy and diagnosis, and thus can result in, for example, improved pharmacokinetic properties (EP-A 0232 262). Alternatively, deleting the Fc part after the fusion protein has been expressed, detected, and purified, would be desired. For example, the Fc portion may hinder therapy and diagnosis if the fusion protein is used as an antigen for immunizations. In drug discovery, for example, human proteins, such as hIL-5, have been fused with Fc portions for the purpose of high-throughput screening assays to identify antagonists of hIL-5. See, D. Bennett et al., J. Molecular Recognition 8:52-58 (1995); K. Johanson et al., J. Biol. Chem. 270:9459-9471 (1995).

[0246] Moreover, the polypeptides of the present invention can be fused to marker sequences, such as a polypeptide which facilitates purification of the fused polypeptide. In preferred embodiments, the marker amino acid sequence is a hexa-histidine peptide, such as the tag provided in a pQE vector (QIAGEN, Inc., 9259 Eton Avenue, Chatsworth, Calif., 91311), among others, many of which are commercially available. As described in Gentz et al., Proc. Natl. Acad. Sci. USA 86:821-824 (1989), for instance, hexa-histidine provides for convenient purification of the fusion protein. Another peptide tag useful for purification, the “HA” tag, corresponds to an epitope derived from the influenza hemagglutinin protein (Wilson et al., Cell 37:767 (1984)).

[0247] Additional fusion proteins of the invention may be generated through the techniques of gene-shuffling, motif-shuffling, exon-shuffling, and/or codon-shuffling (collectively referred to as “DNA shuffling”). DNA shuffling may be employed to modulate the activities of polypeptides of the invention, such methods can be used to generate polypeptides with altered activity, as well as agonists and antagonists of the polypeptides. See, generally, U.S. Pat. Nos. 5,605,793; 5,811,238; 5,830,721; 5,834,252; and 5,837,458, and Patten et al., Curr. Opinion Biotechnol. 8:724-33 (1997); Harayama, Trends Biotechnol. 16(2):76-82 (1998); Hansson,.et al., J. Mol. Biol. 287:265-76 (1999); and Lorenzo and Blasco, Biotechniques 24(2):308-13 (1998) (each of these patents and publications are hereby incorporated by reference in its entirety). In one embodiment, alteration of polynucleotides corresponding to SEQ ID NO:X and the polypeptides encoded by these polynucleotides may be achieved by DNA shuffling. DNA shuffling involves the assembly of two or more DNA segments by homologous or site-specific recombination to generate variation in the polynucleotide sequence. In another embodiment, polynucleotides of the invention, or the encoded polypeptides, may be altered by being subjected to random mutagenesis by error-prone PCR, random nucleotide insertion or other methods prior to recombination. In another embodiment, one or more components, motifs, sections, parts, domains, fragments, etc., of a polynucleotide encoding a polypeptide of the invention may be recombined with one or more components, motifs, sections, parts, domains, fragments, etc. of one or more heterologous molecules.

[0248] Thus, any of these above fusions can be engineered using the polynucleotides or the polypeptides of the present invention.

Recombinant and Synthetic Production of Polypeptides of the Invention

[0249] The present invention also relates to vectors containing the polynucleotide of the present invention, host cells, and the production of polypeptides by synthetic and recombinant techniques. The vector may be, for example, a phage, plasmid, viral, or retroviral vector. Retroviral vectors may be replication competent or replication defective. In the latter case, viral propagation generally will occur only in complementing host cells.

[0250] The polynucleotides of the invention may be joined to a vector containing a selectable marker for propagation in a host. Generally, a plasmid vector is introduced in a precipitate, such as a calcium phosphate precipitate, or in a complex with a charged lipid. If the vector is a virus, it may be packaged in vitro using an appropriate packaging cell line and then transduced into host cells.

[0251] The polynucleotide insert should be operatively linked to an appropriate promoter, such as the phage lambda PL promoter, the E. coli lac, trp, phoA and tac promoters, the SV40 early and late promoters and promoters of retroviral LTRs, to name a few. Other suitable promoters will be known to the skilled artisan. The expression constructs will further contain sites for transcription initiation, termination, and, in the transcribed region, a ribosome binding site for translation. The coding portion of the transcripts expressed by the constructs will preferably include a translation initiating codon at the beginning and a termination codon (UAA, UGA or UAG) appropriately positioned at the end of the polypeptide to be translated.

[0252] As indicated, the expression vectors will preferably include at least one selectable marker. Such markers include dihydrofolate reductase, G418, glutamine synthase, or neomycin resistance for eukaryotic cell culture, and tetracycline, kanamycin or ampicillin resistance genes for culturing in E. coli and other bacteria. Representative examples of appropriate hosts include, but are not limited to, bacterial cells, such as E. coli, Streptomyces and Salmonella typhimurium cells; fungal cells, such as yeast cells (e.g., Saccharomyces cerevisiae or Pichia pastoris (ATCC Accession No. 21178)); insect cells such as Drosophila S2 and Spodoptera Sf9 cells; animal cells such as CHO, COS, 293, and Bowes melanoma cells; and plant cells. Appropriate culture mediums and conditions for the above-described host cells are known in the art.

[0253] Among vectors preferred for use in bacteria include pQE70, pQE60 and pQE-9, available from QIAGEN, Inc.; pBluescript vectors, Phagescript vectors, pNH8A, pNH16a, pNH18A, pNH46A, available from Stratagene Cloning Systems, Inc.; and ptrc99a, pKK223-3, pKK233-3, pDR540, pRIT5 available from Pharmacia Biotech, Inc. Among preferred eukaryotic vectors are pWLNEO, pSV2CAT, pOG44, pXT1 pSG available from Stratagene; and pSVK3, pBPV, pMSG and pSVL available from Pharmacia Preferred expression vectors for use in yeast systems include, but are not limited to pYES2, pYD1, pTEF1/Zeo, pYES2/GS, pPICZ, pGAPZ, pGAPZalph, pPIC9, pPIC3.5, pHIL-D2, pHIL-S1, pPIC3.5K, pPIC9K, and PAO815 (all available from Invitrogen, Carlbad, Calif.). Other suitable vectors will be readily apparent to the skilled artisan.

[0254] Vectors which use glutamine synthase (GS) or DHFR as the selectable markers can be amplified in the presence of the drugs methionine sulphoximine or methotrexate, respectively. An advantage of glutamine synthase based vectors are the availabilty of cell lines (e.g., the murine myeloma cell line, NS0) which are glutamine synthase negative. Glutamine synthase expression systems can also function in glutamine synthase expressing cells (e.g., Chinese Hamster Ovary (CHO) cells) by providing additional inhibitor to prevent the functioning of the endogenous gene. A glutamine synthase expression system and components thereof are detailed in PCT publications: WO87/04462; WO86/05807; WO89/01036; WO89/10404; and WO91/06657, which are hereby incorporated in their entireties by reference herein. Additionally, glutamine synthase expression vectors can be obtained from Lonza Biologics, Inc. (Portsmouth, N.H.). Expression and production of monoclonal antibodies using a GS expression system in murine myeloma cells is described in Bebbington et al., Bio/technology 10:169(1992) and in Biblia and Robinson Biotechnol. Prog. 11:1 (1995) which are herein incorporated by reference.

[0255] The present invention also relates to host cells containing the above-described vector constructs described herein, and additionally encompasses host cells containing nucleotide sequences of the invention that are operably associated with one or more heterologous control regions (e.g., promoter and/or enhancer) using techniques known of in the art. The host cell can be a higher eukaryotic cell, such as a mammalian cell (e.g., a human derived cell), or a lower eukaryotic cell, such as a yeast cell, or the host cell can be a prokaryotic cell, such as a bacterial cell. A host strain may be chosen which modulates the expression of the inserted gene sequences, or modifies and processes the gene product in the specific fashion desired. Expression from certain promoters can be elevated in the presence of certain inducers; thus expression of the genetically engineered polypeptide may be controlled. Furthermore, different host cells have characteristics and specific mechanisms for the translational and post-translational processing and modification (e.g., phosphorylation, cleavage) of proteins. Appropriate cell lines can be chosen to ensure the desired modifications and processing of the foreign protein expressed.

[0256] Introduction of the nucleic acids and nucleic acid constructs of the invention into the host cell can be effected by calcium phosphate transfection, DEAE-dextran mediated transfection, cationic lipid-mediated transfection, electroporation, transduction, infection, or other methods. Such methods are described in many standard laboratory manuals, such as Davis et al., Basic Methods In Molecular Biology (1986). It is specifically contemplated that the polypeptides of the present invention may in fact be expressed by a host cell lacking a recombinant vector.

[0257] In addition to encompassing host cells containing the vector constructs discussed herein, the invention also encompasses primary, secondary, and immortalized host cells of vertebrate origin, particularly mammalian origin, that have been engineered to delete or replace endogenous genetic material (e.g., the coding sequence), and/or to include genetic material (e.g., heterologous polynucleotide sequences) that is operably associated with polynucleotides of the invention, and which activates, alters, and/or amplifies endogenous polynucleotides. For example, techniques known in the art may be used to operably associate heterologous control regions (e.g., promoter and/or enhancer) and endogenous polynucleotide sequences via homologous recombination (see, e.g., U.S. Pat. No. 5,641,670, issued Jun. 24, 1997; International Publication Number WO 96/29411; International Publication Number WO 94/12650; Koller et al., Proc. Natl. Acad Sci. USA 86:8932-8935 (1989); and Zijlstra et al., Nature 342:435-438 (1989), the disclosures of each of which are incorporated by reference in their entireties).

[0258] Polypeptides of the invention can be recovered and purified from recombinant cell cultures by well-known methods including ammonium sulfate or ethanol precipitation, acid extraction, anion or cation exchange chromatography, phosphocellulose chromatography, hydrophobic interaction chromatography, affinity chromatography, hydroxylapatite chromatography and lectin chromatography. Most preferably, high performance liquid chromatography (“HPLC”) is employed for purification.

[0259] Polypeptides of the present invention can also be recovered from: products purified from natural sources, including bodily fluids, tissues and cells, whether directly isolated or cultured; products of chemical synthetic procedures; and products produced by recombinant techniques from a prokaryotic or eukaryotic host, including, for example, bacterial, yeast, higher plant, insect, and mammalian cells. Depending upon the host employed in a recombinant production procedure, the polypeptides of the present invention may be glycosylated or may be non-glycosylated. In addition, polypeptides of the invention may also include an initial modified methionine residue, in some cases as a result of host-mediated processes. Thus, it is well known in the art that the N-terminal methionine encoded by the translation initiation codon generally is removed with high efficiency from any protein after translation in all eukaryotic cells. While the N-terminal methionine on most proteins also is efficiently removed in most prokaryotes, for some proteins, this prokaryotic removal process is inefficient, depending on the nature of the amino acid to which the N-terminal methionine is covalently linked.

[0260] In one embodiment, the yeast Pichia pastoris is used to express polypeptides of the invention in a eukaryotic system. Pichia pastoris is a methylotrophic yeast which can metabolize methanol as its sole carbon source. A main step in the methanol metabolization pathway is the oxidation of methanol to formaldehyde using O₂. This reaction is catalyzed by the enzyme alcohol oxidase. In order to metabolize methanol as its sole carbon source, Pichia pastoris must generate high levels of alcohol oxidase due, in part, to the relatively low affinity of alcohol oxidase for O₂. Consequently, in a growth medium depending on methanol as a main carbon source, the promoter region of one of the two alcohol oxidase genes (AOX1) is highly active. In the presence of methanol, alcohol oxidase produced from the AOX1 gene comprises up to approximately 30% of the total soluble protein in Pichia pastoris. See Ellis, S. B., et al., Mol. Cell. Biol. 5:1111-21 (1985); Koutz, P. J, et al., Yeast 5:167-77 (1989); Tschopp, J. F., et al., Nucl. Acids Res. 15:3859-76 (1987). Thus, a heterologous coding sequence, such as, for example, a polynucleotide of the present invention, under the transcriptional regulation of all or part of the AOX1 regulatory sequence is expressed at exceptionally high levels in Pichia yeast grown in the presence of methanol.

[0261] In one example, the plasmid vector pPIC9K is used to express DNA encoding a polypeptide of the invention, as set forth herein, in a Pichea yeast system essentially as described in “Pichia Protocols: Methods in Molecular Biology,” D. R. Higgins and J. Cregg, eds. The Humana Press, Totowa, N.J., 1998. This expression vector allows expression and secretion of a polypeptide of the invention by virtue of the strong AOX1 promoter linked to the Pichia pastoris alkaline phosphatase (PHO) secretory signal peptide (i.e., leader) located upstream of a multiple cloning site.

[0262] Many other yeast vectors could be used in place of pPIC9K, such as, pYES2, pYD1, pTEF1/Zeo, pYES2/GS, pPICZ, pGAPZ, pGAPZalpha, pPIC9, pPIC3.5, pHIL-D2, pHIL-S1, pPIC3.5K, and PA0815, as one skilled in the art would readily appreciate, as long as the proposed expression construct provides appropriately located signals for transcription, translation, secretion (if desired), and the like, including an in-frame AUG as required.

[0263] In another embodiment, high-level expression of a heterologous coding sequence, such as, for example, a polynucleotide of the present invention, may be achieved by cloning the heterologous polynucleotide of the invention into an expression vector such as, for example, pGAPZ or pGAPZalpha, and growing the yeast culture in the absence of methanol.

[0264] In addition to encompassing host cells containing the vector constructs discussed herein, the invention also encompasses primary, secondary, and immortalized host cells of vertebrate origin, particularly mammalian origin, that have been engineered to delete or replace endogenous genetic material (e.g., coding sequence), and/or to include genetic material (e.g., heterologous polynucleotide sequences) that is operably associated with polynucleotides of the invention, and which activates, alters, and/or amplifies endogenous polynucleotides. For example, techniques known in the art may be used to operably associate heterologous control regions (e.g., promoter and/or enhancer) and endogenous polynucleotide sequences via homologous recombination (see, e.g., U.S. Pat. No. 5,641,670, issued Jun. 24, 1997; International Publication No. WO 96/29411, published Sep. 26, 1996; International Publication No. WO 94/12650, published Aug. 4, 1994; Koller et al., Proc. Natl. Acad. Sci. USA 86;8932-8935 (1989); and Zijlstra et al., Nature 342:435-438 (1989), the disclosures of each of which are incorporated by reference in their entireties).

[0265] In addition, polypeptides of the invention can be chemically synthesized using techniques known in the art (e.g., see Creighton, 1983, Proteins: Structures and Molecular Principles, W.H. Freeman & Co., N.Y., and Hunkapiller et al., Nature, 310:105-111 (1984)). For example, a polypeptide corresponding to a fragment of a polypeptide can be synthesized by use of a peptide synthesizer. Furthermore, if desired, nonclassical amino acids or chemical amino acid analogs can be introduced as a substitution or addition into the polypeptide sequence. Non-classical amino acids include, but are not limited to, to the D-isomers of the common amino acids, 2,4-diaminobutyric acid, a-amino isobutyric acid, 4-aminobutyric acid, Abu, 2-amino butyric acid, g-Abu, e-Ahx, 6-amino hexanoic acid, Aib, 2-amino isobutyric acid, 3-amino propionic acid, omithine, norleucine, norvaline, hydroxyproline, sarcosine, citrulline, homocitrulline, cysteic acid, t-butylglycine, t-butylalanine, phenylglycine, cyclohexylalanine, b-alanine, fluoro-amino acids, designer amino acids such as b-methyl amino acids, Ca-methyl amino acids, Na-methyl amino acids, and amino acid analogs in general. Furthermore, the amino acid can be D (dextrorotary) or L (levorotary).

[0266] The invention encompasses polypeptides of the present invention which are differentially modified during or after translation, e.g., by glycosylation, acetylation, phosphorylation, amidation, derivatization by known protecting/blocking groups, proteolytic cleavage, linkage to an antibody molecule or other cellular ligand, etc. Any of numerous chemical modifications may be carried out by known techniques, including but not limited, to specific chemical cleavage by cyanogen bromide, trypsin, chymotrypsin, papain, V8 protease, NaBH₄; acetylation, formylation, oxidation, reduction; metabolic synthesis in the presence of tunicamycin; etc.

[0267] Additional post-translational modifications encompassed by the invention include, for example, e.g., N-linked or O-linked carbonhydrate chains, processing of N-terminal or C-terminal ends), attachment of chemical moieties to the amino acid backbone, chemical modifications of N-linked or O-linked carbohydrate chains, and addition or deletion of an N-terminal methionine residue as a result of procaryotic host cell expression. The polypeptides may also be modified with a detectable label, such as an enzymatic, fluorescent, isotopic or affinity label to allow for detection and isolation of the protein.

[0268] Examples of suitable enzymes include horseradish peroxidase, alkaline phosphatase, beta-galactosidase, or acetylcholinesterase; examples of suitable prosthetic group complexes include streptavidin/biotin and avidin/biotin; examples of suitable fluorescent materials include umbelliferone, fluorescein, fluorescein isothiocyanate, rhodamine, dichlorotriazinylamine fluorescein, dansyl chloride or phycoerythrin; an example of a luminescent material includes luminol; examples of bioluminescent materials include luciferase, luciferin, and aequorin; and examples of suitable radioactive material include iodine (¹²¹I, ¹²³I, ¹²⁵I, ¹³¹I), carbon (¹⁴C), sulfur (³⁵S), tritium (³H), indium (¹¹¹In, ¹¹²In, ^{113m}In, ^{115m}In), technetium (⁹⁹Tc, ^{99m}Tc), thallium (²⁰¹Ti), gallium (⁶⁸Ga, ⁶⁷Ga), palladium (¹⁰³Pd), molybdenum (⁹⁹Mo), xenon (¹³³³Xe), fluorine (¹⁸F), ¹⁵³Sm, ¹⁷⁷Lu, ¹⁵⁹Gd, ¹⁴⁹Pm, ¹⁴⁰La, ¹⁷⁵Yb, ¹⁶⁶Ho, ⁹⁰Y, ⁴⁷Sc, ¹⁸⁶Re, ¹⁸⁸Re, ¹⁴²Pr, 105Rh, and ⁹⁷Ru.

[0269] In specific embodiments, a polypeptide of the present invention or fragment or variant thereof is attached to macrocyclic chelators that associate with radiometal ions, including but not limited to, ¹⁷⁷Lu, ⁹⁰Y, ¹⁶⁶Ho, and ¹⁵³Sm, to polypeptides. In a preferred embodiment, the radiometal ion associated with the macrocyclic chelators is ¹¹¹In. In another preferred embodiment, the radiometal ion associated with the macrocyclic chelator is ⁹⁰Y. In specific embodiments, the macrocyclic chelator is 1,4,7,10-tetraazacyclododecane-N,N′,N″,N′″-tetraacetic acid (DOTA). In other specific embodiments, DOTA is attached to an antibody of the invention or fragment thereof via a linker molecule. Examples of linker molecules useful for conjugating DOTA to a polypeptide are commonly known in the art—see, for example, DeNardo et al., Clin Cancer Res. 4(10):2483-90 (1998); Peterson et al., Bioconjug. Chem. 10(4):553-7 (1999); and Zimmerman et al, Nucl. Med. Biol. 26(8):943-50 (1999); which are hereby incorporated by reference in their entirety.

[0270] As mentioned, the proteins of the invention may be modified by either natural processes, such as posttranslational processing, or by chemical modification techniques which are well known in the art. It will be appreciated that the same type of modification may be present in the same or varying degrees at several sites in a given polypeptide. Polypeptides of the invention may be branched, for example, as a result of ubiquitination, and they may be cyclic, with or without branching. Cyclic, branched, and branched cyclic polypeptides may result from posttranslation natural processes or may be made by synthetic methods. Modifications include acetylation, acylation, ADP-ribosylation, amidation, covalent attachment of flavin, covalent attachment of a heme moiety, covalent attachment of a nucleotide or nucleotide derivative, covalent attachment of a lipid or lipid derivative, covalent attachment of phosphotidylinositol, cross-linking, cyclization, disulfide bond formation, demethylation, formation of covalent cross-links, formation of cysteine, formation of pyroglutamate, formylation, gamma-carboxylation, glycosylation, GPI anchor formation, hydroxylation, iodination, methylation, myristoylation, oxidation, pegylation, proteolytic processing, phosphorylation, prenylation, racemization, selenoylation, sulfation, transfer-RNA mediated addition of amino acids to proteins such as arginylation, and ubiquitination. (See, for instance, PROTEINS—STRUCTURE AND MOLECULAR PROPERTIES, 2nd Ed., T. E. Creighton, W. H. Freeman and Company, New York (1993); POSTTRANSLATIONAL COVALENT MODIFICATION OF PROTEINS, B. C. Johnson, Ed., Academic Press, New York, pgs. 1-12 (1983); Seifter et al., Meth. Enzymol. 182:626-646 (1990); Rattan et al., Ann. N.Y. Acad. Sci. 663:48-62 (1992)).

[0271] Also provided by the invention are chemically modified derivatives of the polypeptides of the invention which may provide additional advantages such as increased solubility, stability and circulating time of the polypeptide, or decreased immunogenicity (see U.S. Pat. No. 4,179,337). The chemical moieties for derivitization may be selected from water soluble polymers such as polyethylene glycol, ethylene glycol/propylene glycol copolymers, carboxymethylcellulose, dextran, polyvinyl alcohol and the like. The polypeptides may be modified at random positions within the molecule, or at predetermined positions within the molecule and may include one, two, three or more attached chemical moieties.

[0272] The polymer may be of any molecular weight, and may be branched or unbranched. For polyethylene glycol, the preferred molecular weight is between about 1 kDa and about 100 kDa (the term “about” indicating that in preparations of polyethylene glycol, some molecules will weigh more, some less, than the stated molecular weight) for ease in handling and manufacturing. Other sizes may be used, depending on the desired therapeutic profile (e.g., the duration of sustained release desired, the effects, if any on biological activity, the ease in handling, the degree or lack of antigenicity and other known effects of the polyethylene glycol to a therapeutic protein or analog). For example, the polyethylene glycol may have an average molecular weight of about 200, 500, 1000, 1500, 2000, 2500, 3000, 3500, 4000, 4500, 5000, 5500, 6000, 6500, 7000, 7500, 8000, 8500, 9000, 9500, 10,000, 10,500, 11,000, 11,500, 12,000, 12,500, 13,000, 13,500, 14,000, 14,500, 15,000, 15,500, 16,000, 16,500, 17,000, 17,500, 18,000, 18,500, 19,000, 19,500, 20,000, 25,000, 30,000, 35,000, 40,000, 45,000, 50,000, 55,000, 60,000, 65,000, 70,000, 75,000, 80,000, 85,000, 90,000, 95,000, or 100,000 kDa

[0273] As noted above, the polyethylene glycol may have a branched structure. Branched polyethylene glycols are described, for example, in U.S. Pat. No. 5,643,575; Morpurgo et al., Appl. Biochem. Biotechnol. 56:59-72 (1996); Vorobjev et al., Nucleosides Nucleotides 18:2745-2750 (1999); and Caliceti et al., Bioconjug Chem. 10:638-646 (1999), the disclosures of each of which are incorporated herein by reference.

[0274] The polyethylene glycol molecules (or other chemical moieties) should be attached to the protein with consideration of effects on functional or antigenic domains of the protein. There are a number of attachment methods available to those skilled in the art, such as, for example, the method disclosed in EP 0 401 384 (coupling PEG to G-CSF), herein incorporated by reference; see also Malik et al., Exp. Hematol. 20:1028-1035 (1992), reporting pegylation of GM-CSF using tresyl chloride. For example, polyethylene glycol may be covalently bound through amino acid residues via a reactive group, such as a free amino or carboxyl group. Reactive groups are those to which an activated polyethylene glycol molecule may be bound. The amino acid residues having a free amino group may include lysine residues and the N-terminal amino acid residues; those having a free carboxyl group may include aspartic acid residues glutamic acid residues and the C-terminal amino acid residue. Sulfhydryl groups may also be used as a reactive group for attaching the polyethylene glycol molecules. Preferred for therapeutic purposes is attachment at an amino group, such as attachment at the N-terminus or lysine group.

[0275] As suggested above, polyethylene glycol may be attached to proteins via linkage to any of a number of amino acid residues. For example, polyethylene glycol can be linked to proteins via covalent bonds to lysine, histidine, aspartic acid, glutamic acid, or cysteine residues. One or more reaction chemistries may be employed to attach polyethylene glycol to specific amino acid residues (e.g., lysine, histidine, aspartic acid, glutamic acid, or cysteine) of the protein or to more than one type of amino acid residue (e.g., lysine, histidine, aspartic acid, glutamic acid, cysteine and combinations thereof) of the protein.

[0276] One may specifically desire proteins chemically modified at the N-terminus. Using polyethylene glycol as an illustration of the present composition, one may select from a variety of polyethylene glycol molecules (by molecular weight, branching, etc.), the proportion of polyethylene glycol molecules to protein (polypeptide) molecules in the reaction mix, the type of pegylation reaction to be performed, and the method of obtaining the selected N-terminally pegylated protein. The method of obtaining the N-terminally pegylated preparation (i.e., separating this moiety from other monopegylated moieties if necessary) may be by purification of the N-terminally pegylated material from a population of pegylated protein molecules. Selective proteins chemically modified at the N-terminus modification may be accomplished by reductive alkylation which exploits differential reactivity of different types of primary amino groups (lysine versus the N-terminal) available for derivatization in a particular protein. Under the appropriate reaction conditions, substantially selective derivatization of the protein at the N-terminus with a carbonyl group containing polymer is achieved.

[0277] As indicated above, pegylation of the proteins of the invention may be accomplished by any number of means. For example, polyethylene glycol may be attached to the protein either directly or by an intervening linker. Linkerless systems for attaching polyethylene glycol to proteins are described in Delgado et al., Crit. Rev. Thera Drug Carrier Sys. 9:249-304 (1992); Francis et al., Intern. J. of Hematol. 68:1-18 (1998); U.S. Pat. No. 4,002,531; U.S. Pat. No. 5,349,052; WO 95/06058; and WO 98/32466, the disclosures of each of which are incorporated herein by reference.

[0278] One system for attaching polyethylene glycol directly to amino acid residues of proteins without an intervening linker employs tresylated MPEG, which is produced by the modification of monmethoxy polyethylene glycol (MPEG) using tresylchloride (CISO₂CH₂CF₃). Upon reaction of protein with tresylated MPEG, polyethylene glycol is directly attached to amine groups of the protein. Thus, the invention includes protein-polyethylene glycol conjugates produced by reacting proteins of the invention with a polyethylene glycol molecule having a 2,2,2-trifluoreothane sulphonyl group.

[0279] Polyethylene glycol can also be attached to proteins using a number of different intervening linkers. For example, U.S. Pat. No. 5,612,460, the entire disclosure of which is incorporated herein by reference, discloses urethane linkers for connecting polyethylene glycol to proteins. Protein-polyethylene glycol conjugates wherein the polyethylene glycol is attached to the protein by a linker can also be produced by reaction of proteins with compounds such as MPEG-succinimidylsuccinate, MPEG activated with 1,1′-carbonyidiimidazole, MPEG-2,4,5-trichloropenylcarbonate, MPEG-p-nitrophenolcarbonate, and various MPEG-succinate derivatives. A number of additional polyethylene glycol derivatives and reaction chemistries for attaching polyethylene glycol to proteins are described in International Publication No. WO 98/32466, the entire disclosure of which is incorporated herein by reference. Pegylated protein products produced using the reaction chemistries set out herein are included within the scope of the invention.

[0280] The number of polyethylene glycol moieties attached to each protein of the invention (i.e., the degree of substitution) may also vary. For example, the pegylated proteins of the invention may be linked, on average, to 1, 2, 3, 4, 5, 6, 7, 8, 9, 10, 12, 15, 17, 20, or more polyethylene glycol molecules. Similarly, the average degree of substitution within ranges such as 1-3, 24, 3-5, 4-6, 5-7, 6-8, 7-9, 8-10, 9-11, 10-12, 11-13, 12-14, 13-15, 14-16, 15-17, 16-18, 17-19, or 18-20 polyethylene glycol moieties per protein molecule. Methods for determining the degree of substitution are discussed, for example, in Delgado et al., Crit. Rev. Thera. Drug Carrier Sys. 9:249-304 (1992).

[0281] The polypeptides of the invention can be recovered and purified from chemical synthesis and recombinant cell cultures by standard methods which include, but are not limited to, ammonium sulfate or ethanol precipitation, acid extraction, anion or cation exchange chromatography, phosphocellulose chromatography, hydrophobic interaction chromatography, affinity chromatography, hydroxylapatite chromatography and lectin chromatography. Most preferably, high performance liquid chromatography (“HPLC”) is employed for purification. Well known techniques for refolding protein may be employed to regenerate active conformation when the polypeptide is denatured during isolation and/or purification.

[0282] The polypeptides of the invention may be in monomers or multimers (i.e., dimers, trimers, tetramers and higher multimers). Accordingly, the present invention relates to monomers and multimers of the polypeptides of the invention, their preparation, and compositions (preferably, Therapeutics) containing them. In specific embodiments, the polypeptides of the invention are monomers, dimers, trimers or tetramers. In additional embodiments, the multimers of the invention are at least dimers, at least trimers, or at least tetramers.

[0283] Multimers encompassed by the invention may be homomers or heteromers. As used herein, the term homomer refers to a multimer containing only polypeptides corresponding to a protein of the invention (e.g., the amino acid sequence of SEQ ID NO:Y, an amino acid sequence encoded by SEQ ID NO:X or the complement of SEQ ID NO:X, the amino acid sequence encoded by the portion of SEQ ID NO:X as defined in columns 8 and 9 of Table 2, and/or an amino acid sequence encoded by cDNA contained in ATCC Deposit No:Z (including fragments, variants, splice variants, and fusion proteins, corresponding to these as described herein)). These homomers may contain polypeptides having identical or different amino acid sequences. In a specific embodiment, a homomer of the invention is a multimer containing only polypeptides having an identical amino acid sequence. In another specific embodiment, a homomer of the invention is a multimer containing polypeptides having different amino acid sequences. In specific embodiments, the multimer of the invention is a homodimer (e.g., containing two polypeptides having identical or different amino acid sequences) or a homotrimer (e.g., containing three polypeptides having identical and/or different amino acid sequences). In additional embodiments, the homomeric multimer of the invention is at least a homodimer, at least a homotrimer, or at least a homotetramer.

[0284] As used herein, the term heteromer refers to a multimer containing one or more heterologous polypeptides (i.e., polypeptides of different proteins) in addition to the polypeptides of the invention. In a specific embodiment, the multimer of the invention is a heterodimer, a heterotrimer, or a heterotetramer. In additional embodiments, the heteromeric multimer of the invention is at least a heterodimer, at least a heterotrimer, or at least a heterotetramer.

[0285] Multimers of the invention may be the result of hydrophobic, hydrophilic, ionic and/or covalent associations and/or may be indirectly linked by, for example, liposome formation. Thus, in one embodiment, multimers of the invention, such as, for example, homodimers or homotrimers, are formed when polypeptides of the invention contact one another in solution. In another embodiment, heteromultimers of the invention, such as, for example, heterotrimers or heterotetramers, are formed when polypeptides of the invention contact antibodies to the polypeptides of the invention (including antibodies to the heterologous polypeptide sequence in a fusion protein of the invention) in solution. In other embodiments, multimers of the invention are formed by covalent associations with and/or between the polypeptides of the invention. Such covalent associations may involve one or more amino acid residues contained in the polypeptide sequence (e.g., that recited in SEQ ID NO:Y, encoded by the portion of SEQ ID NO:X as defined in columns 8 and 9 of Table 2, and/or encoded by the cDNA contained in ATCC Deposit No:Z). In one instance, the covalent associations are cross-linking between cysteine residues located within the polypeptide sequences which interact in the native (i.e., naturally occurring) polypeptide. In another instance, the covalent associations are the consequence of chemical or recombinant manipulation. Alternatively, such covalent associations may involve one or more amino acid residues contained in the heterologous polypeptide sequence in a fusion protein. In one example, covalent associations are between the heterologous sequence contained in a fusion protein of the invention (see, e.g., U.S. Pat. No. 5,478,925). In a specific example, the covalent associations are between the heterologous sequence contained in a Fe fusion protein of the invention (as described herein). In another specific example, covalent associations of fusion proteins of the invention are between heterologous polypeptide sequence from another protein that is capable of forming covalently associated multimers, such as for example, osteoprotegerin (see, e.g., International Publication NO: WO 98/49305, the contents of which are herein incorporated by reference in its entirety). In another embodiment, two or more polypeptides of the invention are joined through peptide linkers. Examples include those peptide linkers described in U.S. Pat. No. 5,073,627 (hereby incorporated by reference). Proteins comprising multiple polypeptides of the invention separated by peptide linkers may be produced using conventional recombinant DNA technology.

[0286] Another method for preparing multimer polypeptides of the invention involves use of polypeptides of the invention fused to a leucine zipper or isoleucine zipper polypeptide sequence. Leucine zipper and isoleucine zipper domains are polypeptides that promote multimerization of the proteins in which they are found. Leucine zippers were originally identified in several DNA-binding proteins (Landschulz et al., Science 240:1759, (1988)), and have since been found in a variety of different proteins. Among the known leucine zippers are naturally occurring peptides and derivatives thereof that dimerize or trimerize. Examples of leucine zipper domains suitable for producing soluble multimeric proteins of the invention are those described in PCT application WO 94/10308, hereby incorporated by reference. Recombinant fusion proteins comprising a polypeptide of the invention fused to a polypeptide sequence that dimerizes or trimerizes in solution are expressed in suitable host cells, and the resulting soluble multimeric fusion protein is recovered from the culture supematant using techniques known in the art.

[0287] Trimeric polypeptides of the invention may offer the advantage of enhanced biological activity. Preferred leucine zipper moieties and isoleucine moieties are those that preferentially form trimers. One example is a leucine zipper derived from lung surfactant protein D (SPD), as described in Hoppe et al. (FEBS Letters 344:191, (1994)) and in U.S. patent application Ser. No. 08/446,922, hereby incorporated by reference. Other peptides derived from naturally occurring trimeric proteins may be employed in preparing trimeric polypeptides of the invention.

[0288] In another example, proteins of the invention are associated by interactions between Flag® polypeptide sequence contained in fusion proteins of the invention containing Flag® polypeptide sequence. In a further embodiment, proteins of the invention are associated by interactions between heterologous polypeptide sequence contained in Flag® fusion proteins of the invention and anti-Flag® antibody.

[0289] The multimers of the invention may be generated using chemical techniques known in the art For example, polypeptides desired to be contained in the multimers of the invention may be chemically cross-linked using linker molecules and linker molecule length optimization techniques known in the art (see, e.g., U.S. Pat. No. 5,478,925, which is herein incorporated by reference in its entirety). Additionally, multimers of the invention may be generated using techniques known in the art to form one or more inter-molecule cross-links between the cysteine residues located within the sequence of the polypeptides desired to be contained in the multimer (see, e.g., U.S. Pat. No. 5,478,925, which is herein incorporated by reference in its entirety). Further, polypeptides of the invention may be routinely modified by the addition of cysteine or biotin to the C-terminus or N-terminus of the polypeptide and techniques known in the art may be applied to generate multimers containing one or more of these modified polypeptides (see, e.g., U.S. Pat. No. 5,478,925, which is herein incorporated by reference in its entirety). Additionally, techniques known in the art may be applied to generate liposomes containing the polypeptide components desired to be contained in the multimer of the invention (see, e.g., U.S. Pat. No. 5,478,925, which is herein incorporated by reference in its entirety).

[0290] Alternatively, multimers of the invention may be generated using genetic engineering techniques known in the art. In one embodiment, polypeptides contained in multimers of the invention are produced recombinantly using fusion protein technology described herein or otherwise known in the art (see, e.g., U.S. Pat. No. 5,478,925, which is herein incorporated by reference in its entirety). In a specific embodiment, polynucleotides coding for a homodimer of the invention are generated by ligating a polynucleotide sequence encoding a polypeptide of the invention to a sequence encoding a linker polypeptide and then further to a synthetic polynucleotide encoding the translated product of the polypeptide in the reverse orientation from the original C-terminus to the N-terminus (lacking the leader sequence) (see, e.g., U.S. Pat. No. 5,478,925, which is herein incorporated by reference in its entirety). In another embodiment, recombinant techniques described herein or otherwise known in the art are applied to generate recombinant polypeptides of the invention which contain a transmembrane domain (or hydrophobic or signal peptide) and which can be incorporated by membrane reconstitution techniques into liposomes (see, e.g., U.S. Pat. No. 5,478,925, which is herein incorporated by reference in its entirety).

[0291] Antibodies Further polypeptides of the invention relate to antibodies and T-cell antigen receptors (TCR) which immunospecifically bind a polypeptide, polypeptide fragment, or variant of the invention (e.g., a polypeptide or fragment or variant of the amino acid sequence of SEQ ID NO:Y or a polypeptide encoded by the cDNA contained in ATCC Deposit No:Z, and/or an epitope, of the present invention) as determined by immunoassays well known in the art for assaying specific antibody-antigen binding. Antibodies of the invention include, but are not limited to, polyclonal, monoclonal, multispecific, human, humanized or chimeric antibodies, single chain antibodies, Fab fragments, F(ab′) fragments, fragments produced by a Fab expression library, anti-idiotypic (anti-id) antibodies (including, e.g., anti-Id antibodies to antibodies of the invention), intracellularly-made antibodies (i.e., intrabodies), and epitope-binding fragments of any of the above. The term “antibody,” as used herein, refers to immunoglobulin molecules and immunologically active portions of immunoglobulin molecules, i.e., molecules that contain an antigen binding site that immunospecifically binds an antigen. The immunoglobulin molecules of the invention can be of any type (e.g., IgG, IgE, IgM, IgD, IgA and IgY), class (e.g., IgG1, IgG2, IgG3, IgG4, IgA1 and IgA2) or subclass of immunoglobulin molecule. In preferred embodiments, the immunoglobulin molecules of the invention are IgG1. In other preferred embodiments, the immunoglobulin molecules of the invention are IgG4.

[0292] Most preferably the antibodies are human antigen-binding antibody fragments of the present invention and include, but are not limited to, Fab, Fab′ and F(ab′)2, Fd, single-chain Fvs (scFv), single-chain antibodies, disulfide-linked Fvs (sdFv) and fragments comprising either a VL or VH domain. Antigen-binding antibody fragments, including single-chain antibodies, may comprise the variable region(s) alone or in combination with the entirety or a portion of the following: hinge region, CH1, CH2, and CH3 domains. Also included in the invention are antigen-binding fragments also comprising any combination of variable region(s) with a hinge region, CH1, CH2, and CH3 domains. The antibodies of the invention may be from any animal origin including birds and mammals. Preferably, the antibodies are human, murine (e.g., mouse and rat), donkey, ship rabbit, goat, guinea pig, camel, horse, or chicken. As used herein, “human” antibodies include antibodies having the amino acid sequence of a human immunoglobulin and include antibodies isolated from human immunoglobulin libraries or from animals transgenic for one or more human immunoglobulin and that do not express endogenous immunoglobulins, as described infra and, for example in, U.S. Pat. No. 5,939,598 by Kucherlapati et al.

[0293] The antibodies of the present invention may be monospecific, bispecific, trispecific or of greater multispecificity. Multispecific antibodies may be specific for different epitopes of a polypeptide of the present invention or may be specific for both a polypeptide of the present invention as well as for a heterologous epitope, such as a heterologous polypeptide or solid support material. See, e.g., PCT publications WO 93/17715; WO 92/08802; WO 91/00360; WO 92/05793; Tutt, et al., J. Immunol. 147:60-69 (1991); U.S. Pat. Nos. 4,474,893; 4,714,681; 4,925,648; 5,573,920; 5,601,819; Kostelny et al., J. Immunol. 148:1547-1553 (1992).

[0294] Antibodies of the present invention may be described or specified in terms of the epitope(s) or portion(s) of a polypeptide of the present invention which they recognize or specifically bind. The epitope(s) or polypeptide portion(s) may be specified as described herein, e.g., by N-terminal and C-terminal positions, or by size in contiguous amino acid residues, or listed in the Tables and Figures. Preferred epitopes of the invention include the predicted epitopes shown in Table 1B, as well as polynucleotides that encode these epitopes. Antibodies which specifically bind any epitope or polypeptide of the present invention may also be excluded. Therefore, the present invention includes antibodies that specifically bind polypeptides of the present invention, and allows for the exclusion of the same.

[0295] Antibodies of the present invention may also be described or specified in terms of their cross-reactivity. Antibodies that do not bind any other analog, ortholog, or homolog of a polypeptide of the present invention are included. Antibodies that bind polypeptides with at least 95%, at least 90%, at least 85%, at least 80%, at least 75%, at least 70%, at least 65%, at least 60%, at least 55%, and at least 50% identity (as calculated using methods known in the art and described herein) to a polypeptide of the present invention are also included in the present invention. In specific embodiments, antibodies of the present invention cross-react with murine, rat and/or rabbit homologs of human proteins and the corresponding epitopes thereof Antibodies that do not bind polypeptides with less than 95%, less than 90%, less than 85%, less than 80%, less than 75%, less than 70%, less than 65%, less than 60%, less than 55%, and less than 50% identity (as calculated using methods known in the art and described herein) to a polypeptide of the present invention are also included in the present invention. In a specific embodiment the above-described cross-reactivity is with respect to any single specific antigenic or immunogenic polypeptide, or combination(s) of 2, 3, 4, 5, or more of the specific antigenic and/or immunogenic polypeptides disclosed herein. Further included in the present invention are antibodies which bind polypeptides encoded by polynucleotides which hybridize to a polynucleotide of the present invention under stringent hybridization conditions (as described herein). Antibodies of the present invention may also be described or specified in terms of their binding affinity to a polypeptide of the invention. Preferred binding affinities include those with a dissociation constant or Kd less than 5×10⁻² M, 10⁻² M, 5×10⁻³ M, 10⁻³ M, 5×10⁻⁴ M, 10⁻⁴ M, 5×10⁻⁵ M, 10⁻⁵ M, 5×10⁻⁶ M, 10⁻⁶ M, 5×10⁻⁷ M, 10⁻⁷ M, 5×10⁻⁸ M, 10⁻⁸ M, 5×10⁻⁹ M, 10⁻⁹ M, 5×10⁻¹⁰ M, 10⁻¹⁰ M, 5×10⁻¹¹ M, 10⁻¹¹ M, 10×5⁻¹² M, 10⁻¹² M, 5×10⁻¹³ M, 10⁻¹³ M, 5×10⁻¹⁴ M, 10⁻¹⁴ M, 5×10⁻¹⁵ M, 10⁻¹⁵ M.

[0296] The invention also provides antibodies that competitively inhibit binding of an antibody to an epitope of the invention as determined by any method known in the art for determining competitive binding, for example, the immunoassays described herein. In preferred embodiments, the antibody competitively inhibits binding to the epitope by at least 95%, at least 90%, at least 85 %, at least 80%, at least 75%, at least 70%, at least 60%, or at least 50%.

[0297] Antibodies of the present invention may act as agonists or antagonists of the polypeptides of the present invention. For example, the present invention includes antibodies which disrupt the receptor/ligand interactions with the polypeptides of the invention either partially or fully. Preferably, antibodies of the present invention bind an antigenic epitope disclosed herein, or a portion thereof. The invention features both receptor-specific antibodies and ligand-specific antibodies. The invention also features receptor-specific antibodies which do not prevent ligand binding but prevent receptor activation. Receptor activation (i.e., signaling) may be determined by techniques described herein or otherwise known in the art. For example, receptor activation can be determined by detecting the phosphorylation (e.g., tyrosine or serine/threonine) of the receptor or its substrate by immunoprecipitation followed by western blot analysis (for example, as described supra). In specific embodiments, antibodies are provided that inhibit ligand activity or receptor activity by at least 95%, at least 90%, at least85%, at least 80%, at least 75%, at least 70%, at least 60%, or at least 50% of the activity in absence of the antibody.

[0298] The invention also features receptor-specific antibodies which both prevent ligand binding and receptor activation as well as antibodies that recognize the receptor-ligand complex, and, preferably, do not specifically recognize the unbound receptor or the unbound ligand. Likewise, included in the invention are neutralizing antibodies which bind the ligand and prevent binding of the ligand to the receptor, as well as antibodies which bind the ligand, thereby preventing receptor activation, but do not prevent the ligand from binding the receptor. Further included in the invention are antibodies which activate the receptor. These antibodies may act as receptor agonists, i.e., potentiate or activate either all or a subset of the biological activities of the ligand-mediated receptor activation, for example, by inducing dimerization of the receptor. The antibodies may be specified as agonists, antagonists or inverse agonists for biological activities comprising the specific biological activities of the peptides of the invention disclosed herein. The above antibody agonists can be made using methods known in the art. See, e.g., PCT publication WO 96/40281; U.S. Pat. No. 5,811,097; Deng et al., Blood 92(6):1981-1988 (1998); Chen et al., Cancer Res. 58(16):3668-3678 (1998); Harrop et al., J. Immunol. 161(4):1786-1794 (1998); Zhu et al., Cancer Res. 58(15):3209-3214 (1998); Yoon et al., J. Immunol. 160(7):3170-3179 (1998); Prat et al., J. Cell. Sci. 111(Pt2):237-247 (1998); Pitard et al., J. Immunol. Methods 205(2):177-190 (1997); Liautard et al., Cytokine 9(4):233-241 (1997); Carlson et al., J. Biol. Chem. 272(17):11295-11301 (1997); Taryman et al., Neuron 14(4):755-762 (1995); Muller et al., Structure 6(9):1153-1167 (1998); Bartunek et al., Cytokine 8(1):14-20 (1996) (which are all incorporated by reference herein in their entireties).

[0299] Antibodies of the present invention may be used, for example, to purify, detect, and target the polypeptides of the present invention, including both in vitro and in vivo diagnostic and therapeutic methods. For example, the antibodies have utility in immunoassays for qualitatively and quantitatively measuring levels of the polypeptides of the present invention in biological samples. See, e.g., Harlow et al., Antibodies: A Laboratory Manual, (Cold Spring Harbor Laboratory Press, 2nd ed. 1988); incorporated by reference herein in its entirety.

[0300] As discussed in more detail below, the antibodies of the present invention may be used either alone or in combination with other compositions. The antibodies may further be recombinantly fused to a heterologous polypeptide at the N— or C-terminus or chemically conjugated (including covalent and non-covalent conjugations) to polypeptides or other compositions. For example, antibodies of the present invention may be recombinantly fused or conjugated to molecules useful as labels in detection assays and effector molecules such as heterologous polypeptides, drugs, radionuclides, or toxins. See, e.g., PCT publications WO 92/08495; WO 91/14438; WO 89/12624; U.S. Pat. No. 5,314,995; and EP 396,387; the disclosures of which are incorporated herein by reference in their entireties.

[0301] The antibodies of the invention include derivatives that are modified, i.e, by the covalent attachment of any type of molecule to the antibody such that covalent attachment does not prevent the antibody from generating an anti-idiotypic response. For example, but not by way of limitation, the antibody derivatives include antibodies that have been modified, e.g., by glycosylation, acetylation, pegylation, phosphylation, amidation, derivatization by known protecting/blocking groups, proteolytic cleavage, linkage to a cellular ligand or other protein, etc. Any of numerous chemical modifications may be carried out by known techniques, including, but not limited to specific chemical cleavage, acetylation, formylation, metabolic synthesis of tunicamycin, etc. Additionally, the derivative may contain one or more non-classical amino acids.

[0302] The antibodies of the present invention may be generated by any suitable method known in the art. Polyclonal antibodies to an antigen-of-interest can be produced by various procedures well known in the art. For example, a polypeptide of the invention can be administered to various host animals including, but not limited to, rabbits, mice, rats, etc. to induce the production of sera containing polyclonal antibodies specific for the antigen. Various adjuvants may be used to increase the immunological response, depending on the host species, and include but are not limited to, Freund's (complete and incomplete), mineral gels such as aluminum hydroxide, surface active substances such as lysolecithin, pluronic polyols, polyanions, peptides, oil emulsions, keyhole limpet hemocyanins, dinitrophenol, and potentially useful human adjuvants such as BCG (bacille Calmette-Guerin) and corynebacterium parvum. Such adjuvants are also well known in the art.

[0303] Monoclonal antibodies can be prepared using a wide variety of techniques known in the art including the use of hybridoma, recombinant, and phage display technologies, or a combination thereof For example, monoclonal antibodies can be produced using hybridoma techniques including those known in the art and taught, for example, in Harlow et al., Antibodies: A Laboratory Manual, (Cold Spring Harbor Laboratory Press, 2nd ed. 1988); Hammerling, et al., in: Monoclonal Antibodies and T-Cell Hybridomas 563-681 (Elsevier, N.Y., 1981) (said references incorporated by reference in their entireties). The term “monoclonal antibody” as used herein is not limited to antibodies produced through hybridoma technology. The term “monoclonal antibody” refers to an antibody that is derived from a single clone, including any eukaryotic, prokaryotic, or phage clone, and not the method by which it is produced.

[0304] Methods for producing and screening for specific antibodies using hybridoma technology are routine and well known in the art and are discussed in detail in the Examples. In a non-limiting example, mice can be immunized with a polypeptide of the invention or a cell expressing such peptide. Once an immune response is detected, e.g., antibodies specific for the antigen are detected in the mouse serum, the mouse spleen is harvested and splenocytes isolated. The splenocytes are then fused by well known techniques to any suitable myeloma cells, for example cells from cell line SP20 available from the ATCC. Hybridomas are selected and cloned by limited dilution. The hybridoma clones are then assayed by methods known in the art for cells that secrete antibodies capable of binding a polypeptide of the invention. Ascites fluid, which generally contains high levels of antibodies, can be generated by immunizing mice with positive hybridoma clones.

[0305] Accordingly, the present invention provides methods of generating monoclonal antibodies as well as antibodies produced by the method comprising culturing a hybridoma cell secreting an antibody of the invention wherein, preferably, the hybridoma is generated by fusing splenocytes isolated from a mouse immunized with an antigen of the invention with myeloma cells and then screening the hybridomas resulting from the fusion for hybridoma clones that secrete an antibody able to bind a polypeptide of the invention.

[0306] Another well known method for producing both polyclonal and monoclonal human B cell lines is transformation using Epstein Barr Virus (EBV). Protocols for generating EBV-transformed B cell lines are commonly known in the art, such as, for example, the protocol outlined in Chapter 7.22 of Current Protocols in Immunology, Coligan et al., Eds., 1994, John Wiley & Sons, NY, which is hereby incorporated in its entirety by reference. The source of B cells for transformation is commonly human peripheral blood, but B cells for transformation may also be derived from other sources including, but not limited to, lymph nodes, tonsil, spleen, tumor tissue, and infected tissues. Tissues are generally made into single cell suspensions prior to EBV transformation. Additionally, steps may be taken to either physically remove or inactivate T cells (e.g., by treatment with cyclosporin A) in B cell-containing samples, because T cells from individuals seropositive for anti-EBV antibodies can suppress B cell immortalization by EBV.

[0307] In general, the sample containing human B cells is innoculated with EBV, and cultured for 3-4 weeks. A typical source of EBV is the culture supernatant of the B95-8 cell line (ATCC #VR-1492). Physical signs of EBV transformation can generally be seen towards the end of the 3-4 week culture period. By phase-contrast microscopy, transformed cells may appear large, clear, hairy and tend to aggregate in tight clusters of cells. Initially, EBV lines are generally polyclonal. However, over prolonged periods of cell cultures, EBV lines may become monoclonal or polyclonal as a result of the selective outgrowth of particular B cell clones. Alternatively, polyclonal EBV transformed lines may be subcloned (e.g., by limiting dilution culture) or fused with a suitable fusion partner and plated at limiting dilution to obtain monoclonal B cell lines. Suitable fusion partners for EBV transformed cell lines include mouse myeloma cell lines (e.g., SP2/0, X63-Ag8.653), heteromyeloma cell lines (human×mouse; e.g, SPAM-8, SBC-H20, and CB-F7), and human cell lines (e.g., GM 1500, SKO-007, RPMI 8226, and KR-4). Thus, the present invention also provides a method of generating polyclonal or monoclonal human antibodies against polypeptides of the invention or fragments thereof, comprising EBV-transformation of human B cells.

[0308] Antibody fragments which recognize specific epitopes may be generated by known techniques. For example, Fab and F(ab′)2 fragments of the invention may be produced by proteolytic cleavage of immunoglobulin molecules, using enzymes such as papain (to produce Fab fragments) or pepsin (to produce F(ab′)2 fragments). F(ab′)2 fragments contain the variable region, the light chain constant region and the CH₁ domain of the heavy chain.

[0309] For example, the antibodies of the present invention can also be generated using various phage display methods known in the art. In phage display methods, functional antibody domains are displayed on the surface of phage particles which carry the polynucleotide sequences encoding them. In a particular embodiment, such phage can be utilized to display antigen binding domains expressed from a repertoire or combinatorial antibody library (e.g., human or murine). Phage expressing an antigen binding domain that binds the antigen of interest can be selected or identified with antigen, e.g., using labeled antigen or antigen bound or captured to a solid surface or bead. Phage used in these methods are typically filamentous phage including fd and M13 binding domains expressed from phage with Fab, Fv or disulfide stabilized Fv antibody domains recombinantly fused to either the phage gene III or gene VIII protein. Examples of phage display methods that can be used to make the antibodies of the present invention include those disclosed in Brinrkman et al., J. Immunol. Methods 182:41-50 (1995); Ames et al., J. Immunol. Methods 184:177-186 (1995); Kettleborough et al., Eur. J. Immunol. 24:952-958 (1994); Persic et al., Gene 187 9-18 (1997); Burton et al., Advances in Immunology 57:191-280 (1994); PCT application No. PCT/GB91/01134; PCT publications WO 90/02809; WO 91/10737; WO 92/01047; WO 92/18619; WO 93/11236; WO 95/15982; WO 95/20401; and U.S. Pat. Nos. 5,698,426; 5,223,409; 5,403,484; 5,580,717; 5,427,908; 5,750,753; 5,821,047; 5,571,698; 5,427,908; 5,516,637; 5,780,225; 5,658,727; 5,733,743 and 5,969,108; each of which is incorporated herein by reference in its entirety.

[0310] As described in the above references, after phage selection, the antibody coding regions from the phage can be isolated and used to generate whole antibodies, including human antibodies, or any other desired antigen binding fragment, and expressed in any desired host, including mammalian cells, insect cells, plant cells, yeast, and bacteria, e.g., as described in detail below. For example, techniques to recombinantly produce Fab, Fab′ and F(ab′)2 fragments can also be employed using methods known in the art such as those disclosed in PCT publication WO 92/22324; Mullinax et al., BioTechniques 12(6):864-869 (1992); and Sawai et al., AJRI 34:26-34 (1995); and Better et al., Science 240:1041-1043 (1988) (said references incorporated by reference in their entireties).

[0311] Examples of techniques which can be used to produce single-chain Fvs and antibodies include those described in U.S. Pat. Nos. 4,946,778 and 5,258,498; Huston et al., Methods in Enzymology 203:46-88 (1991); Shu et al., PNAS 90:7995-7999 (1993); and Skerra et al., Science 240:1038-1040 (1988). For some uses, including in vivo use of antibodies in humans and in vitro detection assays, it may be preferable to use chimeric, humanized, or human antibodies. A chimeric antibody is a molecule in which different portions of the antibody are derived from different animal species, such as antibodies having a variable region derived from a murine monoclonal antibody and a human immunoglobulin constant region. Methods for producing chimeric antibodies are known in the art. See e.g., Morrison, Science 229:1202 (1985); Oi et al., BioTechniques 4:214 (1986); Gillies et al., (1989) J. Immunol. Methods 125:191-202; U.S. Pat. Nos. 5,807,715; 4,816,567; and 4,816397, which are incorporated herein by reference in their entirety. Humanized antibodies are antibody molecules from non-human species antibody that binds the desired antigen having one or more complementarity determining regions (CDRs) from the non-human species and a framework regions from a human immunoglobulin molecule. Often, framework residues in the human framework regions will be substituted with the corresponding residue from the CDR donor antibody to alter, preferably improve, antigen binding. These framework substitutions are identified by methods well known in the art, e.g., by modeling of the interactions of the CDR and framework residues to identify framework residues important for antigen binding and sequence comparison to identify unusual framework residues at particular positions. (See, e.g., Queen et al., U.S. Pat. No. 5,585,089; Riechmann et al., Nature 332:323 (1988), which are incorporated herein by reference in their entireties.) Antibodies can be humanized using a variety of techniques known in the art including, for example, CDR-grafting (EP 239,400; PCT publication WO 91/09967; U.S. Pat. Nos. 5,225,539; 5,530,101; and 5,585,089), veneering or resurfacing (EP 592,106; EP 519,596; Padlan, Molecular Immunology 28(4/5):489498 (1991); Studnicka et al., Protein Engineering 7(6):805-814 (1994); Roguska. et al., PNAS 91:969-973 (1994)), and chain shuffling (U.S. Pat. No. 5,565,332).

[0312] Completely human antibodies are particularly desirable for therapeutic treatment of human patients. Human antibodies can be made by a variety of methods known in the art including phage display methods described above using antibody libraries derived from human immunoglobulin sequences. See also, U.S. Pat. Nos. 4,444,887 and 4,716,111; and PCT publications WO 98/46645, WO 98/50433, WO 98/24893, WO 98/16654, WO 96/34096, WO 96/33735, and WO 91/10741; each of which is incorporated herein by reference in its entirety.

[0313] Human antibodies can also be produced using transgenic mice which are incapable of expressing functional endogenous immunoglobulins, but which can express human immunoglobulin genes. For example, the human heavy and light chain immunoglobulin gene complexes may be introduced randomly or by homologous recombination into mouse embryonic stem cells. Alternatively, the human variable region, constant region, and diversity region may be introduced into mouse embryonic stem cells in addition to the human heavy and light chain genes. The mouse heavy and light chain immunoglobulin genes may be rendered non-functional separately or simultaneously with the introduction of human immunoglobulin loci by homologous recombination. In particular, homozygous deletion of the JH region prevents endogenous antibody production. The modified embryonic stem cells are expanded and microinjected into blastocysts to produce chimeric mice. The chimeric are then bred to produce homozygous offspring which express human antibodies. The transgenic mice are immunized in the normal fashion with a selected antigen, e.g., all or a portion of a polypeptide of the invention. Monoclonal antibodies directed against the antigen can be obtained from the immunized, transgenic mice using conventional hybridoma technology. The human immunoglobulin transgenes harbored by the transgenic mice rearrange during B cell differentiation, and subsequently undergo class switching and somatic mutation. Thus, using such a technique, it is possible to produce therapeutically useful IgG, IgA, IgM and IgE antibodies. For an overview of this technology for producing human antibodies, see Lonberg and Huszar, Int. Rev. Immunol. 13:65-93 (1995). For a detailed discussion of this technology for producing human antibodies and human monoclonal antibodies and protocols for producing such antibodies, see, e.g., PCT publications WO 98/24893; WO 92/01047; WO 96/34096; WO 96/33735; European Patent No. 0 598 877; U.S. Pat. No. Nos. 5,413,923; 5,625,126; 5,633,425; 5,569,825; 5,661,016; 5,545,806; 5,814,318; 5,885,793; 5,916,771; 5,939,598; 6,075,181; and 6,114,598, which are incorporated by reference herein in their entirety. In addition, companies such as Abgenix, Inc. (Freemont, Calif.) and Genpharm (San Jose, Calif.) can be engaged to provide human antibodies directed against a selected antigen using technology similar to that described above.

[0314] Completely human antibodies which recognize a selected epitope can be generated using a technique referred to as “guided selection.” In this approach a selected non-human monoclonal antibody, e.g., a mouse antibody, is used to guide the selection of a completely human antibody recognizing the same epitope. (Jespers et al., Bio/technology 12:899-903 (1988)).

[0315] Further, antibodies to the polypeptides of the invention can, in turn, be utilized to generate anti-idiotype antibodies that “mimic” polypeptides of the invention using techniques well known to those skilled in the art. (See, e.g., Greenspan & Bona, FASEB J. 7(5):437-444; (1989) and Nissinoff, J. Immunol. 147(8):2429-2438 (1991)). For example, antibodies which bind to and competitively inhibit polypeptide multimerization and/or binding of a polypeptide of the invention to a ligand can be used to generate anti-idiotypes that “mimic” the polypeptide multimerization and/or binding domain and, as a consequence, bind to and neutralize polypeptide and/or its ligand. Such neutralizing anti-idiotypes or Fab fragments of such anti-idiotypes can be used in therapeutic regimens to neutralize polypeptide ligand(s)/receptor(s). For example, such anti-idiotypic antibodies can be used to bind a polypeptide of the invention and/or to bind its ligand(s)/receptor(s), and thereby block its biological activity. Alternatively, antibodies which bind to and enhance polypeptide multimerization and/or binding, and/or receptor/ligand multimerization, binding and/or signaling can be used to generate anti-idiotypes that function as agonists of a polypeptide of the invention and/or its ligand/receptor. Such agonistic anti-idiotypes or Fab fragments of such anti-idiotypes can be used in therapeutic regimens as agonists of the polypeptides of the invention or its ligand(s)/receptor(s). For example, such anti-idiotypic antibodies can be used to bind a polypeptide of the invention and/or to bind its ligand(s)/receptor(s), and thereby promote or enhance its biological activity.

[0316] Intrabodies of the invention can be produced using methods known in the art, such as those disclosed and reviewed in Chen et al., Hum. Gene Ther. 5:595-601 (1994); Marasco, W. A, Gene Ther. 4:11-15 (1997); Rondon and Marasco, Annu. Rev. Microbiol. 51:257-283 (1997); Proba et al., J. Mol. Biol. 275:245-253 (1998); Cohen et al., Oncogene 17:2445-2456 (1998); Ohage and Steipe, J. Mol. Biol. 291:1119-1128 (1999); Ohage et al., J. Mol. Biol. 291:1129-1134 (1999); Wirtz and Steipe, Protein Sci. 8:2245-2250 (1999); Zhu et al., J. Immunol. Methods 231:207-222 (1999); and references cited therein.

Polynucleotides Encoding Antibodies

[0317] The invention further provides polynucleotides comprising a nucleotide sequence encoding an antibody of the invention and fragments thereof. The invention also encompasses polynucleotides that hybridize under stringent or alternatively, under lower stringency hybridization conditions, e.g., as defined supra, to polynucleotides that encode an antibody, preferably, that specifically binds to a polypeptide of the invention, preferably, an antibody that binds to a polypeptide having the amino acid sequence of SEQ ID NO:Y, to a polypeptide encoded by a portion of SEQ ID NO:X as defined in columns 8 and 9 of Table 2, and/or to a polypeptide encoded by the cDNA contained in ATCC Deposit No:Z.

[0318] The polynucleotides may be obtained, and the nucleotide sequence of the polynucleotides determined, by any method known in the art. For example, if the nucleotide sequence of the antibody is known, a polynucleotide encoding the antibody may be assembled from chemically synthesized oligonucleotides (e.g., as described in Kutmeier et al., BioTechniques 17:242 (1994)), which, briefly, involves the synthesis of overlapping oligonucleotides containing portions of the sequence encoding the antibody, annealing and ligating of those oligonucleotides, and then amplification of the ligated oligonucleotides by PCR.

[0319] Alternatively, a polynucleotide encoding an antibody may be generated from nucleic acid from a suitable source. If a clone containing a nucleic acid encoding a particular antibody is not available, but the sequence of the antibody molecule is known, a nucleic acid encoding the immunoglobulin may be chemically synthesized or obtained from a suitable source (e.g., an antibody cDNA library, or a cDNA library generated from, or nucleic acid, preferably poly A+ RNA, isolated from, any tissue or cells expressing the antibody, such as hybridoma cells selected to express an antibody of the invention) by PCR amplification using synthetic primers hybridizable to the 3′ and 5′ ends of the sequence or by cloning using an oligonucleotide probe specific for the particular gene sequence to identify, e.g., a cDNA clone from a cDNA library that encodes the antibody. Amplified nucleic acids generated by PCR may then be cloned into replicable cloning vectors using any method well known in the art.

[0320] Once the nucleotide sequence and corresponding amino acid sequence of the antibody is determined, the nucleotide sequence of the antibody may be manipulated using methods well known in the art for the manipulation of nucleotide sequences, e.g., recombinant DNA techniques, site directed mutagenesis, PCR, etc. (see, for example, the techniques described in Sambrook et al., 1990, Molecular Cloning, A Laboratory Manual, 2d Ed., Cold Spring Harbor Laboratory, Cold Spring Harbor, N.Y. and Ausubel et al., eds., 1998, Current Protocols in Molecular Biology, John Wiley & Sons, NY, which are both incorporated by reference herein in their entireties ), to generate antibodies having a different amino acid sequence, for example to create amino acid substitutions, deletions, and/or insertions.

[0321] In a specific embodiment, the amino acid sequence of the heavy and/or light chain variable domains may be inspected to identify the sequences of the complementarity determining regions (CDRs) by methods that are well know in the art, e.g., by comparison to known amino acid sequences of other heavy and light chain variable regions to determine the regions of sequence hypervariability. Using routine recombinant DNA techniques, one or more of the CDRs may be inserted within framework regions, e.g., into human framework regions to humanize a non-human antibody, as described supra. The framework regions may be naturally occurring or consensus framework regions, and preferably human framework regions (see, e.g., Chothia et al., J. Mol. Biol. 278: 457-479 (1998) for a listing of human framework regions). Preferably, the polynucleotide generated by the combination of the framework regions and CDRs encodes an antibody that specifically binds a polypeptide of the invention. Preferably, as discussed supra, one or more amino acid substitutions may be made within the framework regions, and, preferably, the amino acid substitutions improve binding of the antibody to its antigen. Additionally, such methods may be used to make amino acid substitutions or deletions of one or more variable region cysteine residues participating in an intrachain disulfide bond to generate antibody molecules lacking one or more intrachain disulfide bonds. Other alterations to the polynucleotide are encompassed by the present invention and within the skill of the art.

[0322] In addition, techniques developed for the production of “chimeric antibodies” (Morrison et al., Proc. Natl. Acad. Sci. 81:851-855 (1984); Neuberger et al., Nature 312:604-608 (1984); Takeda et al., Nature 314:452-454 (1985)) by splicing genes from a mouse antibody molecule of appropriate antigen specificity together with genes from a human antibody molecule of appropriate biological activity can be used. As described supra, a chimeric antibody is a molecule in which different portions are derived from different animal species, such as those having a variable region derived from a murine mAb and a human immunoglobulin constant region, e.g., humanized antibodies.

[0323] Alternatively, techniques described for the production of single chain antibodies (U.S. Pat. No. 4,946,778; Bird, Science 242:423-42 (1988); Huston et al., Proc. Natl. Acad. Sci. USA 85:5879-5883 (1988); and Ward et al., Nature 334:544-54 (1989)) can be adapted to produce single chain antibodies. Single chain antibodies are formed by linking the heavy and light chain fragments of the Fv region via an amino acid bridge, resulting in a single chain polypeptide. Techniques for the assembly of functional Fv fragments in E. coli may also be used (Skerra et al., Science 242:1038-1041 (1988)).

Methods of Producing Antibodies

[0324] The antibodies of the invention can be produced by any method known in the art for the synthesis of antibodies, in particular, by chemical synthesis or preferably, by recombinant expression techniques. Methods of producing antibodies include, but are not limited to, hybridoma technology, EBV transformation, and other methods discussed herein as well as through the use recombinant DNA technology, as discussed below.

[0325] Recombinant expression of an antibody of the invention, or fragment, derivative or analog thereof, (e.g., a heavy or light chain of an antibody of the invention or a single chain antibody of the invention), requires construction of an expression vector containing a polynucleotide that encodes the antibody. Once a polynucleotide encoding an antibody molecule or a heavy or light chain of an antibody, or portion thereof (preferably containing the heavy or light chain variable domain), of the invention has been obtained, the vector for the production of the antibody molecule may be produced by recombinant DNA technology using techniques well known in the art. Thus, methods for preparing a protein by expressing a polynucleotide containing an antibody encoding nucleotide sequence are described herein. Methods which are well known to those skilled in the art can be used to construct expression vectors containing antibody coding sequences and appropriate transcriptional and translational control signals. These methods include, for example, in vitro recombinant DNA techniques, synthetic techniques, and in vivo genetic recombination. The invention, thus, provides replicable vectors comprising a nucleotide sequence encoding an antibody molecule of the invention, or a heavy or light chain thereof, or a heavy or light chain variable domain, operably linked to a promoter. Such vectors may include the nucleotide sequence encoding the constant region of the antibody molecule (see, e.g., PCT Publication WO 86/05807; PCT Publication WO 89/01036; and U.S. Pat. No. 5,122,464) and the variable domain of the antibody may be cloned into such a vector for expression of the entire heavy or light chain.

[0326] The expression vector is transferred to a host cell by conventional techniques and the transfected cells are then cultured by conventional techniques to produce an antibody of the invention. Thus, the invention includes host cells containing a polynucleotide encoding an antibody of the invention, or a heavy or light chain thereof, or a single chain antibody of the invention, operably linked to a heterologous promoter. In preferred embodiments for the expression of double-chained antibodies, vectors encoding both the heavy and light chains may be co-expressed in the host cell for expression of the entire immunoglobulin molecule, as detailed below.

[0327] A variety of host-expression vector systems may be utilized to express the antibody molecules of the invention. Such host-expression systems represent vehicles by which the coding sequences of interest may be produced and subsequently purified, but also represent cells which may, when transformed or transfected with the appropriate nucleotide coding sequences, express an antibody molecule of the invention in situ. These include but are not limited to microorganisms such as bacteria (e.g., E. coli, B. subtilis) transformed with recombinant bacteriophage DNA, plasmid DNA or cosmid DNA expression vectors containing antibody coding sequences; yeast (e.g., Saccharomyces, Pichia) transformed with recombinant yeast expression vectors containing antibody coding sequences; insect cell systems infected with recombinant virus expression vectors (e.g., baculovirus) containing antibody coding sequences; plant cell systems infected with recombinant virus expression vectors (e.g., cauliflower mosaic virus, CaMV; tobacco mosaic virus, TMV) or transformed with recombinant plasmid expression vectors (e.g., Ti plasmid) containing antibody coding sequences; or mammalian cell systems (e.g., COS, CHO, BHK, 293, 3T3 cells) harboring recombinant expression constructs containing promoters derived from the genome of mammalian cells (e.g., metallothionein promoter) or from mammalian viruses (e.g., the adenovirus late promoter; the vaccinia virus 7.5K promoter). Preferably, bacterial cells such as Escherichia coli, and more preferably, eukaryotic cells, especially for the expression of whole recombinant antibody molecule, are used for the expression of a recombinant antibody molecule. For example, mammalian cells such as Chinese hamster ovary cells (CHO), in conjunction with a vector such as the major intermediate early gene promoter element from human cytomegalovirus is an effective expression system for antibodies (Foecking et al., Gene 45:101 (1986); Cockett et al., Bio/Technology 8:2 (1990)).

[0328] In bacterial systems, a number of expression vectors may be advantageously selected depending upon the use intended for the antibody molecule being expressed. For example, when a large quantity of such a protein is to be produced, for the generation of pharmaceutical compositions of an antibody molecule, vectors which direct the expression of high levels of fusion protein products that are readily purified may be desirable. Such vectors include, but are not limited, to the E. coli expression vector pUR278 (Ruther et al., EMBO J. 2:1791 (1983)), in which antibody coding sequence may be ligated individually into the vector in frame with the lac Z coding region so that a fusion protein is produced; pIN vectors (Inouye & Inouye, Nucleic Acids Res. 13:3101-3109 (1985); Van Heeke & Schuster, J. Biol. Chem. 24:5503-5509 (1989)); and the like. pGEX vectors may also be used to express foreign polypeptides as fusion proteins with glutathione S-transferase (GST). In general, such fusion proteins are soluble and can easily be purified from lysed cells by adsorption and binding to matrix glutathione-agarose beads followed by elution in the presence of free glutathione. The pGEX vectors are designed to include thrombin or factor Xa protease cleavage sites so that the cloned target gene product can be released from the GST moiety.

[0329] In an insect system, Autographa califomica nuclear polyhedrosis virus (AcNPV) is used as a vector to express foreign genes. The virus grows in Spodoptera frugrperda cells. The antibody coding sequence may be cloned individually into non-essential regions (for example the polyhedrin gene) of the virus and placed under control of an AcNPV promoter (for example the polyhedrin promoter).

[0330] In mammalian host cells, a number of viral-based expression systems may be utilized. In cases where an adenovirus is used as an expression vector, the antibody coding sequence of interest may be ligated to an adenovirus transcription/translation control complex, e.g., the late promoter and tripartite leader sequence. This chimeric gene may then be inserted in the adenovirus genome by in vitro or in vivo recombination. Insertion in a non-essential region of the viral genome (e.g., region E1 or E3) will result in a recombinant virus that is viable and capable of expressing the antibody molecule in infected hosts. (e.g., see Logan & Shenk, Proc. Natl. Acad. Sci. USA 81:355-359 (1984)). Specific initiation signals may also be required for efficient translation of inserted antibody coding sequences. These signals include the ATG initiation codon and adjacent sequences. Furthermore, the initiation codon must be in phase with the reading frame of the desired coding sequence to ensure translation of the entire insert. These exogenous translational control signals and initiation codons can be of a variety of origins, both natural and synthetic. The efficiency of expression may be enhanced by the inclusion of appropriate transcription enhancer elements, transcription terminators, etc. (see Bittner et al., Methods in Enzymol. 153:51-544 (1987)).

[0331] In addition, a host cell strain may be chosen which modulates the expression of the inserted sequences, or modifies and processes the gene product in the specific fashion desired. Such modifications (e.g., glycosylation) and processing (e.g., cleavage) of protein products may be important for the function of the protein. Different host cells have characteristic and specific mechanisms for the post-translational processing and modification of proteins and gene products. Appropriate cell lines or host systems can be chosen to ensure the correct modification and processing of the foreign protein expressed. To this end, eukaryotic host cells which possess the cellular machinery for proper processing of the primary transcript glycosylation, and phosphorylation of the gene product may be used. Such mammalian host cells include but are not limited to CHO, VERY, BHK, Hela, COS, MDCK, 293, 3T3, W138, and in particular, breast cancer cell lines such as, for example, BT483, Hs578T, HTB2, BT20 and T47D, and normal mammary gland cell line such as, for example, CRL7030 and Hs578Bst

[0332] For long-term, high-yield production of recombinant proteins, stable expression is preferred. For example, cell lines which stably express the antibody molecule may be engineered. Rather than using expression vectors which contain viral origins of replication, host cells can be transformed with DNA controlled by appropriate expression control elements (e.g., promoter, enhancer, sequences, transcription terminators, polyadenylation sites, etc.), and a selectable marker. Following the introduction of the foreign DNA, engineered cells may be allowed to grow for 1-2 days in an enriched media, and then are switched to a selective media The selectable marker in the recombinant plasmid confers resistance to the selection and allows cells to stably integrate the plasmid into their chromosomes and grow to form foci which in turn can be cloned and expanded into cell lines. This method may advantageously be used to engineer cell lines which express the antibody molecule. Such engineered cell lines may be particularly useful in screening and evaluation of compounds that interact directly or indirectly with the antibody molecule.

[0333] A number of selection systems may be used, including but not limited to the herpes simplex virus thymidine kinase (Wigler et al., Cell 11:223 (1977)), hypoxanthine-guanine phosphoribosyltransferase (Szybalska & Szybalski, Proc. Natl. Acad. Sci. USA 48:202 (1992)), and adenine phosphoribosyltransferase (Lowy et al., Cell 22:817 (1980)) genes can be employed in tk-, hgprt- or aprt- cells, respectively. Also, antimetabolite resistance can be used as the basis of selection for the following genes: dhfr, which confers resistance to methotrexate (Wigler et al., Natl. Acad. Sci. USA 77:357 (1980); O'Hare et al., Proc. Natl. Acad. Sci. USA 78:1527 (1981)); gpt, which confers resistance to mycophenolic acid (Mulligan & Berg, Proc. Natl. Acad. Sci. USA 78:2072 (1981)); neo, which confers resistance to the aminoglycoside G-418 Clinical Pharmacy 12:488-505; Wu and Wu, Biotherapy 3:87-95 (1991); Tolstoshev, Ann. Rev. Pharmacol. Toxicol. 32:573-596 (1993); Mulligan, Science 260:926-932 (1993); and Morgan and Anderson, Ann. Rev. Biochem. 62:191-217 (1993); May, 1993, TIB TECH 11(5):155-215 (1993)); and hygro, which confers resistance to hygromycin (Santerre et al., Gene 30:147 (1984)). Methods commonly known in the art of recombinant DNA technology may be routinely applied to select the desired recombinant clone, and such methods are described, for example, in Ausubel et al. (eds.), Current Protocols in Molecular Biology, John Wiley & Sons, NY (1993); Kriegler, Gene Transfer and Expression, A Laboratory Manual, Stockton Press, NY (1990); and in Chapters 12 and 13, Dracopoli et al. (eds), Current Protocols in Human Genetics, John Wiley & Sons, NY (1994); Colberre-Garapin et al., J. Mol. Biol. 150:1 (1981), which are incorporated by reference herein in their entireties.

[0334] The expression levels of an antibody molecule can be increased by vector amplification (for a review, see Bebbington and Hentschel, The use of vectors based on gene amplification for the expression of cloned genes in mammalian cells in DNA cloning, Vol. 3. (Academic Press, New York, 1987)). When a marker in the vector system expressing antibody is amplifiable, increase in the level of inhibitor present in culture of host cell will increase the number of copies of the marker gene. Since the amplified region is associated with the antibody gene, production of the antibody will also increase (Crouse et al., Mol. Cell. Biol. 3:257 (1983)).

[0335] Vectors which use glutamine synthase (GS) or DHFR as the selectable markers can be amplified in the presence of the drugs methionine sulphoximine or methotrexate, respectively. An advantage of glutamine synthase based vectors are the availabilty of cell lines (e.g., the murine myeloma cell line, NS0) which are glutamine synthase negative. Glutamine synthase expression systems can also function in glutamine synthase expressing cells (e.g. Chinese Hamster Ovary (CHO) cells) by providing additional inhibitor to prevent the functioning of the endogenous gene. A glutamine synthase expression system and components thereof are detailed in PCT publications: WO87/04462; WO86/05807; WO89/01036; WO89/10404; and WO91/06657 which are incorporated in their entireties by reference herein. Additionally, glutamine synthase expression vectors that may be used according to the present invention are commercially available from suplliers, including, for example Lonza Biologics, Inc. (Portsmouth, N.H.). Expression and production of monoclonal antibodies using a GS expression system in murine myeloma cells is described in Bebbington et al., Bio/technology 10:169(1992) and in Biblia and Robinson Biotechnol. Prog. 11:1 (1995) which are incorporated in their entirities by reference herein.

[0336] The host cell may be co-transfected with two expression vectors of the invention, the first vector encoding a heavy chain derived polypeptide and the second vector encoding a light chain derived polypeptide. The two vectors may contain identical selectable markers which enable equal expression of heavy and light chain polypeptides. Alternatively, a single vector may be used which encodes, and is capable of expressing, both heavy and light chain polypeptides. In such situations, the light chain should be placed before the heavy chain to avoid an excess of toxic free heavy chain (Proudfoot, Nature 322:52 (1986); Kohler, Proc. Natl. Acad. Sci. USA 77:2197 (1980)). The coding sequences for the heavy and light chains may comprise cDNA or genomic DNA.

[0337] Once an antibody molecule of the invention has been produced by an animal, chemically synthesized, or recombinantly expressed, it may be purified by any method known in the art for purification of an immunoglobulin molecule, for example, by chromatography (e.g., ion exchange, affinity, particularly by affinity for the specific antigen after Protein A, and sizing column chromatography), centrifugation, differential solubility, or by any other standard technique for the purification of proteins. In addition, the antibodies of the present invention or fragments thereof can be fused to heterologous polypeptide sequences described herein or otherwise known in the art, to facilitate purification.

[0338] The present invention encompasses antibodies recombinantly fused or chemically conjugated (including both covalently and non-covalently conjugations) to a polypeptide (or portion thereof, preferably at least 10, 20, 30, 40, 50, 60, 70, 80, 90 or 100 amino acids of the polypeptide) of the present invention to generate fusion proteins. The fusion does not necessarily need to be direct, but may occur through linker sequences. The antibodies may be specific for antigens other than polypeptides (or portion thereof, preferably at least 10, 20, 30, 40, 50, 60, 70, 80, 90 or 100 amino acids of the polypeptide) of the present invention. For example, antibodies may be used to target the polypeptides of the present invention to particular cell types, either in vitro or in vivo, by fusing or conjugating the polypeptides of the present invention to antibodies specific for particular cell surface receptors. Antibodies fused or conjugated to the polypeptides of the present invention may also be used in in vitro immunoassays and purification methods using methods known in the art. See e.g., Harbor et al., supra, and PCT publication WO 93/21232; EP 439,095; Naramura et al., Immunol. Lett. 39:91-99 (1994); U.S. Pat. No. 5,474,981; Gillies et al., PNAS 89:1428-1432 (1992); Fell et al., J. Immunol. 146:2446-2452 (1991), which are incorporated by reference in their entireties.

[0339] The present invention further includes compositions comprising the polypeptides of the present invention fused or conjugated to antibody domains other than the variable regions. For example, the polypeptides of the present invention may be fused or conjugated to an antibody Fc region, or portion thereof. The antibody portion fused to a polypeptide of the present invention may comprise the constant region, hinge region, CH1 domain, CH2 domain, and CH3 domain or any combination of whole domains or portions thereof. The polypeptides may also be fused or conjugated to the above antibody portions to form multimers. For example, Fc portions fused to the polypeptides of the present invention can form dimers through disulfide bonding between the Fc portions. Higher multimeric forms can be made by fusing the polypeptides to portions of IgA and IgM. Methods for fusing or conjugating the polypeptides of the present invention to antibody portions are known in the art. See, e.g., U.S. Pat. Nos. 5,336,603; 5,622,929; 5,359,046; 5,349,053; 5,447,851; 5,112,946; EP 307,434; EP 367,166; PCT publications WO 96/04388; WO 91/06570; Ashkenazi et al., Proc. Natl. Acad. Sci. USA 88:10535-10539 (1991); Zheng et al., J. Immunol. 154:5590-5600 (1995); and Vil et al., Proc. Natl. Acad. Sci. USA 89:11337-11341 (1992) (said references incorporated by reference in their entireties).

[0340] As discussed, supra, the polypeptides corresponding to a polypeptide, polypeptide fragment, or a variant of SEQ ID NO:Y may be fused or conjugated to the above antibody portions to increase the in vivo half life of the polypeptides or for use in immunoassays using methods known in the art. Further, the polypeptides corresponding to SEQ ID NO:Y may be fused or conjugated to the above antibody portions to facilitate purification. One reported example describes chimeric proteins consisting of the first two domains of the human CD4-polypeptide and various domains of the constant regions of the heavy or light chains of mammalian immunoglobulins. See EP 394,827; and Traunecker et al., Nature 331:84-86 (1988). The polypeptides of the present invention fused or conjugated to an antibody having disulfide- linked dimeric structures (due to the IgG) may also be more efficient in binding and neutralizing other molecules, than the monomeric secreted protein or protein fragment alone. See, for example, Fountoulakis et al., J. Biochem. 270:3958-3964 (1995). In many cases, the Fc part in a fusion protein is beneficial in therapy and diagnosis, and thus can result in, for example, improved pharmacokinetic properties. See, for example, EP A 232,262. Alternatively, deleting the Fe part after the fusion protein has been expressed, detected, and purified, would be desired. For example, the Fe portion may hinder therapy and diagnosis if the fusion protein is used as an antigen for immunizations. In drug discovery, for example, human proteins, such as hfL-5, have been fused with Fe portions for the purpose of high-throughput screening assays to identify antagonists of hIL-5. (See, Bennett et al., J. Molecular Recognition 8:52-58 (1995); Johanson et al., J. Biol. Chem. 270:9459-9471 (1995)).

[0341] Moreover, the antibodies or fragments thereof of the present invention can be fused to marker sequences, such as a peptide to facilitate purification. In preferred embodiments, the marker amino acid sequence is a hexa-histidine peptide, such as the tag provided in a pQE vector (QIAGEN, Inc., 9259 Eton Avenue, Chatsworth, Calif., 91311), among others, many of which are commercially available. As described in Gentz et al., Proc. Natl. Acad. Sci. USA 86:821-824 (1989), for instance, hexa-histidine provides for convenient purification of the fusion protein. Other peptide tags useful for purification include, but are not limited to, the “HA” tag, which corresponds to an epitope derived from the influenza hemagglutinin protein (Wilson et al., Cell 37:767 (1984)) and the “flag” tag.

[0342] The present invention further encompasses antibodies or fragments thereof conjugated to a diagnostic or therapeutic agent. The antibodies can be used diagnostically to, for example, monitor the development or progression of a tumor as part of a clinical testing procedure to, e.g., determine the efficacy of a given treatment regimen. Detection can be facilitated by coupling the antibody to a detectable substance. Examples of detectable substances include various enzymes, prosthetic groups, fluorescent materials, luminescent materials, bioluminescent materials, radioactive materials, positron emitting metals using various positron emission tomographies, and nonradioactive paramagnetic metal ions. The detectable substance may be coupled or conjugated either directly to the antibody (or fragment thereof) or indirectly, through an intermediate (such as, for example, a linker known in the art) using techniques known in the art. See, for example, U.S. Pat. No. 4,741,900 for metal ions which can be conjugated to antibodies for use as diagnostics according to the present invention. Examples of suitable enzymes include horseradish peroxidase, alkaline phosphatase, beta-galactosidase, or acetylcholinesterase; examples of suitable prosthetic group complexes include streptavidin/biotin and avidin/biotin; examples of suitable fluorescent materials include umbelliferone, fluorescein, fluorescein isothiocyanate, rhodamine, dichlorotriazinylamine fluorescein, dansyl chloride or phycoerythrin; an example of a luminescent material includes luminol; examples of bioluminescent materials include luciferase, luciferin, and aequorin; and examples of suitable radioactive material include 121I, 131I, 111In or 99Tc.

[0343] Further, an antibody or fragment thereof may be conjugated to a therapeutic moiety such as a cytotoxin, e.g., a cytostatic or cytocidal agent, a therapeutic agent or a radioactive metal ion, e.g., alpha-emitters such as, for example, 213Bi. A cytotoxin or cytotoxic agent includes any agent that is detrimental to cells. Examples include paclitaxol, cytochalasin B, gramicidin D, ethidium bromide, emetine, mitomycin, etoposide, tenoposide, vincristine, vinblastine, colchicin, doxorubicin, daunorubicin, dihydroxy anthracin dione, mitoxantrone, mithramycin, actinomycin D, 1-dehydrotestosterone, glucocorticoids, procaine, tetracaine, lidocaine, propranolol, and puromycin and analogs or homologs thereof. Therapeutic agents include, but are not limited to, antimetabolites (e.g., methotrexate, 6-mercaptopurine, 6-thioguanine, cytarabine, 5-fluorouracil decarbazine), alkylating agents (e.g., mechlorethamine, thioepa chlorambucil, melphalan, carmustine (BSNU) and lomustine (CCNU), cyclothosphamide, busulfan, dibromomannitol, streptozotocin, mitomycin C, and cis-dichlorodiamine platinum (II) (DDP) cisplatin), anthracyclines (e.g., daunorubicin (formerly daunomycin) and doxorubicin), antibiotics (e.g., dactinomycin (formerly actinomycin), bleomycin, mithramycin, and anthramycin (AMC)), and anti-mitotic agents (e.g., vincristine and vinblastine).

[0344] The conjugates of the invention can be used for modifying a given biological response, the therapeutic agent or drug moiety is not to be construed as limited to classical chemical therapeutic agents. For example, the drug moiety may be a protein or polypeptide possessing a desired biological activity. Such proteins may include, for example, a toxin such as abrin, ricin A, pseudomonas exotoxin, or diphtheria toxin; a protein such as tumor necrosis factor, a-interferon, β-interferon, nerve growth factor, platelet derived growth factor, tissue plasminogen activator, an apoptotic agent, e.g., TNF-alpha, TNF-beta, AIM I (See, International Publication No. WO 97/33899), AIM II (See, International Publication No. WO 97/34911), Fas Ligand (Takahashi et al., Int. Immunol., 6:1567-1574 (1994)), VEGI (See, International Publication No. WO 99/23105), a thrombotic agent or an anti-angiogenic agent, e.g., angiostatin or endostatin; or, biological response modifiers such as, for example, lymphokines, interleukin-1 (“IL-1”), interleukin-2 (“IL-2”), interleukin-6 (“IL-6”), granulocyte macrophage colony stimulating factor (“GM-CSF”), granulocyte colony stimulating factor (“G-CSF”), or other growth factors.

[0345] Antibodies may also be attached to solid supports, which are particularly useful for immunoassays or purification of the target antigen. Such solid supports include, but are not limited to, glass, cellulose, polyacrylamide, nylon, polystyrene, polyvinyl chloride or polypropylene.

[0346] Techniques for conjugating such therapeutic moiety to antibodies are well known. See, for example, Amon et al., “Monoclonal Antibodies For Immunotargeting Of Drugs In Cancer Therapy”, in Monoclonal Antibodies And Cancer Therapy, Reisfeld et al. (eds.), pp. 243-56 (Alan R. Liss, Inc. 1985); Hellstrom et al., “Antibodies For Drug Delivery”, in Controlled Drug Delivery (2nd Ed.), Robinson et al. (eds.), pp. 623-53 (Marcel Dekker, Inc. 1987); Thorpe, “Antibody Carriers Of Cytotoxic Agents In Cancer Therapy: A Review”, in Monoclonal Antibodies '84: Biological And Clinical Applications, Pinchera et al. (eds.), pp. 475-506 (1985); “Analysis, Results, And Future Prospective Of The Therapeutic Use Of Radiolabeled Antibody In Cancer Therapy”, in Monoclonal Antibodies For Cancer Detection And Therapy, Baldwin et al. (eds.), pp. 303-16 (Academic Press 1985), and Thorpe et al., “The Preparation And Cytotoxic Properties Of Antibody-Toxin Conjugates”, Immunol. Rev. 62:119-58 (1982).

[0347] Alternatively, an antibody can be conjugated to a second antibody to form an antibody heteroconjugate as described by Segal in U.S. Pat. No. 4,676,980, which is incorporated herein by reference in its entirety.

[0348] An antibody, with or without a therapeutic moiety conjugated to it, administered alone or in combination with cytotoxic factor(s) and/or cytokine(s) can be used as a therapeutic.

Immunophenotyping

[0349] The antibodies of the invention may be utilized for immunophenotyping of cell lines and biological samples. Translation products of the gene of the present invention may be useful as cell-specific markers, or more specifically as cellular markers that are differentially expressed at various stages of differentiation and/or maturation of particular cell types. Monoclonal antibodies directed against a specific epitope, or combination of epitopes, will allow for the screening of cellular populations expressing the marker. Various techniques can be utilized using monoclonal antibodies to screen for cellular populations expressing the marker(s), and include magnetic separation using antibody-coated magnetic beads, “panning” with antibody attached to a solid matrix (i.e., plate), and flow cytometry (See, e.g., U.S. Pat. No. 5,985,660; and Morrison et al., Cell, 96:737-49 (1999)).

[0350] These techniques allow for the screening of particular populations of cells, such as might be found with hematological malignancies (i.e. minimal residual disease (MRD) in acute leukemic patients) and “non-self” cells in transplantations to prevent Graft-versus-Host Disease (GVHD). Alternatively, these techniques allow for the screening of hematopoietic stem and progenitor cells capable of undergoing proliferation and/or differentiation, as might be found in human umbilical cord blood.

Assays For Antibody Binding

[0351] The antibodies of the invention may be assayed for immunospecific binding by any method known in the art. The immunoassays which can be used include but are not limited to competitive and non-competitive assay systems using techniques such as western blots, radioimmunoassays, ELISA (enzyme linked immunosorbent assay), “sandwich” immunoassays, immunoprecipitation assays, precipitin reactions, gel diffusion precipitin reactions, immunodiffusion assays, agglutination assays, complement-fixation assays, immunoradiometric assays, fluorescent immunoassays, and protein A immunoassays, to name but a few. Such assays are routine and well known in the art (see, e.g., Ausubel et al, eds, 1994, Current Protocols in Molecular Biology, Vol. 1, John Wiley & Sons, Inc., New York, which is incorporated by reference herein in its entirety). Exemplary immunoassays are described briefly below (but are not intended by way of limitation).

[0352] Immunoprecipitation protocols generally comprise lysing a population of cells in a lysis buffer such as RIPA buffer (1% NP40 or Triton X-100, 1% sodium deoxycholate, 0.1% SDS, 0.15 M NaCl, 0.01 M sodium phosphate at pH 7.2, 1% Trasylol) supplemented with protein phosphatase and/or protease inhibitors (e.g., EDTA, PMSF, aprotinin, sodium vanadate), adding the antibody of interest to the cell lysate, incubating for a period of time (e.g., 1-4 hours) at 4° C., adding protein A and/or protein G sepharose beads to the cell lysate, incubating for about an hour or more at 4° C., washing the beads in lysis buffer and resuspending the beads in SDS/sample buffer. The ability of the antibody of interest to immunoprecipitate a particular antigen can be assessed by, e.g., western blot analysis. One of skill in the art would be knowledgeable as to the parameters that can be modified to increase the binding of the antibody to an antigen and decrease the background (e.g., pre-clearing the cell lysate with sepharose beads). For further discussion regarding immunoprecipitation protocols see, e.g., Ausubel et al., eds., (1994), Current Protocols in Molecular Biology, Vol. 1, John Wiley & Sons, Inc., New York, section 10.16.1.

[0353] Western blot analysis generally comprises preparing protein samples, electrophoresis of the protein samples in a polyacrylamide gel (e.g., 8%- 20% SDS-PAGE depending on the molecular weight of the antigen), transferring the protein sample from the polyacrylamide gel to a membrane such as nitrocellulose, PVDF or nylon, blocking the membrane in blocking solution (e.g., PBS with 3% BSA or non-fat milk), washing the membrane in washing buffer (e.g., PBS-Tween 20), blocking the membrane with primary antibody (the antibody of interest) diluted in blocking buffer, washing the membrane in washing buffer, blocking the membrane with a secondary antibody (which recognizes the primary antibody, e.g., an anti-human antibody) conjugated to an enzymatic substrate (e.g., horseradish peroxidase or alkaline phosphatase) or radioactive molecule (e.g., 32P or 125I) diluted in blocking buffer, washing the membrane in wash buffer, and detecting the presence of the antigen. One of skill in the art would be knowledgeable as to the parameters that can be modified to increase the signal detected and to reduce the background noise. For further discussion regarding western blot protocols see, e.g., Ausubel et al, eds, (1994), Current Protocols in Molecular Biology, Vol. 1, John Wiley & Sons, Inc., New York, section 10.8.1.

[0354] ELISAs comprise preparing antigen, coating the well of a 96 well microtiter plate with the antigen, adding the antibody of interest conjugated to a detectable compound such as an enzymatic substrate (e.g., horseradish peroxidase or alkaline phosphatase) to the well and incubating for a period of time, and detecting the presence of the antigen. In ELISAs the antibody of interest does not have to be conjugated to a detectable compound; instead, a second antibody (which recognizes the antibody of interest) conjugated to a detectable compound may be added to the well. Further, instead of coating the well with the antigen, the antibody may be coated to the well. In this case, a second antibody conjugated to a detectable compound may be added following the addition of the antigen of interest to the coated well. One of skill in the art would be knowledgeable as to the parameters that can be modified to increase the signal detected as well as other variations of ELISAs known in the art. For further discussion regarding ELISAs see, e.g., Ausubel et al, eds, (1994), Current Protocols in Molecular Biology, Vol. 1, John Wiley & Sons, Inc., New York, section 11.2.1.

[0355] The binding affinity of an antibody to an antigen and the off-rate of an antibody-antigen interaction can be determined by competitive binding assays. One example of a competitive binding assay is a radioimmunoassay comprising the incubation of labeled antigen (e.g., 3H or 125I) with the antibody of interest in the presence of increasing amounts of unlabeled antigen, and the detection of the antibody bound to the labeled antigen. The affinity of the antibody of interest for a particular antigen and the binding off-rates can be determined from the data by scatchard plot analysis. Competition with a second antibody can also be determined using radioimmunoassays. In this case, the antigen is incubated with antibody of interest conjugated to a labeled compound (e.g., 3H or 125I) in the presence of increasing amounts of an unlabeled second antibody.

[0356] Antibodies of the invention may be characterized using immunocytochemisty methods on cells (e.g., mammalian cells, such as CHO cells) transfected with a vector enabling the expression of an antigen or with vector alone using techniques commonly known in the art. Antibodies that bind antigen transfected cells, but not vector-only transfected cells, are antigen specific.

Therapeutic Uses

[0357] Table 1D, comprising Table 1D.1 and 1D.2, also provides information regarding biological activities and preferred therapeutic uses (i.e. see, “Preferred Indications” column) for polynucleotides and polypeptides of the invention (including antibodies, agonists, and/or antagonists thereof). Table 1D also provides information regarding assays which may be used to test polynucleotides and polypeptides of the invention (including antibodies, agonists, and/or antagonists thereof) for the corresponding biological activities. In Table 1D.1, the first column (“Gene No.”) provides the gene number in the application for each clone identifier. The second column (“cDNA ATCC Deposit No:Z”) provides the unique clone identifier for each clone as previously described and indicated in Table 1A and Table 1B. The third column (“AA SEQ ID NO:Y”) indicates the Sequence Listing SEQ ID Number for polypeptide sequences encoded by the corresponding cDNA clones (also as indicated in Table 1A, Table 1B, and Table 2). The fourth column (“Biological Activity”) indicates a biological activity corresponding to the indicated polypeptides (or polynucleotides encoding said polypeptides). In Table 1D.2, each of the biological activities of Table 1D.1 is listed followed by an “Exemplary Activity Assay” row and a “Preferred Indication” row; however, for some biological activities no “Exemplary Activity Assay” or “Preferred Indication” is given. The “Exemplary Activity Assay” row describes the biological activity listed in the row that precedes it and also provides information pertaining to the various types of assays which may be performed to test demonstrate, or quantify the corresponding biological activity. The “Preferred Indication” row also refers to the biological activity listed in the preceding row and describes disease(s) or disorder(s) that may be detected, diagnosed, prevented, treated, or ameliorated by the nucleic acids and proteins (or antibodies against the same) of the invention (including polynucleotide, polypeptide, and antibody fragments or variants thereof).

[0358] The present invention is further directed to antibody-based therapies which involve administering antibodies of the invention to an animal, preferably a mammal, and most preferably a human, patient for treating one or more of the disclosed diseases, disorders, or conditions. Therapeutic compounds of the invention include, but are not limited to, antibodies of the invention (including fragments, analogs and derivatives thereof as described herein) and nucleic acids encoding antibodies of the invention (including fragments, analogs and derivatives thereof and anti-idiotypic antibodies as described herein). The antibodies of the invention can be used to detect, prevent, diagnose, prognosticate, treat, and/or ameliorate diseases, disorders or conditions associated with aberrant expression and/or activity of a polypeptide of the invention, including, but not limited to, cardiovascular diseases and disorders. The treatment and/or prevention of cardiovascular diseases and disorders associated with aberrant expression and/or activity of a polypeptide of the invention includes, but is not limited to, alleviating symptoms associated with cardiovascular diseases and disorders. Antibodies of the invention may be provided in pharmaceutically acceptable compositions as known in the art or as described herein.

[0359] In a specific and preferred embodiment, the present invention is directed to antibody-based therapies which involve administering antibodies of the invention to an animal, preferably a mammal, and most preferably a human, patient for treating cardiovascular diseases and disorders. Therapeutic compounds of the invention include, but are not limited to, antibodies of the invention (e.g., antibodies directed to the full length protein expressed on the cell surface of a mammalian cell; antibodies directed to an epitope of a polypeptide of the invention (such as, for example, a predicted linear epitope shown in Table 1B; or a conformational epitope, including fragments, analogs and derivatives thereof as described herein) and nucleic acids encoding antibodies of the invention (including fragments, analogs and derivatives thereof and anti-idiotypic antibodies as described herein). The antibodies of the invention can be used to detect, diagnose, prevent, treat, prognosticate, and/or ameliorate cardiovascular diseases, disorders or conditions associated with aberrant expression and/or activity of a polypeptide of the invention. The treatment and/or prevention of cardiovascular diseases, disorders, or conditions associated with aberrant expression and/or activity of a polypeptide of the invention includes, but is not limited to, alleviating symptoms associated with those diseases, disorders or conditions. Antibodies of the invention may be provided in pharmaceutically acceptable compositions as known in the art or as described herein.

[0360] A summary of the ways in which the antibodies of the present invention may be used therapeutically includes binding polynucleotides or polypeptides of the present invention locally or systemically in the body or by direct cytotoxicity of the antibody, e.g. as mediated by complement (CDC) or by effector cells (ADCC). Some of these approaches are described in more detail below. Armed with the teachings provided herein, one of ordinary skill in the art will know how to use the antibodies of the present invention for diagnostic, monitoring or therapeutic purposes without undue experimentation.

[0361] The antibodies of this invention may be advantageously utilized in combination with other monoclonal or chimeric antibodies, or with lymphokines or hematopoietic growth factors (such as, e.g., IL-2, IL-3 and IL-7), for example, which serve to increase the number or activity of effector cells which interact with the antibodies.

[0362] The antibodies of the invention may be administered alone or in combination with other types of treatments (e.g., radiation therapy, chemotherapy, hormonal therapy, immunotherapy and anti-tumor agents). Generally, administration of products of a species origin or species reactivity (in the case of antibodies) that is the same species as that of the patient is preferred. Thus, in a preferred embodiment, human antibodies, fragments derivatives, analogs, or nucleic acids, are administered to a human patient for therapy or prophylaxis.

[0363] It is preferred to use high affinity and/or potent in vivo inhibiting and/or neutralizing antibodies against polypeptides or polynucleotides of the present invention, fragments or regions thereof, for both immunoassays directed to and therapy of cardiovascular diseases and disorders related to polynucleotides or polypeptides, including fragments thereof, of the present invention. Such antibodies, fragments, or regions, will preferably have an affinity for polynucleotides or polypeptides of the invention, including fragments thereof. Preferred binding affinities include those with a dissociation constant or Kd less than 5×10⁻² M, 10×⁻² M, 5×10⁻³ M, 10⁻³ M, 5×10⁻⁴ M, 10⁴⁻⁴ M, 5×10⁻⁵ M, 10⁻⁵ M, 5×10⁻⁶ M, 10⁻⁶ M, 5×10⁻⁷ M, 10⁻⁷ M, 5×10⁻⁸ M, 10⁻⁸ M, 5×10⁻⁹ M, 10⁻⁹ M, 5×10⁻¹⁰ M, 10⁻¹⁰ M, 5×10⁻¹¹ M, 10⁻¹¹ M, 5×10⁻¹² M, 10⁻¹² M, 5×10⁻¹³ M, and 10⁻¹³ M, 5×10⁻¹⁴ M, 10⁻¹⁴ M, 5×10⁻¹⁵ M, and 10⁻¹⁵ M.

Gene Therapy

[0364] In a specific embodiment, nucleic acids comprising sequences encoding antibodies or functional derivatives thereof, are administered to treat, inhibit or prevent a cardiovascular disease or disorder associated with aberrant expression and/or activity of a polypeptide of the invention, by way of gene therapy. Gene therapy refers to therapy performed by the administration to a subject of an expressed or expressible nucleic acid. In this embodiment of the invention, the nucleic acids produce their encoded protein that mediates a therapeutic effect.

[0365] Any of the methods for gene therapy available in the art can be used according to the present invention. Exemplary methods are described below.

[0366] For general reviews of the methods of gene therapy, see Goldspiel et al., Clinical Pharmacy 12:488-505 (1993); Wu and Wu, Biotherapy 3:87-95 (1991); Tolstoshev, Ann. Rev. Pharmacol. Toxicol. 32:573-596 (1993); Mulligan, Science 260:926-932 (1993); and Morgan and Anderson, Ann. Rev. Biochem. 62:191-217 (1993); May, TIBTECH 11(5):155-215 (1993). Methods commonly known in the art of recombinant DNA technology which can be used are described in Ausubel et al. (eds.), Current Protocols in Molecular Biology, John Wiley & Sons, NY (1993); and Kriegler, Gene Transfer and Expression, A Laboratory Manual, Stockton Press, NY (1990).

[0367] In a preferred embodiment, the compound comprises nucleic acid sequences encoding an antibody, said nucleic acid sequences being part of expression vectors that express the antibody or fragments or chimeric proteins or heavy or light chains thereof in a suitable host. In particular, such nucleic acid sequences have promoters operably linked to the antibody coding region, said promoter being inducible or constitutive, and, optionally, tissue-specific. In another particular embodiment, nucleic acid molecules are used in which the antibody coding sequences and any other desired sequences are flanked by regions that promote homologous recombination at a desired site in the genome, thus providing for intrachromosomal expression of the antibody encoding nucleic acids (Koller and Smithies, Proc. Natl. Acad. Sci. USA 86:8932-8935 (1989); Zijlstra et al., Nature 342:435-438 (1989). In specific embodiments, the expressed antibody molecule is a single chain antibody; alternatively, the nucleic acid sequences include sequences encoding both the heavy and light chains, or fragments thereof, of the antibody.

[0368] Delivery of the nucleic acids into a patient may be either direct, in which case the patient is directly exposed to the nucleic acid or nucleic acid-carrying vectors, or indirect, in which case, cells are first transformed with the nucleic acids in vitro, then transplanted into the patient. These two approaches are known, respectively, as in vivo or ex vivo gene therapy.

[0369] In a specific embodiment, the nucleic acid sequences are directly administered in vivo, where it is expressed to produce the encoded product This can be accomplished by any of numerous methods known in the art, e.g., by constructing them as part of an appropriate nucleic acid expression vector and administering it so that they become intracellular, e.g., by infection using defective or attenuated retrovirals or other viral vectors (see U.S. Pat. No. 4,980,286), or by direct injection of naked DNA, or by use of microparticle bombardment (e.g., a gene gun; Biolistic, Dupont), or coating with lipids or cell-surface receptors or transfecting agents, encapsulation in liposomes, microparticles, or microcapsules, or by administering them in linkage to a peptide which is known to enter the nucleus, by administering it in linkage to a ligand subject to receptor-mediated endocytosis (see, e.g., Wu and Wu, J. Biol. Chem. 262:4429-4432 (1987)) (which can be used to target cell types specifically expressing the receptors), etc. In another embodiment, nucleic acid-ligand complexes can be formed in which the ligand comprises a fusogenic viral peptide to disrupt endosomes, allowing the nucleic acid to avoid lysosomal degradation. In yet another embodiment, the nucleic acid can be targeted in vivo for cell specific uptake and expression, by targeting a specific receptor (see, e.g., PCT Publications WO 92/06180; WO 92/22635; WO92/20316; WO93/14188, WO 93/20221). Alternatively, the nucleic acid can be introduced intracellularly and incorporated within host cell DNA for expression, by homologous recombination (Koller and Smithies, Proc. Natl. Acad. Sci. USA 86:8932-8935 (1989); Zijlstra et al., Nature 342:435-438 (1989)).

[0370] In a specific embodiment, viral vectors that contains nucleic acid sequences encoding an antibody of the invention are used. For example, a retroviral vector can be used (see Miller et al., Meth. Enzymol. 217:581-599 (1993)). These retroviral vectors contain the components necessary for the correct packaging of the viral genome and integration into the host cell DNA. The nucleic acid sequences encoding the antibody to be used in gene therapy are cloned into one or more vectors, which facilitates delivery of the gene into a patient. More detail about retroviral vectors can be found in Boesen et al., Biotherapy 6:291-302 (1994), which describes the use of a retroviral vector to deliver the mdr1 gene to hematopoietic stem cells in order to make the stem cells more resistant to chemotherapy. Other references illustrating the use of retroviral vectors in gene therapy are: Clowes et al., J. Clin. Invest. 93:644-651 (1994); Kiem et al., Blood 83:1467-1473 (1994); Salmons and Gunzberg, Human Gene Therapy 4:129-141 (1993); and Grossman and Wilson, Curr. Opin. in Genetics and Devel. 3:110-114 (1993).

[0371] Adenoviruses are other viral vectors that can be used in gene therapy. Adenoviruses are especially attractive vehicles for delivering genes to respiratory epithelia. Adenoviruses naturally infect respiratory epithelia where they cause a mild disease. Other targets for adenovirus-based delivery systems are liver, the central nervous system, endothelial cells, and muscle. Adenoviruses have the advantage of being capable of infecting non-dividing cells. Kozarsky and Wilson, Current Opinion in Genetics and Development 3:499-503 (1993) present a review of adenovirus-based gene therapy. Bout et al., Human Gene Therapy 5:3-10 (1994) demonstrated the use of adenovirus vectors to transfer genes to the respiratory epithelia of rhesus monkeys. Other instances of the use of adenoviruses in gene therapy can be found in Rosenfeld et al., Science 252:431-434 (1991); Rosenfeld et al., Cell 68:143-155 (1992); Mastrangeli et al., J. Clin. Invest. 91:225-234 (1993); PCT Publication WO94/12649; and Wang, et al., Gene Therapy 2:775-783 (1995). In a preferred embodiment, adenovirus vectors are used.

[0372] Adeno-associated virus (AAV) has also been proposed for use in gene therapy (Walsh et al., Proc. Soc. Exp. Biol. Med. 204:289-300 (1993); U.S. Pat. No. 5,436,146).

[0373] Another approach to gene therapy involves transferring a gene to cells in tissue culture by such methods as electroporation, lipofection, calcium phosphate mediated transfection, or viral infection. Usually, the method of transfer includes the transfer of a selectable marker to the cells. The cells are then placed under selection to isolate those cells that have taken up and are expressing the transferred gene. Those cells are then delivered to a patient.

[0374] In this embodiment, the nucleic acid is introduced into a cell prior to administration in vivo of the resulting recombinant cell. Such introduction can be carried out by any method known in the art, including but not limited to transfection, electroporation, microinjection, infection with a viral or bacteriophage vector containing the nucleic acid sequences, cell fusion, chromosome-mediated gene transfer, microcell-mediated gene transfer, spheroplast fusion, etc. Numerous techniques are known in the art for the introduction of foreign genes into cells (see, e.g., Loeffler and Behr, Meth. Enzymol. 217:599-618 (1993); Cohen et al., Meth. Enzymol. 217:618-644 (1993); Cline, Pharmac. Ther. 29:69-92m (1985) and may be used in accordance with the present invention, provided that the necessary developmental and physiological functions of the recipient cells are not disrupted. The technique should provide for the stable transfer of the nucleic acid to the cell, so that the nucleic acid is expressible by the cell and preferably heritable and expressible by its cell progeny.

[0375] The resulting recombinant cells can be delivered to a patient by various methods known in the art. Recombinant blood cells (e.g., hematopoietic stem or progenitor cells) are preferably administered intravenously. The amount of cells envisioned for use depends on the desired effect, patient state, etc., and can be determined by one skilled in the art.

[0376] Cells into which a nucleic acid can be introduced for purposes of gene therapy encompass any desired, available cell type, and include but are not limited to epithelial cells, endothelial cells, keratinocytes, fibroblasts, muscle cells, hepatocytes; blood cells such as T lymphocytes, B lymphocytes, monocytes, macrophages, neutrophils, eosinophils, megakaryocytes, granulocytes; various stem or progenitor cells, in particular hematopoietic stem or progenitor cells, e.g., as obtained from bone marrow, umbilical cord blood, peripheral blood, fetal liver, etc.

[0377] In a preferred embodiment, the cell used for gene therapy is autologous to the patient.

[0378] In an embodiment in which recombinant cells are used in gene therapy, nucleic acid sequences encoding an antibody are introduced into the cells such that they are expressible by the cells or their progeny, and the recombinant cells are then administered in vivo for therapeutic effect. In a specific embodiment, stem or progenitor cells are used. Any stem and/or progenitor cells which can be isolated and maintained in vitro can potentially be used in accordance with this embodiment of the present invention (see e.g. PCT Publication WO 94/08598; Stemple and Anderson, Cell 71:973-985 (1992); Rheinwald, Meth. Cell Bio. 21A:229 (1980); and Pittelkow and Scott, Mayo Clinic Proc. 61:771 (1986)).

[0379] In a specific embodiment, the nucleic acid to be introduced for purposes of gene therapy comprises an inducible promoter operably linked to the coding region, such that expression of the nucleic acid is controllable by the presence or absence of an appropriate inducer of transcription.

Demonstration of Therapeutic or Prophylactic Activity

[0380] The compounds or pharmaceutical compositions of the invention are preferably tested in vitro, and then in vivo for the desired therapeutic or prophylactic activity, prior to use in humans. For example, in vitro assays to demonstrate the therapeutic or prophylactic utility of a compound or pharmaceutical composition include, the effect of a compound on a cell line or a patient tissue sample. The effect of the compound or composition on the cell line and/or tissue sample can be determined utilizing techniques known to those of skill in the art including, but not limited to, rosette formation assays and cell lysis assays. In accordance with the invention, in vitro assays which can be used to determine whether administration of a specific compound is indicated, include in vitro cell culture assays in which a patient tissue sample is grown in culture, and exposed to or otherwise administered a compound, and the effect of such compound upon the tissue sample is observed.

Therapeutic/Prophylactic Administration and Composition

[0381] The invention provides methods of treatment, inhibition and prophylaxis by administration to a subject of an effective amount of a compound or pharmaceutical composition of the invention, preferably a polypeptide or antibody of the invention. In a preferred embodiment, the compound is substantially purified (e.g., substantially free from substances that limit its effect or produce undesired side-effects). The subject is preferably an animal, including but not limited to animals such as cows, pigs, horses, chickens, cats, dogs, etc., and is preferably a mammal, and most preferably human.

[0382] Formulations and methods of administration that can be employed when the compound comprises a nucleic acid or an immunoglobulin are described above; additional appropriate formulations and routes of administration can be selected from among those described herein below.

[0383] Various delivery systems are known and can be used to administer a compound of the invention, e.g., encapsulation in liposomes, microparticles, microcapsules, recombinant cells capable of expressing the compound, receptor-mediated endocytosis (see, e.g., Wu and Wu, J. Biol. Chem. 262:4429-4432 (1987)), construction of a nucleic acid as part of a retroviral or other vector, etc. Methods of introduction include but are not limited to intradermal, intramuscular, intraperitoneal, intravenous, subcutaneous, intranasal, epidural, and oral routes. The compounds or compositions may be administered by any convenient route, for example by infusion or bolus injection, by absorption through epithelial or mucocutaneous linings (e.g., oral mucosa, rectal and intestinal mucosa, etc.) and may be administered together with other biologically active agents. Administration can be systemic or local. In addition, it may be desirable to introduce the pharmaceutical compounds or compositions of the invention into the central nervous system by any suitable route, including intraventricular and intrathecal injection; intraventricular injection may be facilitated by an intraventricular catheter, for example, attached to a reservoir, such as an Ommaya reservoir. Pulmonary administration can also be employed, e.g., by use of an inhaler or nebulizer, and formulation with an aerosolizing agent.

[0384] In a specific embodiment, it may be desirable to administer the pharmaceutical compounds or compositions of the invention locally to the area in need of treatment; this may be achieved by, for example, and not by way of limitation, local infusion during surgery, topical application, e.g., in conjunction with a wound dressing after surgery, by injection, by means of a catheter, by means of a suppository, or by means of an implant, said implant being of a porous, non-porous, or gelatinous material, including membranes, such as sialastic membranes, or fibers. Preferably, when administering a protein, including an antibody, of the invention, care must be taken to use materials to which the protein does not absorb.

[0385] In another embodiment, the compound or composition can be delivered in a vesicle, in particular a liposome (see Langer, Science 249:1527-1533 (1990); Treat et al., in Liposomes in the Therapy of Infectious Disease and Cancer, Lopez-Berestein and Fidler (eds.), Liss, N.Y., pp. 353-365 (1989); Lopez-Berestein, ibid., pp. 317-327; see generally ibid.)

[0386] In yet another embodiment, the compound or composition can be delivered in a controlled release system. In one embodiment, a pump may be used (see Langer, supra; Sefton, CRC Crit. Ref. Biomed. Eng. 14:201 (1987); Buchwald et al., Surgery 88:507 (1980); Saudek et al., N. Engl. J. Med. 321:574 (1989)). In another embodiment, polymeric materials can be used (see Medical Applications of Controlled Release, Langer and Wise (eds.), CRC Pres., Boca Raton, Fla. (1974); Controlled Drug Bioavailability, Drug Product Design and Performance, Smolen and Ball (eds.), Wiley, New York (1984); Ranger and Peppas, J., Macromol. Sci. Rev. Macromol. Chem. 23:61 (1983); see also Levy et al., Science 228:190 (1985); During et al., Ann. Neurol. 25:351 (1989); Howard et al., J.Neurosurg. 71:105 (1989)). In yet another embodiment, a controlled release system can be placed in proximity of the therapeutic target, e.g., the brain, thus requiring only a fraction of the systemic dose (see, e.g., Goodson, in Medical Applications of Controlled Release, supra, vol. 2, pp. 115-138 (1984)).

[0387] Other controlled release systems are discussed in the review by Langer (Science 249:1527-1533 (1990)).

[0388] In a specific embodiment where the compound of the invention is a nucleic acid encoding a protein, the nucleic acid can be administered in vivo to promote expression of its encoded protein, by constructing it as part of an appropriate nucleic acid expression vector and administering it so that it becomes intracellular, e.g., by use of a retroviral vector (see U.S. Pat. No. 4,980,286), or by direct injection, or by use of microparticle bombardment (e.g., a gene gun; Biolistic, Dupont), or coating with lipids or cell-surface receptors or transfecting agents, or by administering it in linkage to a homeobox-like peptide which is known to enter the nucleus (see e.g., Joliot et al., Proc. Natl. Acad. Sci. USA 88:1864-1868 (1991)), etc. Alternatively, a nucleic acid can be introduced intracellularly and incorporated within host cell DNA for expression, by homologous recombination.

[0389] The present invention also provides pharmaceutical compositions. Such compositions comprise a therapeutically effective amount of a compound, and a pharmaceutically acceptable carrier. In a specific embodiment, the term “pharmaceutically acceptable” means approved by a regulatory agency of the Federal or a state government or listed in the U.S. Pharmacopeia or other generally recognized pharmacopeia for use in animals, and more particularly in humans. The term “carrier” refers to a diluent, adjuvant, excipient, or vehicle with which the therapeutic is administered. Such pharmaceutical carriers can be sterile liquids, such as water and oils, including those of petroleum, animal, vegetable or synthetic origin, such as peanut oil, soybean oil, mineral oil, sesame oil and the like. Water is a preferred carrier when the pharmaceutical composition is administered intravenously. Saline solutions and aqueous dextrose and glycerol solutions can also be employed as liquid carriers, particularly for injectable solutions. Suitable pharmaceutical excipients include starch, glucose, lactose, sucrose, gelatin, malt, rice, flour, chalk, silica gel, sodium stearate, glycerol monostearate, talc, sodium chloride, dried skim milk, glycerol, propylene, glycol, water, ethanol and the like. The composition, if desired, can also contain minor amounts of wetting or emulsifying agents, or pH buffering agents. These compositions can take the form of solutions, suspensions, emulsion, tablets, pills, capsules, powders, sustained-release formulations and the like. The composition can be formulated as a suppository, with traditional binders and carriers such as triglycerides. Oral formulation can include standard carriers such as pharmaceutical grades of mannitol, lactose, starch, magnesium stearate, sodium saccharine, cellulose, magnesium carbonate, etc. Examples of suitable pharmaceutical carriers are described in “Remington's Pharmaceutical Sciences” by E. W. Martin. Such compositions will contain a therapeutically effective amount of the compound, preferably in purified form, together with a suitable amount of carrier so as to provide the form for proper administration to the patient. The formulation should suit the mode of administration.

[0390] In a preferred embodiment, the composition is formulated in accordance with routine procedures as a pharmaceutical composition adapted for intravenous administration to human beings. Typically, compositions for intravenous administration are solutions in sterile isotonic aqueous buffer. Where necessary, the composition may also include a solubilizing agent and a local anesthetic such as lignocaine to ease pain at the site of the injection. Generally, the ingredients are supplied either separately or mixed together in unit dosage form, for example, as a dry lyophilized powder or water free concentrate in a hermetically sealed container such as an ampoule or sachette indicating the quantity of active agent. Where the composition is to be administered by infusion, it can be dispensed with an infusion bottle containing sterile pharmaceutical grade water or saline. Where the composition is administered by injection, an ampoule of sterile water for injection or saline can be provided so that the ingredients may be mixed prior to administration.

[0391] The compounds of the invention can be formulated as neutral or salt forms. Pharmaceutically acceptable salts include those formed with anions such as those derived from hydrochloric, phosphoric, acetic, oxalic, tartaric acids, etc., and those formed with cations such as those derived from sodium, potassium, ammonium, calcium, ferric hydroxides, isopropylamine, triethylamine, 2-ethylamino ethanol, histidine, procaine, etc.

[0392] The amount of the compound of the invention which will be effective in the treatment, inhibition and prevention of a disease or disorder associated with aberrant expression and/or activity of a polypeptide of the invention can be determined by standard clinical techniques. In addition, in vitro assays may optionally be employed to help identify optimal dosage ranges. The precise dose to be employed in the formulation will also depend on the route of administration, and the seriousness of the disease or disorder, and should be decided according to the judgment of the practitioner and each patient's circumstances. Effective doses may be extrapolated from dose-response curves derived from in vitro or animal model test systems.

[0393] For antibodies, the dosage administered to a patient is typically 0.1 mg/kg to 100 mg/kg of the patient's body weight. Preferably, the dosage administered to a patient is between 0.1 mg/kg and 20 mg/kg of the patient's body weight, more preferably 1 mg/kg to 10 mg/kg of the patient's body weight. Generally, human antibodies have a longer half-life within the human body than antibodies from other species due to the immune response to the foreign polypeptides. Thus, lower dosages of human antibodies and less frequent administration is often possible. Further, the dosage and frequency of administration of antibodies of the invention may be reduced by enhancing uptake and tissue penetration (e.g., into the brain) of the antibodies by modifications such as, for example, lipidation.

[0394] The invention also provides a pharmaceutical pack or kit comprising one or more containers filled with one or more of the ingredients of the pharmaceutical compositions of the invention. Optionally associated with such container(s) can be a notice in the form prescribed by a governmental agency regulating the manufacture, use or sale of pharmaceuticals or biological products, which notice reflects approval by the agency of manufacture, use or sale for human administration.

Diagnosis and Imaging

[0395] Labeled antibodies, and derivatives and analogs thereof, which specifically bind to a polypeptide of interest can be used for diagnostic purposes to detect, diagnose, prognosticate, or monitor cardiovascular diseases, disorders, and/or conditions associated with the aberrant expression and/or activity of a polypeptide of the invention. The invention provides for the detection of aberrant expression of a polypeptide of interest, comprising (a) assaying the expression of the polypeptide of interest in cells or body fluid of an individual using one or more antibodies specific to the polypeptide interest and (b) comparing the level of gene expression with a standard gene expression level, whereby an increase or decrease in the assayed polypeptide gene expression level compared to the standard expression level is indicative of aberrant expression.

[0396] The invention provides a diagnostic assay for diagnosing a cardiovascular disease or disorder, comprising (a) assaying the expression of the polypeptide of interest in cells or body fluid of an individual using one or more antibodies specific to the polypeptide interest and (b) comparing the level of gene expression with a standard gene expression level, whereby an increase or decrease in the assayed polypeptide gene expression level compared to the standard expression level is indicative of a particular cardiovascular disease or disorder. With respect to cancers of the cardiovascular system, the presence of a relatively high amount of transcript in biopsied tissue from an individual may indicate a predisposition for the development of the disease, or may provide a means for detecting the disease prior to the appearance of actual clinical symptoms. A more definitive diagnosis of this type may allow health professionals to employ preventative measures or aggressive treatment earlier thereby preventing the development or further progression of the cancer of the cardiovascular system.

[0397] Antibodies of the invention can be used to assay protein levels in a biological sample using classical immunohistological methods known to those of skill in the art (e.g., see Jalkanen et al., J. Cell. Biol. 101:976-985 (1985); Jalkanen et al., J. Cell . Biol. 105:3087-3096 (1987)). Other antibody-based methods useful for detecting protein gene expression include immunoassays, such as the enzyme linked immunosorbent assay (ELISA) and the radioimmunoassay (RIA). Suitable antibody assay labels are known in the art and include enzyme labels, such as, glucose oxidase; radioisotopes, such as iodine (125I, 121I), carbon (14C), sulfur (35S), tritium (3H), indium (112In), arid technetium (99Tc); luminescent labels, such as Iuminol; and fluorescent labels, such as fluorescein and rhodamine, and biotin.

[0398] One facet of the invention is the detection and diagnosis of a disease or disorder associated with aberrant expression of a polypeptide of interest in an animal, preferably a mammal and most preferably a human. In one embodiment, diagnosis comprises: a) administering (for example, parenterally, subcutaneously, or intraperitoneally) to a subject an effective amount of a labeled molecule which specifically binds to the polypeptide of interest; b) waiting for a time interval following the administering for permitting the labeled molecule to preferentially concentrate at sites in the subject where the polypeptide is expressed (and for unbound labeled molecule to be cleared to background level); c) determining background level; and d) detecting the labeled molecule in the subject, such that detection of labeled molecule above the background level indicates that the subject has a particular disease or disorder associated with aberrant expression of the polypeptide of interest. Background level can be determined by various methods including, comparing the amount of labeled molecule detected to a standard value previously determined for a particular system.

[0399] It will be understood in the art that the size of the subject and the imaging system used will determine the quantity of imaging moiety needed to produce diagnostic images. In the case of a radioisotope moiety, for a human subject, the quantity of radioactivity injected will normally range from about 5 to 20 millicuries of 99 mTc. The labeled antibody or antibody fragment will then preferentially accumulate at the location of cells which contain the specific protein. In vivo tumor imaging is described in S. W. Burchiel et al., “Immunopharmacokinetics of Radiolabeled Antibodies and Their Fragments.” (Chapter 13 in Tumor Imaging: The Radiochemical Detection of Cancer, S. W. Burchiel and B. A. Rhodes, eds., Masson Publishing Inc. (1982)).

[0400] Depending on several variables, including the type of label used and the mode of administration, the time interval following the administration for permitting the labeled molecule to preferentially concentrate at sites in the subject and for unbound labeled molecule to be cleared to background level is 6 to 48 hours or 6 to 24 hours or 6 to 12 hours. In another embodiment the time interval following administration is 5 to 20 days or 5 to 10 days.

[0401] In an embodiment, monitoring of the disease or disorder is carried out by repeating the method for diagnosing the disease or disease, for example, one month after initial diagnosis, six months after initial diagnosis, one year after initial diagnosis, etc.

[0402] Presence of the labeled molecule can be detected in the patient using methods known in the art for in vivo scanning. These methods depend upon the type of label used. Skilled artisans will be able to determine the appropriate method for detecting a particular label. Methods and devices that may be used in the diagnostic methods of the invention include, but are not limited to, computed tomography (CT), whole body scan such as position emission tomography (PET), magnetic resonance imaging (MRI), and sonography.

[0403] In a specific embodiment, the molecule is labeled with a radioisotope and is detected in the patient using a radiation responsive surgical instrument (Thurston et al., U.S. Pat. No. 5,441,050). In another embodiment, the molecule is labeled with a fluorescent compound and is detected in the patient using a fluorescence responsive scanning instrument. In another embodiment, the molecule is labeled with a positron emitting metal and is detected in the patent using positron emission-tomography. In yet another embodiment, the molecule is labeled with a paramagnetic label and is detected in a patient using magnetic resonance imaging (MRI).

Kits

[0404] The present invention provides kits that can be used in the above methods. In one embodiment, a kit comprises an antibody of the invention, preferably a purified antibody, in one or more containers. In a specific embodiment, the kits of the present invention contain a substantially isolated polypeptide comprising an epitope which is specifically immunoreactive with an antibody included in the kit. Preferably, the kits of the present invention further comprise a control antibody which does not react with the polypeptide of interest. In another specific embodiment, the kits of the present invention contain a means for detecting the binding of an antibody to a polypeptide of interest (e.g., the antibody may be conjugated to a detectable substrate such as a fluorescent compound, an enzymatic substrate, a radioactive compound or a luminescent compound, or a second antibody which recognizes the first antibody may be conjugated to a detectable substrate).

[0405] In another specific embodiment of the present invention, the kit is a diagnostic kit for use in screening serum containing antibodies specific against proliferative and/or cancerous polynucleotides and polypeptides. Such a kit may include a control antibody that does not react with the polypeptide of interest. Such a kit may include a substantially isolated polypeptide antigen comprising an epitope which is specifically immunoreactive with at least one anti-polypeptide antigen antibody. Further, such a kit includes means for detecting the binding of said antibody to the antigen (e.g., the antibody may be conjugated to a fluorescent compound such as fluorescein or rhodamine which can be detected by flow cytometry). In specific embodiments, the kit may include a recombinantly produced or chemically synthesized polypeptide antigen. The polypeptide antigen of the kit may also be attached to a solid support.

[0406] In a more specific embodiment the detecting means of the above-described kit includes a solid support to which said polypeptide antigen is attached. Such a kit may also include a non-attached reporter-labeled anti-human antibody. In this embodiment, binding of the antibody to the polypeptide antigen can be detected by binding of the said reporter-labeled antibody.

[0407] In an additional embodiment, the invention includes a diagnostic kit for use in screening serum containing antigens of the polypeptide of the invention. The diagnostic kit includes a substantially isolated antibody specifically immunoreactive with polypeptide or polynucleotide antigens, and means for detecting the binding of the polynucleotide or polypeptide antigen to the antibody. In one embodiment, the antibody is attached to a solid support. In a specific embodiment, the antibody may be a monoclonal antibody. The detecting means of the kit may include a second, labeled monoclonal antibody. Alternatively, or in addition, the detecting means may include a labeled, competing antigen.

[0408] In one diagnostic configuration, test serum is reacted with a solid phase reagent having a surface-bound antigen obtained by the methods of the present invention. After binding with specific antigen antibody to the reagent and removing unbound serum components by washing, the reagent is reacted with reporter-labeled anti-human antibody to bind reporter to the reagent in proportion to the amount of bound anti-antigen antibody on the solid support. The reagent is again washed to remove unbound labeled antibody, and the amount of reporter associated with the reagent is determined. Typically, the reporter is an enzyme which is detected by incubating the solid phase in the presence of a suitable fluorometric, luminescent or calorimetric substrate (Sigma, St. Louis, Mo.).

[0409] The solid surface reagent in the above assay is prepared by known techniques for attaching protein material to solid support material, such as polymeric beads, dip sticks, 96-well plate or filter material. These attachment methods generally include non-specific adsorption of the protein to the support or covalent attachment of the protein, typically through a free amine group, to a chemically reactive group on the solid support, such as an activated carboxyl, hydroxyl, or aldehyde group. Alternatively, streptavidin coated plates can be used in conjunction with biotinylated antigen(s).

[0410] Thus, the invention provides an assay system or kit for carrying out this diagnostic method. The kit generally includes a support with surface-bound recombinant antigens, and a reporter-labeled anti-human antibody for detecting surface-bound anti-antigen antibody.

Uses of the Polynucleotides

[0411] Each of the polynucleotides identified herein can be used in numerous ways as reagents. The following description should be considered exemplary and utilizes known techniques.

[0412] The polynucleotides of the present invention are useful for chromosome identification. There exists an ongoing need to identify new chromosome markers, since few chromosome marking reagents, based on actual sequence data (repeat polymorphisms), are presently available. Each sequence is specifically targeted to and can hybridize with a particular location on an individual human chromosome, thus each polynucleotide of the present invention can routinely be used as a chromosome marker using techniques known in the art. Table 1B, column 9 provides the chromosome location of some of the polynucleotides of the invention.

[0413] Briefly, sequences can be mapped to chromosomes by preparing PCR primers (preferably at least 15 bp (e.g., 15-25 bp) from the sequences shown in SEQ ID NO:X. Primers can optionally be selected using computer analysis so that primers do not span more than one predicted exon in the genomic DNA. These primers are then used for PCR screening of somatic cell hybrids containing individual human chromosomes. Only those hybrids containing the human gene corresponding to SEQ ID NO:X will yield an amplified fragment.

[0414] Similarly, somatic hybrids provide a rapid method of PCR mapping the polynucleotides to particular chromosomes. Three or more clones can be assigned per day using a single thermal cycler. Moreover, sublocalization of the polynucleotides can be achieved with panels of specific chromosome fragments. Other gene mapping strategies that can be used include in situ hybridization, prescreening with labeled flow-sorted chromosomes, preselection by hybridization to construct chromosome specific-cDNA libraries, and computer mapping techniques (See, e.g., Shuler, Trends Biotechnol 16:456-459 (1998) which is hereby incorporated by reference in its entirety).

[0415] Precise chromosomal location of the polynucleotides can also be achieved using fluorescence in situ hybridization (FISH) of a metaphase chromosomal spread. This technique uses polynucleotides as short as 500 or 600 bases; however, polynucleotides 2,000-4,000 bp are preferred. For a review of this technique, see Verma et al., “Human Chromosomes: a Manual of Basic Techniques,” Pergamon Press, New York (1988).

[0416] For chromosome mapping, the polynucleotides can be used individually (to mark a single chromosome or a single site on that chromosome) or in panels (for marking multiple sites and/or multiple chromosomes).

[0417] Thus, the present invention also provides a method for chromosomal localization which involves (a) preparing PCR primers from the polynucleotide sequences in Table 1B and/or Table 2 and SEQ ID NO:X and (b) screening somatic cell hybrids containing individual chromosomes.

[0418] The polynucleotides of the present invention would likewise be useful for radiation hybrid mapping, HAPPY mapping, and long range restriction mapping. For a review of these techniques and others known in the art, see, e.g. Dear, “Genome Mapping: A Practical Approach,” IRL Press at Oxford University Press, London (1997); Aydin, J. Mol. Med. 77:691-694 (1999); Hacia et al., Mol. Psychiatry 3:483-492 (1998); Herrick et al., Chromosome Res. 7:409-423 (1999); Hamilton et al., Methods Cell Biol. 62:265-280 (2000); and/or Ott, J. Hered. 90:68-70 (1999) each of which is hereby incorporated by reference in its entirety.

[0419] Once a polynucleotide has been mapped to a precise chromosomal location, the physical position of the polynucleotide can be used in linkage analysis. Linkage analysis establishes coinheritance between a chromosomal location and presentation of a particular disease. (Disease mapping data are found, for example, in V. McKusick, Mendelian Inheritance in Man (available on line through Johns Hopkins University Welch Medical Library)). Table 1B provides an OMIM reference identification number of diseases associated with the cytologic band disclosed in Table 1B, as determined using techniques described herein and by reference to Table 5. Assuming 1 megabase mapping resolution and one gene per 20 kb, a cDNA precisely localized to a chromosomal region associated with the disease could be one of 50-500 potential causative genes.

[0420] Thus, once coinheritance is established, differences in a polynucleotide of the invention and the corresponding gene between affected and unaffected individuals can be examined. First, visible structural alterations in the chromosomes, such as deletions or translocations, are examined in chromosome spreads or by PCR. If no structural alterations exist, the presence of point mutations are ascertained. Mutations observed in some or all affected individuals, but not in normal individuals, indicates that the mutation may cause the disease. However, complete sequencing of the polypeptide and the corresponding gene from several normal individuals is required to distinguish the mutation from a polymorphism. If a new polymorphism is identified, this polymorphic polypeptide can be used for further linkage analysis.

[0421] Furthermore, increased or decreased expression of the gene in affected individuals as compared to unaffected individuals can be assessed using the polynucleotides of the invention. Any of these alterations (altered expression, chromosomal rearrangement, or mutation) can be used as a diagnostic or prognostic marker. Diagnostic and prognostic methods, kits and reagents encompassed by the present invention are briefly described below and more thoroughly elsewhere herein (see e.g., the sections labeled “Antibodies”, “Diagnostic Assays”, and “Methods for Detecting Diseases”).

[0422] Thus, the invention also provides a diagnostic method useful during diagnosis of a disorder, involving measuring the expression level of polynucleotides of the present invention in cells or body fluid from an individual and comparing the measured gene expression level with a standard level of polynucleotide expression level, whereby an increase or decrease in the gene expression level compared to the standard is indicative of a disorder. Additional non-limiting examples of diagnostic methods encompassed by the present invention are more thoroughly described elsewhere herein (see, e.g., Example 12).

[0423] In still another embodiment, the invention includes a kit for analyzing samples for the presence of proliferative and/or cancerous polynucleotides derived from a test subject. In a general embodiment, the kit includes at least one polynucleotide probe containing a nucleotide sequence that will specifically hybridize with a polynucleotide of the invention and a suitable container. In a specific embodiment, the kit includes two polynucleotide probes defining an internal region of the polynucleotide of the invention, where each probe has one strand containing a 31′mer-end internal to the region. In a further embodiment, the probes may be useful as primers for polymerase chain reaction amplification.

[0424] Where a diagnosis of a related disorder, including, for example, diagnosis of a tumor, has already been made according to conventional methods, the present invention is useful as a prognostic indicator, whereby patients exhibiting enhanced or depressed polynucleotide of the invention expression will experience a worse clinical outcome relative to patients expressing the gene at a level nearer the standard level.

[0425] By “measuring the expression level of polynucleotides of the invention” is intended qualitatively or quantitatively measuring or estimating the level of the polypeptide of the invention or the level of the mRNA encoding the polypeptide of the invention in a first biological sample either directly (e.g., by determining or estimating absolute protein level or mRNA level) or relatively (e.g., by comparing to the polypeptide level or mRNA level in a second biological sample). Preferably, the polypeptide level or mRNA level in the first biological sample is measured or estimated and compared to a standard polypeptide level or mRNA level, the standard being taken from a second biological sample obtained from an individual not having the related disorder or being determined by averaging levels from a population of individuals not having a related disorder. As will be appreciated in the art, once a standard polypeptide level or mRNA level is known, it can be used repeatedly as a standard for comparison.

[0426] By “biological sample” is intended any biological sample obtained from an individual, body fluid, cell line, tissue culture, or other source which contains polypeptide of the present invention or the corresponding mRNA. As indicated, biological samples include body fluids (such as semen, lymph, vaginal pool, sera, plasma, urine, synovial fluid and spinal fluid) which contain the polypeptide of the present invention, and tissue sources found to express the polypeptide of the present invention. Methods for obtaining tissue biopsies and body fluids from mammals are well known in the art. Where the biological sample is to include mRNA, a tissue biopsy is the preferred source.

[0427] The method(s) provided above may preferably be applied in a diagnostic method and/or kits in which polynucleotides and/or polypeptides of the invention are attached to a solid support. In one exemplary method, the support may be a “gene chip” or a “biological chip” as described in U.S. Pat. Nos. 5,837,832, 5,874,219, and 5,856,174. Further, such a gene chip with polynucleotides of the invention attached may be used to identify polymorphisms between the isolated polynucleotide sequences of the invention, with polynucleotides isolated from a test subject The knowledge of such polymorphisms (i.e. their location, as well as, their existence) would be beneficial in identifying disease loci for many disorders, such as for example, in neural disorders, immune system disorders, muscular disorders, reproductive disorders, gastrointestinal disorders, pulmonary disorders, digestive disorders, metabolic disorders, cardiovascular disorders, renal disorders, proliferative disorders, and/or cancerous diseases and conditions. Such a method is described in U.S. Pat. Nos. 5,858,659 and 5,856,104. The US Patents referenced supra are hereby incorporated by reference in their entirety herein.

[0428] The present invention encompasses polynucleotides of the present invention that are chemically synthesized, or reproduced as peptide nucleic acids (PNA), or according to other methods known in the art The use of PNAs would serve as the preferred form if the polynucleotides of the invention are incorporated onto a solid support, or gene chip. For the purposes of the present invention, a peptide nucleic acid (PNA) is a polyamide type of DNA analog and the monomeric units for adenine, guanine, thymine and cytosine are available commercially (Perceptive Biosystems). Certain components of DNA, such as phosphorus, phosphorus oxides, or deoxyribose derivatives, are not present in PNAs. As disclosed by Nielsen et al., Science 254, 1497 (1991); and Egholm et al., Nature 365, 666 (1993), PNAs bind specifically and tightly to complementary DNA strands and are not degraded by nucleases. In fact, PNA binds more strongly to DNA than DNA itself does. This is probably because there is no electrostatic repulsion between the two strands, and also the polyamide backbone is more flexible. Because of this, PNA/DNA duplexes bind under a wider range of stringency conditions than DNA/DNA duplexes, making it easier to perform multiplex hybridization. Smaller probes can be used than with DNA due to the strong binding. In addition, it is more likely that single base mismatches can be determined with PNA/DNA hybridization because a single mismatch in a PNA/DNA 15-mer lowers the melting point (T.sub.m) by 8°-20° C., vs. 4°-16° C. for the DNA/DNA 15-mer duplex. Also, the absence of charge groups in PNA means that hybridization can be done at low ionic strengths and reduce possible interference by salt during the analysis.

[0429] The compounds of the present invention have uses which include, but are not limited to, detecting cancer in mammals. In particular the invention is useful during diagnosis of pathological cell proliferative neoplasias which include, but are not limited to: acute myelogenous leukemias including acute monocytic leukemia, acute myeloblastic leukemia, acute promyelocytic leukemia, acute myelomonocytic leukemia, acute erythroleukemia, acute megakaryocytic leukemia, and acute undifferentiated leukemia, etc.; and chronic myelogenous leukemias including chronic myelomonocytic leukemia, chronic granulocytic leukemia, etc. Preferred mammals include monkeys, apes, cats, dogs, cows, pigs, horses, rabbits and humans. Particularly preferred are humans.

[0430] Pathological cell proliferative disorders are often associated with inappropriate activation of proto-oncogenes. (Gelmann, E. P. et al., “The Etiology of Acute Leukemia: Molecular Genetics and Viral Oncology,” in Neoplastic Diseases of the Blood, Vol 1., Wiemik, P. H. et al. eds., 161-182 (1985)). Neoplasias are now believed to result from the qualitative alteration of a normal cellular gene product, or from the quantitative modification of gene expression by insertion into the chromosome of a viral sequence, by chromosomal translocation of a gene to a more actively transcribed region, or by some other mechanism. (Gelmann et al., supra) It is likely that mutated or altered expression of specific genes is involved in the pathogenesis of some leukemias, among other tissues and cell types. (Gelmann et al., supra). Indeed, the human counterparts of the oncogenes involved in some animal neoplasias have been amplified or translocated in some cases of human leukemia and carcinoma. (Gelmann et al., supra)

[0431] For example, c-myc expression is highly amplified in the non-lymphocytic leukemia cell line HL-60. When HL-60 cells are chemically induced to stop proliferation, the level of c-myc is found to be downregulated. (International Publication Number WO 91/15580). However, it has been shown that exposure of HL-60 cells to a DNA construct that is complementary to the 5′ end of c-myc or c-myb blocks translation of the corresponding mRNAs which downregulates expression of the c-myc or c-myb proteins and causes arrest of cell proliferation and differentiation of the treated cells. (International Publication Number WO 91/15580; Wickstrom et al., Proc. Natl. Acad. Sci. 85:1028 (1988); Anfossi et al., Proc. Natl. Acad. Sci. 86:3379 (1989)). However, the skilled artisan would appreciate the present invention's usefulness is not be limited to treatment, prevention, and/or prognosis of proliferative disorders of cells and tissues of hematopoietic origin, in light of the numerous cells and cell types of varying origins which are known to exhibit proliferative phenotypes.

[0432] In addition to the foregoing, a polynucleotide of the present invention can be used to control gene expression through triple helix formation or through antisense DNA or RNA. Antisense techniques are discussed, for example, in Okano, J. Neurochem. 56: 560 (1991); “Oligodeoxynucleotides as Antisense Inhibitors of Gene Expression, CRC Press, Boca Raton, Fla. (1988). Triple helix formation is discussed in, for instance Lee et al., Nucleic Acids Research 6: 3073 (1979); Cooney et al., Science 241:456 (1988); and Dervan et al., Science 251: 1360 (1991). Both methods rely on binding of the polynucleotide to a complementary DNA or RNA. For these techniques, preferred polynucleotides are usually oligonucleotides 20 to 40 bases in length and complementary to either the region of the gene involved in transcription (triple helix—see Lee et al., Nucl. Acids Res. 6:3073 (1979); Cooney et al., Science 241:456 (1988); and Dervan et al., Science 251:1360 (1991)) or to the mRNA itself (antisense—Okano, J. Neurochem. 56:560 (1991); Oligodeoxy-nucleotides as Antisense Inhibitors of Gene Expression, CRC Press, Boca Raton, Fla. (1988)). Triple helix formation optimally results in a shut-off of RNA transcription from DNA, while antisense RNA hybridization blocks translation of an mRNA molecule into polypeptide. The oligonucleotide described above can also be delivered to cells such that the antisense RNA or DNA may be expressed in vivo to inhibit production of polypeptide of the present invention antigens. Both techniques are effective in model systems, and the information disclosed herein can be used to design antisense or triple helix polynucleotides in an effort to treat disease, and in particular, for the treatment of proliferative diseases and/or conditions. Non-limiting antisense and triple helix methods encompassed by the present invention are more thoroughly described elsewhere herein (see, e.g., the section labeled “Antisense and Ribozyme (Antagonists)”).

[0433] Polynucleotides of the present invention are also useful in gene therapy. One goal of gene therapy is to insert a normal gene into an organism having a defective gene, in an effort to correct the genetic defect. The polynucleotides disclosed in the present invention offer a means of targeting such genetic defects in a highly accurate manner. Another goal is to insert a new gene that was not present in the host genome, thereby producing a new trait in the host cell. Additional non-limiting examples of gene therapy methods encompassed by the present invention are more thoroughly described elsewhere herein (see, e.g., the sections labeled “Gene Therapy Methods”, and Examples 16, 17 and 18).

[0434] The polynucleotides are also useful for identifying individuals from minute biological samples. The United States military, for example, is considering the use of restriction fragment length polymorphism (RFLP) for identification of its personnel. In this technique, an individual's genomic DNA is digested with one or more restriction enzymes, and probed on a Southern blot to yield unique bands for identifying personnel. This method does not suffer from the current limitations of “Dog Tags” which can be lost, switched, or stolen, making positive identification difficult. The polynucleotides of the present invention can be used as additional DNA markers for RFLP.

[0435] The polynucleotides of the present invention can also be used as an alternative to RFLP, by determining the actual base-by-base DNA sequence of selected portions of an individual's genome. These sequences can be used to prepare PCR primers for amplifying and isolating such selected DNA, which can then be sequenced. Using this technique, individuals can be identified because each individual will have a unique set of DNA sequences. Once an unique ID database is established for an individual, positive identification of that individual, living or dead, can be made from extremely small tissue samples.

[0436] Forensic biology also benefits from using DNA-based identification techniques as disclosed herein. DNA sequences taken from very small biological samples such as tissues, e.g., hair or skin, or body fluids, e.g., blood, saliva, semen, synovial fluid, amniotic fluid, breast milk, lymph, pulmonary sputum or surfactant, urine, fecal matter, etc., can be amplified using PCR. In one prior art technique, gene sequences amplified from polymorphic loci, such as DQa class II HLA gene, are used in forensic biology to identify individuals. (Erlich, H., PCR Technology, Freeman and Co. (1992)). Once these specific polymorphic loci are amplified, they are digested with one or more restriction enzymes, yielding an identifying set of bands on a Southern blot probed with DNA corresponding to the DQa class II HLA gene. Similarly, polynucleotides of the present invention can be used as polymorphic markers for forensic purposes.

[0437] There is also a need for reagents capable of identifying the source of a particular tissue. Such need arises, for example, in forensics when presented with tissue of unknown origin. Appropriate reagents can comprise, for example, DNA probes or primers prepared from the sequences of the present invention, specific to tissues, including but not limited to those shown in Table IB. Panels of such reagents can identify tissue by species and/or by organ type. In a similar fashion, these reagents can be used to screen tissue cultures for contamination. Additional non-limiting examples of such uses are further described herein.

[0438] The polynucleotides of the present invention are also useful as hybridization probes for differential identification of the tissue(s) or cell type(s) present in a biological sample. Similarly, polypeptides and antibodies directed to polypeptides of the present invention are useful to provide immunological probes for differential identification of the tissue(s) (e.g., immunohistochemistry assays) or cell type(s) (e.g., immunocytochemistry assays). In addition, for a number of disorders of the above tissues or cells, significantly higher or lower levels of gene expression of the polynucleotides/polypeptides of the present invention may be detected in certain tissues (e.g., tissues expressing polypeptides and/or polynucleotides of the present invention, for example, those disclosed in Table 1B, and/or cancerous and/or wounded tissues) or bodily fluids (e.g., semen, lymph, vaginal pool, serum, plasma, urine, synovial fluid or spinal fluid) taken from an individual having such a disorder, relative to a “standard” gene expression level, i.e., the expression level in healthy tissue from an individual not having the disorder.

[0439] Thus, the invention provides a diagnostic method of a disorder, which involves: (a) assaying gene expression level in cells or body fluid of an individual; (b) comparing the gene expression level with a standard gene expression level, whereby an increase or decrease in the assayed gene expression level compared to the standard expression level is indicative of a disorder.

[0440] In the very least, the polynucleotides of the present invention can be used as molecular weight markers on Southern gels, as diagnostic probes for the presence of a specific mRNA in a particular cell type, as a probe to “subtract-out” known sequences in the process of discovering novel polynucleotides, for selecting and making oligomers for attachment to a “gene chip” or other support, to raise anti-DNA antibodies using DNA immunization techniques, and as an antigen to elicit an immune response.

Uses of the Polypeptides

[0441] Each of the polypeptides identified herein can be used in numerous ways. The following description should be considered exemplary and utilizes known techniques.

[0442] Polypeptides and antibodies directed to polypeptides of the present invention are useful to provide immunological probes for differential identification of the tissue(s) (e.g., immunohistochemistry assays such as, for example, ABC immunoperoxidase (Hsu et al., J. Histochem. Cytochem. 29:577-580 (1981)) or cell type(s) (e.g., immunocytochemistry assays).

[0443] Antibodies can be used to assay levels of polypeptides encoded by polynucleotides of the invention in a biological sample using classical immunohistological methods known to those of skill in the art (e.g., see Jalkanen, et al., J. Cell. Biol. 101:976-985 (1985); Jalkanen, et al., J. Cell. Biol. 105:3087-3096 (1987)). Other antibody-based methods useful for detecting protein gene expression include immunoassays, such as the enzyme linked immunosorbent assay (ELISA) and the radioimmunoassay (RIA). Suitable antibody assay labels are known in the art and include enzyme labels, such as, glucose oxidase; radioisotopes, such as iodine (¹³¹I, ¹²⁵I, ¹²³I, ¹²¹I), carbon (¹⁴C), sulfur (³⁵S), tritium (³H), indium (^{115m}In, ^{113m}In, ¹¹²In, ¹¹¹In), and technetium (⁹⁹Tc, ^{99m}Tc), thallium (²⁰¹Ti), gallium (⁶⁸Ga, ⁶⁷Ga), palladium (¹⁰³Pd), molybdenum (⁹⁹Mo), xenon (¹³³Xe), fluorine (¹⁸F), ¹⁵³Sm, ¹⁷⁷Lu, ¹⁵⁹Gd, ¹⁴⁹Pm, ¹⁴⁰La, ⁷⁵Yb, ¹⁶⁶Ho, ⁹⁰Y, ⁴⁷Sc, ¹⁸⁶Re, ¹⁸⁸Re, ¹⁴²Pr, ¹⁰⁵Rh, ⁹⁷Ru; luminescent labels, such as luminol; and fluorescent labels, such as fluorescein and rhodamine, and biotin.

[0444] In addition to assaying levels of polypeptide of the present invention in a biological sample, proteins can also be detected in vivo by imaging. Antibody labels or markers for in vivo imaging of protein include those detectable by X-radiography, NMR or ESR. For X-radiography, suitable labels include radioisotopes such as barium or cesium, which emit detectable radiation but are not overtly harmful to the subject. Suitable markers for NMR and ESR include those with a detectable characteristic spin, such as deuterium, which may be incorporated into the antibody by labeling of nutrients for the relevant hybridoma.

[0445] A protein-specific antibody or antibody fragment which has been labeled with an appropriate detectable imaging moiety, such as a radioisotope (for example, ¹³¹I, ¹¹²In, ^{99m}Tc, (131I, ¹²⁵I, ¹²³I, ¹²¹I), carbon (¹⁴C), sulfur (³⁵S), tritium (³H), indium (^{115m}In, ^{113m}In, ¹¹²In, ¹¹¹In), and technetium (⁹⁹Tc, ^{99m}Tc), thallium (²⁰¹Ti), gallium (⁶⁸Ga, ⁶⁷Ga), palladium (¹⁰³Pd), molybdenum (⁹⁹Mo), xenon (¹³³Xe), fluorine (¹⁸F, ¹⁵³Sm, ¹⁷⁷Lu, ¹⁵⁹Gd, ¹⁴⁹Pm, ¹⁴⁰L, ¹⁷⁵Yb, ¹⁶⁶Ho, ⁹⁰Y, ⁴⁷Sc, ¹⁸⁶Re, ¹⁸⁸Re, ¹⁴²Pr, ⁹⁷Ru), a radio-opaque substance, or a material detectable by nuclear magnetic resonance, is introduced (for example, parenterally, subcutaneously or intraperitoneally) into the mammal to be examined for immune system disorder. It will be understood in the art that the size of the subject and the imaging system used will determine the quantity of imaging moiety needed to produce diagnostic images. In the case of a radioisotope moiety, for a human subject, the quantity of radioactivity injected will normally range from about 5 to 20 millicuries of ^{99m}Tc. The labeled antibody or antibody fragment will then preferentially accumulate at the location of cells which express the polypeptide encoded by a polynucleotide of the invention. In vivo tumor imaging is described in S. W. Burchiel et al., “Immunopharmacokinetics of Radiolabeled Antibodies and Their Fragments” (Chapter 13 in Tumor Imaging: The Radiochemical Detection of Cancer, S. W. Burchiel and B. A. Rhodes, eds., Masson Publishing Inc. (1982)).

[0446] In one embodiment, the invention provides a method for the specific delivery of compositions of the invention to cells by administering polypeptides of the invention (e.g., polypeptides encoded by polynucleotides of the invention and/or antibodies) that are associated with heterologous polypeptides or nucleic acids. In one example, the invention provides a method for delivering a therapeutic protein into the targeted cell. In another example, the invention provides a method for delivering a single stranded nucleic acid (e.g., antisense or ribozymes) or double stranded nucleic acid (e.g., DNA that can integrate into the cell's genome or replicate episomally and that can be transcribed) into the targeted cell.

[0447] In another embodiment, the invention provides a method for the specific destruction of cells (e.g., the destruction of tumor cells) by administering polypeptides of the invention in association with toxins or cytotoxic prodrugs.

[0448] By “toxin” is meant one or more compounds that bind and activate endogenous cytotoxic effector systems, radioisotopes, holotoxins, modified toxins, catalytic subunits of toxins, or any molecules or enzymes not normally present in or on the surface of a cell that under defined conditions cause the cell's death. Toxins that may be used according to the methods of the invention include, but are not limited to, radioisotopes known in the art, compounds such as, for example, antibodies (or complement fixing containing portions thereof) that bind an inherent or induced endogenous cytotoxic effector system, thymidine kinase, endonuclease, RNAse, alpha toxin, ricin, abrin, Pseudomonas exotoxin A, diphtheria toxin, saporin, momordin, gelonin, pokeweed antiviral protein, alpha-sarcin and cholera toxin. “Toxin” also includes a cytostatic or cytocidal agent, a therapeutic agent or a radioactive metal ion, e.g., alpha-emitters such as, for example, ²¹³Bi, or other radioisotopes such as, for example, ¹⁰³Pd, ¹³³Xe, ¹³¹I, ⁶⁸Ge, ⁵⁷Co, ⁶⁵Zn, ⁸⁵Sr, ³²P, ³⁵S, ⁹⁰Y, ¹⁵³Gd, ¹⁶⁹Yb, ⁵¹Cr, ⁵⁴Mn, ⁷⁵Se, ¹¹³Sn, ⁹⁰Yttrium, ¹¹⁷Tin, ¹⁸⁶Rhenium, ¹⁶⁶Holmium, ¹⁸⁸Rhenium; luminescent labels, such as luminol; and fluorescent labels, such as fluorescein and rhodamine, and biotin. In a specific embodiment, the invention provides a method for the specific destruction of cells (e.g., the destruction of tumor cells) by administering polypeptides of the invention or antibodies of the invention in association with the radioisotope ⁹⁰Y. In another specific embodiment, the invention provides a method for the specific destruction of cells (e.g., the destruction of tumor cells) by administering polypeptides of the invention or antibodies of the invention in association with the radioisotope ¹¹¹In. In a further specific embodiment, the invention provides a method for the specific destruction of cells (e.g., the destruction of tumor cells) by administering polypeptides of the invention or antibodies of the invention in association with the radioisotope ¹³¹I.

[0449] Techniques known in the art may be applied to label polypeptides of the invention (including antibodies). Such techniques include, but are not limited to, the use of bifunctional conjugating agents (see e.g., U.S. Pat. Nos. 5,756,065; 5,714,631; 5,696,239; 5,652,361; 5,505,931; 5,489,425; 5,435,990; 5,428,139; 5,342,604; 5,274,119; 4,994,560; and 5,808,003; the contents of each of which are hereby incorporated by reference in its entirety).

[0450] Thus, the invention provides a diagnostic method of a disorder, which involves (a) assaying the expression level of a polypeptide of the present invention in cells or body fluid of an individual; and (b) comparing the assayed polypeptide expression level with a standard polypeptide expression level, whereby an increase or decrease in the assayed polypeptide expression level compared to the standard expression level is indicative of a disorder. With respect to cancer, the presence of a relatively high amount of transcript in biopsied tissue from an individual may indicate a predisposition for the development of the disease, or may provide a means for detecting the disease prior to the appearance of actual clinical symptoms. A more definitive diagnosis of this type may allow health professionals to employ preventative measures or aggressive treatment earlier thereby preventing the development or further progression of the cancer.

[0451] Moreover, polypeptides of the present invention can be used to treat or prevent diseases or conditions such as, for example, neural disorders, immune system disorders, muscular disorders, reproductive disorders, gastrointestinal disorders, pulmonary disorders, cardiovascular disorders, renal disorders, proliferative disorders, and/or cancerous diseases and conditions. For example, patients can be administered a polypeptide of the present invention in an effort to replace absent or decreased levels of the polypeptide (e.g., insulin), to supplement absent or decreased levels of a different polypeptide (e.g., hemoglobin S for hemoglobin B, SOD, catalase, DNA repair proteins), to inhibit the activity of a polypeptide (e.g., an oncogene or tumor supressor), to activate the activity of a polypeptide (e.g., by binding-to a receptor), to reduce the activity of a membrane bound receptor by competing with it for free ligand (e.g., soluble TNF receptors used in reducing inflammation), or to bring about a desired response (e.g., blood vessel growth inhibition, enhancement of the immune response to proliferative cells or tissues).

[0452] Similarly, antibodies directed to a polypeptide of the present invention can also be used to treat disease (as described supra, and elsewhere herein). For example, administration of an antibody directed to a polypeptide of the present invention can bind, and/or neutralize the polypeptide, and/or reduce overproduction of the polypeptide. Similarly, administration of an antibody can activate the polypeptide, such as by binding to a polypeptide bound to a membrane (receptor).

[0453] At the very least, the polypeptides of the present invention can be used as molecular weight markers on SDS-PAGE gels or on molecular sieve gel filtration columns using methods well known to those of skill in the art. Polypeptides can also be used to raise antibodies, which in turn are used to measure protein expression from a recombinant cell, as a way of assessing transformation of the host cell. Moreover, the polypeptides of the present invention can be used to test the biological activities described herein.

Diagnostic Assays

[0454] The compounds of the present invention are useful for diagnosis, treatment, prevention and/or prognosis of various disorders in mammals, preferably humans. Such disorders include, but are not limited to, those related to biological activities described in Table 1D and, also as described herein under the section heading “Biological Activities”.

[0455] For a number of disorders, substantially altered (increased or decreased) levels of gene expression can be detected in tissues, cells or bodily fluids (e.g., sera, plasma, urine, semen, synovial fluid or spinal fluid) taken from an individual having such a disorder, relative to a “standard” gene expression level, that is, the expression level in tissues or bodily fluids from an individual not having the disorder. Thus, the invention provides a diagnostic method useful during diagnosis of a disorder, which involves measuring the expression level of the gene encoding the polypeptide in tissues, cells or body fluid from an individual and comparing the measured gene expression level with a standard gene expression level, whereby an increase or decrease in the gene expression level(s) compared to the standard is indicative of a disorder. These diagnostic assays may be performed in vivo or in vitro, such as, for example, on blood samples, biopsy tissue or autopsy tissue.

[0456] The present invention is also useful as a prognostic indicator, whereby patients exhibiting enhanced or depressed gene expression will experience a worse clinical outcome relative to patients expressing the gene at a level nearer the standard level.

[0457] In certain embodiments, a polypeptide of the invention, or polynucleotides, antibodies, agonists, or antagonists corresponding to that polypeptide, may be used to diagnose and/or prognosticate diseases and/or disorders associated with the tissue(s) in which the polypeptide of the invention is expressed, including one, two, three, four, five, or more tissues disclosed in Table 1B.2 (Tissue Distribution Library Code).

[0458] By “assaying the expression level of the gene encoding the polypeptide” is intended qualitatively or quantitatively measuring or estimating the level of the polypeptide of the invention or the level of the MRNA encoding the polypeptide of the invention in a first biological sample either directly (e.g., by determining or estimating absolute protein level or mRNA level) or relatively (e.g., by comparing to the polypeptide level or mRNA level in a second biological sample). Preferably, the polypeptide expression level or mRNA level in the first biological sample is measured or estimated and compared to a standard polypeptide level or MRNA level, the standard being taken from a second biological sample obtained from an individual not having the disorder or being determined by averaging levels from a population of individuals not having the disorder. As will be appreciated in the art, once a standard polypeptide level or mRNA level is known, it can be used repeatedly as a standard for comparison.

[0459] By “biological sample” is intended any biological sample obtained from an individual, cell line, tissue culture, or other source containing polypeptides of the invention (including portions thereof) or mRNA. As indicated, biological samples include body fluids (such as sera, plasma, urine, synovial fluid and spinal fluid) and tissue sources found to express the full length or fragments thereof of a polypeptide or mRNA. Methods for obtaining tissue biopsies and body fluids from mammals are well known in the art. Where the biological sample is to include mRNA, a tissue biopsy is the preferred source.

[0460] Total cellular RNA can be isolated from a biological sample using any suitable technique such as the single-step guanidinium-thiocyanate-phenol-chloroform method described in Chomczynski and Sacchi, Anal. Biochem. 162:156-159 (1987). Levels of mRNA encoding the polypeptides of the invention are then assayed using any appropriate method. These include Northern blot analysis, S1 nuclease mapping, the polymerase chain reaction (PCR), reverse transcription in combination with the polymerase chain reaction (RT-PCR), and reverse transcription in combination with the ligase chain reaction (RT-LCR).

[0461] The present invention also relates to diagnostic assays such as quantitative and diagnostic assays for detecting levels of polypeptides of the invention, in a biological sample (e.g., cells and tissues), including determination of normal and abnormal levels of polypeptides. Thus, for instance, a diagnostic assay in accordance with the invention for detecting over-expression of polypeptides of the invention compared to normal control tissue samples may be used to detect the presence of tumors. Assay techniques that can be used to determine levels of a polypeptide, such as a polypeptide of the present invention in a sample derived from a host are well-known to those of skill in the art. Such assay methods include radioimmunoassays, competitive-binding assays, Western Blot analysis and ELISA assays. Assaying polypeptide levels in a biological sample can occur using any art-known method.

[0462] Assaying polypeptide levels in a biological sample can occur using antibody-based techniques. For example, polypeptide expression in tissues can be studied with classical immunohistological methods (Jalkanen et al., J. Cell. Biol. 101:976-985 (1985); Jalkanen, M., et al., J. Cell. Biol. 105:3087-3096 (1987)). Other antibody-based methods useful for detecting polypeptide gene expression include immunoassays, such as the enzyme linked immunosorbent assay (ELISA) and the radioimmunoassay (RLA). Suitable antibody assay labels are known in the art and include enzyme labels, such as, glucose oxidase, and radioisotopes, such as iodine (¹²⁵I, ¹²¹I), carbon (¹⁴C), sulfur (35S), tritium (³H), indium (¹¹² In), and technetium (^{99m}c), and fluorescent labels, such as fluorescein and rhodamine, and biotin.

[0463] The tissue or cell type to be analyzed will generally include those which are known, or suspected, to express the gene of inteest (such as, for example, cancer). The protein isolation methods employed herein may, for example, be such as those described in Harlow and Lane (Harlow, E. and Lane, D., 1988, “Antibodies: A Laboratory Manual”, Cold Spring Harbor Laboratory Press, Cold Spring Harbor, N.Y.), which is incorporated herein by reference in its entirety. The isolated cells can be derived from cell culture or from a patient. The analysis of cells taken from culture may be a necessary step in the assessment of cells that could be used as part of a cell-based gene therapy technique or, alternatively, to test the effect of compounds on the expression of the gene.

[0464] For example, antibodies, or fragments of antibodies, such as those described herein, may be used to quantitatively or qualitatively detect the presence of gene products or conserved variants or peptide fragments thereof. This can be accomplished, for example, by immunofluorescence techniques employing a fluorescently labeled antibody coupled with light microscopic, flow cytometric, or fluorimetric detection.

[0465] In a preferred embodiment, antibodies, or fragments of antibodies directed to any one or all of the predicted epitope domains of the polypeptides of the invention (shown in Table 1B) may be used to quantitatively or qualitatively detect the presence of gene products or conserved variants or peptide fragments thereof This can be accomplished, for example, by immunofluorescence techniques employing a fluorescently labeled antibody coupled with light microscopic, flow cytometric, or fluorimetric detection.

[0466] In an additional preferred embodiment, antibodies, or fragments of antibodies directed to a conformational epitope of a polypeptide of the invention may be used to quantitatively or qualitatively detect the presence of gene products or conserved variants or peptide fragments thereof. This can be accomplished, for example, by immunofluorescence techniques employing a fluorescently labeled antibody coupled with light microscopic, flow cytometric, or fluorimetric detection.

[0467] The antibodies (or fragments thereof), and/or polypeptides of the present invention may, additionally, be employed histologically, as in immunofluorescence, immunoelectron microscopy or non-immunological assays, for in situ detection of gene products or conserved variants or peptide fragments thereof In situ detection may be accomplished by removing a histological specimen from a patient, and applying thereto a labeled antibody or polypeptide of the present invention. The antibody (or fragment thereof) or polypeptide is preferably applied by overlaying the labeled antibody (or fragment) onto a biological sample. Through the use of such a procedure, it is possible to determine not only the presence of the gene product, or conserved variants or peptide fragments, or polypeptide binding, but also its distribution in the examined tissue. Using the present invention, those of ordinary skill will readily perceive that any of a wide variety of histological methods (such as staining procedures) can be modified in order to achieve such in situ detection.

[0468] Immunoassays and non-immunoassays for gene products or conserved variants or peptide fragments thereof will typically comprise incubating a sample, such as a biological fluid, a tissue extract, freshly harvested cells, or lysates of cells which have been incubated in cell culture, in the presence of a detectably labeled antibody capable of binding gene products or conserved variants or peptide fragments thereof, and detecting the bound antibody by any of a number of techniques well-known in the art.

[0469] The biological sample may be brought in contact with and immobilized onto a solid phase support or carrier such as nitrocellulose, or other solid support which is capable of immobilizing cells, cell particles or soluble proteins. The support may then be washed with suitable buffers followed by treatment with the detectably labeled antibody or detectable polypeptide of the invention. The solid phase support may then be washed with the buffer a second time to remove unbound antibody or polypeptide. Optionally the antibody is subsequently labeled. The amount of bound label on solid support may then be detected by conventional means.

[0470] By “solid phase support or carrier” is intended any support capable of binding an antigen or an antibody. Well-known supports or carriers include glass, polystyrene, polypropylene, polyethylene, dextran, nylon, amylases, natural and modified celluloses, polyacrylamides, gabbros, and magnetite. The nature of the carrier can be either soluble to some extent or insoluble for the purposes of the present invention. The support material may have virtually any possible structural configuration so long as the coupled molecule is capable of binding to an antigen or antibody. Thus, the support configuration may be spherical, as in a bead, or cylindrical, as in the inside surface of a test tube, or the external surface of a rod. Alternatively, the surface may be flat such as a sheet, test strip, etc. Preferred supports include polystyrene beads. Those skilled in the art will know many other suitable carriers for binding antibody or antigen, or will be able to ascertain the same by use of routine experimentation.

[0471] The binding activity of a given lot of antibody or antigen polypeptide may be determined according to well known methods. Those skilled in the art will be able to determine operative and optimal assay conditions for each determination by employing routine experimentation.

[0472] In addition to assaying polypeptide levels or polynucleotide levels in a biological sample obtained from an individual, polypeptide or polynucleotide can also be detected in vivo by imaging. For example, in one embodiment of the invention, polypeptides and/or antibodies of the invention are used to image diseased cells, such as neoplasms. In another embodiment, polynucleotides of the invention (e.g., polynucleotides complementary to all or a portion of an mRNA) and/or antibodies (e.g., antibodies directed to any one or a combination of the epitopes of a polypeptide of the invention, antibodies directed to a conformational epitope of a polypeptide of the invention, or antibodies directed to the full length polypeptide expressed on the cell surface of a mammalian cell) are used to image diseased or neoplastic cells.

[0473] Antibody labels or markers for in vivo imaging of polypeptides of the invention include those detectable by X-radiography, NMR, MRI, CAT-scans or ESR. For X-radiography, suitable labels include radioisotopes such as barium or cesium, which emit detectable radiation but are not overtly harmful to the subject. Suitable markers for NMR and ESR include those with a detectable characteristic spin, such as deuterium, which may be incorporated into the antibody by labeling of nutrients for the relevant hybridoma. Where in vivo imaging is used to detect enhanced levels of polypeptides for diagnosis in humans, it may be preferable to use human antibodies or “humanized” chimeric monoclonal antibodies. Such antibodidies can be produced using techniques described herein or otherwise known in the art. For example methods for producing chimeric antibodies are known in the art. See, for review, Morrison, Science 229:1202 (1985); Oi et al., BioTechniques 4:214 (1986); Cabilly et al., U.S. Pat. No. 4,816,567; Taniguchi et al., EP 171496; Morrison et al., EP 173494; Neuberger et al., WO 8601533; Robinson et al., WO 8702671; Boulianne et al., Nature 312:643 (1984); Neuberger et al., Nature 314:268 (1985).

[0474] Additionally, any polypeptides of the invention whose presence can be detected, can be administered. For example, polypeptides of invention labeled with a radio-opaque or other appropriate compound can be administered and visualized in vivo, as discussed, above for labeled antibodies. Further, such polypeptides can be utilized for in vitro diagnostic procedures.

[0475] A polypeptide-specific antibody or antibody fragment which has been labeled with an appropriate detectable imaging moiety, such as radioisotope (for example, ¹³¹I, ¹²¹In, ^{99m}Tc), a radio-opaque substance, or a material detectable by nuclear magnetic resonance, is introduced (for example, parenterally, subcutaneously or intraperitoneally) into the mammal to be examined for a disorder. It will be understood in the art that the size of the subject and the imaging system used will determine the quantity of imaging moiety needed to produce diagnostic images. In the case of a radioisotope moiety, for a human subject, the quantity of radioactivity injected will normally range from about 5 to 20 millicuries of ^{99m}Tc. The labeled antibody or antibody fragment will then preferentially accumulate at the location of cells which contain the antigenic protein. In vivo tumor imaging is described in S. W. Burchiel et al., “Immunopharmacokinetics of Radiolabeled Antibodies and Their Fragments” (Chapter 13 in Tumor Imaging: The Radiochemical Detection of Cancer, S. W. Burchiel and B. A. Rhodes, eds., Masson Publishing Inc. (1982)).

[0476] With respect to antibodies, one of the ways in which an antibody of the present invention can be delectably labeled is by linking the same to a reporter enzyme and using the linked product in an enzyme immunoassay (EIA) (Voller, A., “The Enzyme Linked Immunosorbent Assay (ELISA)”, 1978, Diagnostic Horizons 2:1-7, Microbiological Associates Quarterly Publication, Walkersville, Md.); Voller et al., J. Clin. Pathol. 31:507-520 (1978); Butler, J. E., Meth. Enymol. 73:482-523 (1981); Maggio, E. (ed.), 1980, Enzyme Immunoassay, CRC Press, Boca Raton, Fla.; Ishikawa, E. et al., (eds.), 1981, Enzyme Immunoassay, Kgaku Shoin, Tokyo). The reporter enzyme which is bound to the antibody will react with an appropriate substrate, preferably a chromogenic substrate, in such a manner as to produce a chemical moiety which can be detected, for example, by spectrophotometric, fluorimetric or by visual means. Reporter enzymes which can be used to delectably label the antibody include, but are not limited to, malate dehydrogenase, staphylococcal nuclease, delta-5-steroid isomerase, yeast alcohol dehydrogenase, alpha-glycerophosphate, dehydrogenase, triose phosphate isomerase, horseradish peroxidase, alkaline phosphatase, asparaginase, glucose oxidase, beta-galactosidase, ribonuclease, urease, catalase, glucose-6-phosphate dehydrogenase, glucoamylase and acetylcholinesterase. Additionally, the detection can be accomplished by colorimetric methods which employ a chromogenic substrate for the reporter enzyme. Detection may also be accomplished by visual comparison of the extent of enzymatic reaction of a substrate in comparison with similarly prepared standards.

[0477] Detection may also be accomplished using any of a variety of other immunoassays. For example, by radioactively labeling the antibodies or antibody fragments, it is possible to detect polypeptides through the use of a radioimmunoassay (RIA) (see, for example, Weintraub, B., Principles of Radioimmunoassays, Seventh Training Course on Radioligand Assay Techniques, The Endocrine Society, March, 1986, which is incorporated by reference herein). The radioactive isotope can be detected by means including, but not limited to, a gamma counter, a scintillation counter, or autoradiography.

[0478] It is also possible to label the antibody with a fluorescent compound. When the fluorescently labeled antibody is exposed to light of the proper wave length, its presence can then be detected due to fluorescence. Among the most commonly used fluorescent labeling compounds are fluorescein isothiocyanate, rhodamine, phycoerythrin, phycocyanin, allophycocyanin, ophthaldehyde and fluorescamine.

[0479] The antibody can also be detectably labeled using fluorescence emitting metals such as ¹⁵²Eu, or others of the lanthanide series. These metals can be attached to the antibody using such metal chelating groups as diethylenetriaminepentacetic acid (DTPA) or ethylenediaminetetraacetic acid (EDTA).

[0480] The antibody also can be detectably labeled by coupling it to a chemiluminescent compound. The presence of the chemiluminescent-tagged antibody is then determined by detecting the presence of luminescence that arises during the course of a chemical reaction. Examples of particularly useful chemiluminescent labeling compounds are luminol, isoluminol, theromatic acridinium ester, imidazole, acridinium salt and oxalate ester.

[0481] Likewise, a bioluminescent compound may be used to label the antibody of the present invention. Bioluminescence is a type of chemiluminescence found in biological systems in, which a catalytic protein increases the efficiency of the chemiluminescent reaction. The presence of a bioluminescent protein is determined by detecting the presence of luminescence. Important bioluminescent compounds for purposes of labeling are luciferin, luciferase and acquorin.

Methods for Detecting Diseases

[0482] In general, a disease may be detected in a patient based on the presence of one or more proteins of the invention and/or polynucleotides encoding such proteins in a biological sample (for example, blood, sera, urine, and/or tumor biopsies) obtained from the patient. In other words, such proteins may be used as markers to indicate the presence or absence of a disease or disorder, including cancer and/or as described elsewhere herein. In addition, such proteins may be useful for the detection of other diseases and cancers. The binding agents provided herein generally permit detection of the level of antigen that binds to the agent in the biological sample. Polynucleotide primers and probes may be used to detect the level of mRNA encoding polypeptides of the invention, which is also indicative of the presence or absence of a disease or disorder, including cancer. In general, polypeptides of the invention should be present at a level that is at least three fold higher in diseased tissue than in normal tissue.

[0483] There are a variety of assay formats known to those of ordinary skill in the art for using a binding agent to detect polypeptide markers in a sample. See, e.g., Harlow and Lane, supra. In general, the presence or absence of a disease in a patient may be determined by (a) contacting a biological sample obtained from a patient with a binding agent; (b) detecting in the sample a level of polypeptide that binds to the binding agent; and (c) comparing the level of polypeptide with a predetermined cut-off value.

[0484] In a preferred embodiment, the assay involves the use of a binding agent(s) immobilized on a solid support to bind to and remove the polypeptide of the invention from the remainder of the sample. The bound polypeptide may then be detected using a detection reagent that contains a reporter group and specifically binds to the binding agent/polypeptide complex. Such detection reagents may comprise, for example, a binding agent that specifically binds to the polypeptide or an antibody or other agent that specifically binds to the binding agent, such as an anti-imimunoglobulin, protein G, protein A or a lectin. Alternatively, a competitive assay may be utilized, in which a polypeptide is labeled with a reporter group and allowed to bind to the immobilized binding agent after incubation of the binding agent with the sample. The extent to which components of the sample inhibit the binding of the labeled polypeptide to the binding agent is indicative of the reactivity of the sample with the immobilized binding agent. Suitable polypeptides for use within such assays include polypeptides of the invention and portions thereof, or antibodies, to which the binding agent binds, as described above.

[0485] The solid support may be any material known to those of skill in the art to which polypeptides of the invention may be attached. For example, the solid support may be a test well in a microtiter plate or a nitrocellulose or other suitable membrane. Alternatively, the support may be a bead or disc, such as glass fiberglass, latex or a plastic material such as polystyrene or polyvinylchloride. The support may also be a magnetinetic particle or a fiber optic sensor, such as those disclosed, for example, in U.S. Pat. No. 5,359,681. The binding agent may be immobilized on the solid support using a variety of techniques known to those of skill in the art, which are amply described in the patent and scientific literature. In the context of the present invention, the term “immobilization” refers to both noncovalent association, such as adsorption, and covalent attachment (which may be a direct linkage between the agent and functional groups on the support or may be a linkage by way of a cross-linking agent). Immobilization by adsorption to a well in a microtiter plate or to a membrane is preferred. In such cases, adsorption may be achieved by contacting the binding agent, in a suitable buffer, with the solid support for the suitable amount of time. The contact time varies with temperature, but is typically between about 1 hour and about 1 day. In general, contacting a well of plastic microtiter plate (such as polystyrene or polyvinylchloride) with an amount of binding agent ranging from about 10 ng to about 10 ug, and preferably about 100 ng to about 1 ug, is sufficient to immobilize an adequate amount of binding agent.

[0486] Covalent attachment of binding agent to a solid support may generally be achieved by first reacting the support with a bifunctional reagent that will react with both the support and a functional group, such as a hydroxyl or amino group, on the binding agent. For example, the binding agent may be covalently attached to supports having an appropriate polymer coating using benzoquinone or by condensation of an aldehyde group on the support with an amine and an active hydrogen on the binding partner (see, e.g., Pierce Immunotechnology Catalog and Handbook, 1991, at A12-A13).

Gene Therapy Methods

[0487] Also encompassed by the invention are gene therapy methods for treating or preventing disorders, diseases and conditions. The gene therapy methods relate to the introduction of nucleic acid (DNA, RNA and antisense DNA or RNA) sequences into an animal to achieve expression of the polypeptide of the present invention. This method requires a polynucleotide which codes for a polypeptide of the present invention operatively linked to a promoter and any other genetic elements necessary for the expression of the polypeptide by the target tissue. Such gene therapy and delivery techniques are known in the art, see, for example, WO90/11092, which is herein incorporated by reference.

[0488] Thus, for example, cells from a patient may be engineered with a polynucleotide (DNA or RNA) comprising a promoter operably linked polynucleotide of the present invention ex vivo, with the engineered cells then being provided to a patient to be treated with the polypeptide of the present invention. Such methods are well-known in the art. For example, see Belldegrun, A., et al., J. Natl. Cancer Inst. 85: 207-216 (1993); Ferrantini, M. et al., Cancer Research 53: 1107-1112 (1993); Ferrantini, M. et al., J. Immunology 153: 4604-4615 (1994); Kaido, T., et al., Int. J. Cancer 60: 221-229 (1995); Ogura, H., et al., Cancer Research 50: 5102-5106 (1990); Santodonato, L., et al., Human Gene Therapy 7:1-10 (1996); Santodonato, L., et al., Gene Therapy 4:1246-1255 (1997); and Zhang, J.-F. et al., Cancer Gene Therapy 3: 31-38 (1996)), which are herein incorporated by reference. In one embodiment, the cells which are engineered are arterial cells. The arterial cells may be reintroduced into the patient through direct injection to the artery, the tissues surrounding the artery, or through catheter injection.

[0489] As discussed in more detail below, the polynucleotide constructs can be delivered by any method that delivers injectable materials cells of an animal, such as, injection into the interstitial space of tissues (heart, muscle, skin, lung, liver, and the like). The polynucleotide constructs may be delivered in a pharmaceutically acceptable liquid or aqueous carrier.

[0490] In one embodiment, the polynucleotide of the present invention is delivered as a naked polynucleotide. The term 37 naked” polynucleotide, DNA or RNA refers to sequences that are free from any delivery vehicle that acts to assist, promote or facilitate entry into the cell, including viral sequences, viral particles, liposome formulations, lipofectin or precipitating agents and the like. However, the polynucleotide of the present invention can also be delivered in liposome formulations and lipofectin formulations and the like can be prepared by methods well known to those skilled in the art. Such methods are described, for example, in U.S. Pat. Nos. 5,593,972, 5,589,466, and 5,580,859, which are herein incorporated by reference.

[0491] The polynucleotide vector constructs used in the gene therapy method are preferably constructs that will not integrate into the host geonome nor will they contain sequences that allow for replication. Appropriate vectors include pWLNEO, pSV2CAT, pOG44, pXTI and pSG available from Stratagene; pSVK3, pBPV, pMSG and pSVL available from Pharmacia; and pEFI/V5, pcDNA3.1, and pRc/CMV2 available from Invitrogen. Other suitable vectors will be readily apparent to the skilled artisan.

[0492] Any strong promoter known to those skilled in the art can be used for driving the expression of the polynucleotide sequence. Suitable promoters include adenoviral promoters, such as the adenoviral major late promoter; or heterologous promoters, such as the cytomegalovirus (CMV) promoter; the respiratory syncytial virus (RSV) promoter; inducible promoters, such as the MMT promoter, the metallothionein promoter; heat shock promoters; the albumin promoter; the ApoAI promoter; human globin promoters; viral thymidine kinase promoters, such as the Herpes Simplex thymidine kinase promoter; retroviral LTRs; the b-actin promoter; and human growth hormone promoters. The promoter also may be the native promoter for the polynucleotide of the present invention.

[0493] Unlike other gene therapy techniques, one major advantage of introducing naked nucleic acid sequences into target cells is the transitory nature of the polynucleotide synthesis in the cells. Studies have shown that non-replicating DNA sequences can be introduced into cells to provide production of the desired polypeptide for periods of up to six months.

[0494] The polynucleotide construct can be delivered to the interstitial space of tissues within the an animal, including of muscle, skin, brain, lung, liver, spleen, bone marrow, thymus, heart, lymph, blood, bone, cartilage, pancreas, kidney, gall bladder, stomach, intestine, testis, ovary, uterus, rectum, nervous system, eye, gland, and connective tissue. Interstitial space of the tissues comprises the intercellular, fluid, mucopolysaccharide matrix among the reticular fibers of organ tissues, elastic fibers in the walls of vessels or chambers, collagen fibers of fibrous tissues, or that same matrix within connective tissue ensheathing muscle cells or in the lacunae of bone. It is similarly the space occupied by the plasma of the circulation and the lymph fluid of the lymphatic channels. Delivery to the interstitial space of muscle tissue is preferred for the reasons discussed below. They may be conveniently delivered by injection into the tissues comprising these cells. They are preferably delivered to and expressed in persistent, non-dividing cells which are differentiated, although delivery and expression may be achieved in non-differentiated or less completely differentiated cells, such as, for example, stem cells of blood or skin fibroblasts. In vivo muscle cells are particularly competent in their ability to take up and express polynucleotides.

[0495] For the naked nucleic acid sequence injection, an effective dosage amount of DNA or RNA will be in the range of from about 0.05 mg/kg body weight to about 50 mg/kg body weight. Preferably the dosage will be from about 0.005 mg/kg to about 20 mg/kg and more preferably from about 0.05 mg/kg to about 5 mg/kg. Of course, as the artisan of ordinary skill will appreciate, this dosage will vary according to the tissue site of injection. The appropriate and effective dosage of nucleic acid sequence can readily be determined by those of ordinary skill in the art and may depend on the condition being treated and the route of administration.

[0496] The preferred route of administration is by the parenteral route of injection into the interstitial space of tissues. However, other parenteral routes may also be used, such as, inhalation of an aerosol formulation particularly for delivery to lungs or bronchial tissues, throat or mucous membranes of the nose. In addition, naked DNA constructs can be delivered to arteries during angioplasty by the catheter used in the procedure.

[0497] The naked polynucleotides are delivered by any method known in the art, including, but not limited to, direct needle injection at the delivery site, intravenous injection, topical administration, catheter infusion, and so-called “gene guns”. These delivery methods are known in the art.

[0498] The constructs may also be delivered with delivery vehicles such as viral sequences, viral particles, liposome formulations, lipofectin, precipitating agents, etc. Such methods of delivery are known in the art.

[0499] In certain embodiments, the polynucleotide constructs are complexed in-a liposome preparation. Liposomal preparations for use in the instant invention include cationic (positively charged), anionic (negatively charged) and neutral preparations. However, cationic liposomes are particularly preferred because a tight charge complex can be formed between the cationic liposome and the polyanionic nucleic acid. Cationic liposomes have been shown to mediate intracellular delivery of plasmid DNA (Feigner et al., Proc. Natl. Acad. Sci. USA (1987) 84:7413-7416, which is herein incorporated by reference); mRNA (Malone et al., Proc. Natl. Acad. Sci. USA (1989) 86:6077-6081, which is herein incorporated by reference); and purified transcription factors (Debs et al., J. Biol. Chem. (1990) 265:10189-10192, which is herein incorporated by reference), in functional form.

[0500] Cationic liposomes are readily available. For example, N[1-2,3-dioleyloxy)propyl]-N,N,N-triethylammonium (DOTMA) liposomes are particularly useful and are available under the trademark Lipofectin, from GIBCO BRL, Grand Island, N.Y. (See, also, Felgner et al., Proc. Natl Acad. Sci. USA (1987) 84:7413-7416, which is herein incorporated by reference). Other commercially available liposomes include transfectace (DDAB/DOPE) and DOTAP/DOPE (Boehringer).

[0501] Other cationic liposomes can be prepared from readily available materials using techniques well known in the art. See, e.g. PCT Publication No. WO 90/11092 (which is herein incorporated by reference) for a description of the synthesis of DOTAP (1,2-bis(oleoyloxy)-3-(trimethylammonio)propane)liposomes. Preparation of DOTMA liposomes is explained in the literature, see, e.g., P. Felgner et al., Proc. NatI. Acad. Sci. USA 84:7413-7417, which is herein incorporated by reference. Similar methods can be used to prepare liposomes from other cationic lipid materials.

[0502] Similarly, anionic and neutral liposomes are readily available, such as from Avanti Polar Lipids (Birmingham, Ala.), or can be easily prepared using readily available materials. Such materials include phosphatidyl, choline, cholesterol, phosphatidyl ethanolamine, dioleoylphosphatidyl choline (DOPC), dioleoylphosphatidyl glycerol (DOPG), dioleoylphoshatidyl ethanolamine (DOPE), among others. These materials can also be mixed with the DOTMA and DOTAP starting materials in appropriate ratios. Methods for making liposomes using these materials are well known in the art.

[0503] For example, commercially dioleoylphosphatidyl choline (DOPC), dioleoylphosphatidyl glycerol (DOPG), and dioleoylphosphatidyl ethanolamine (DOPE) can be used in various combinations to make conventional liposomes, with or without the addition of cholesterol. Thus, for example, DOPG/DOPC vesicles can be prepared by drying 50 mg each of DOPG and DOPC under a stream of nitrogen gas into a sonication vial. The sample is placed under a vacuum pump overnight and is hydrated the following day with deionized water. The sample is then sonicated for 2 hours in a capped vial, using a Heat Systems model 350 sonicator equipped with an inverted cup (bath type) probe at the maximum setting while the bath is circulated at 15EC. Alternatively, negatively charged vesicles can be prepared without sonication to produce multilamellar vesicles or by extrusion through nucleopore membranes to produce unilamellar vesicles of discrete size. Other methods are known and available to those of skill in the art.

[0504] The liposomes can comprise multilamellar vesicles (MLVs), small unilamellar vesicles (SUVs), or large unilamellar vesicles (LUVs), SUVs being preferred. The various liposome-nucleic acid complexes are prepared using methods well known in the art. See, e.g., Straubinger et al., Methods of Immunology (1983), 101:512-527, which is herein incorporated by reference. For example, MLVs containing nucleic acid can be prepared by depositing a thin film of phospholipid on the walls of a glass tube and subsequently hydrating with a solution of the material to be encapsulated. SUVs are prepared by extended sonication of MLVs to produce a homogeneous population of unilamellar liposomes. The material to be entrapped is added to a suspension of preformed MLVs and then sonicated. When using liposomes containing cationic lipids, the dried lipid film is resuspended in an appropriate solution such as sterile water or an isotonic buffer solution such as 10 mM Tris/NaCl, sonicated, and then the preformed liposomes are mixed directly with the DNA. The liposome and DNA form a very stable complex due to binding of the positively charged liposomes to the cationic DNA. SUVs find use with small nucleic acid fragments. LUVs are prepared by a number of methods, well known in the art. Commonly used methods include Ca²⁺-EDTA chelation (Papahadjopoulos et al., Biochim. Biophys. Acta (1975) 394:483; Wilson et al., Cell 17:77 (1979)); ether injection (Deamer, D. and Bangham, A., Biochim. Biophys. Acta 443:629 (1976); Ostro et al., Biochem. Biophys. Res. Commun. 76:836 (1977); Fraley et al., Proc. Natl. Acad. Sci. USA 76:3348 (1979)); detergent dialysis (Enoch, H. and Strittmatter, P., Proc. Natl. Acad. Sci. USA 76:145 (1979)); and reverse-phase evaporation (REV) (Fraley et al., J. Biol. Chem. 255:10431 (1980); Szoka, F. and Papahadjopoulos, D., Proc. Natl. Acad. Sci. USA 75:145 (1978); Schaefer-Ridder et al., Science 215:166 (1982)), which are herein incorporated by reference.

[0505] Generally, the ratio of DNA to liposomes will be from about 10:1 to about 1:10. Preferably, the ration will be from about 5:1 to about 1:5. More preferably, the ration will be about 3:1 to about 1:3. Still more preferably, the ratio will be about 1:1.

[0506] U.S. Pat. No. 5,676,954 (which is herein incorporated by reference) reports on the injection of genetic material, complexed with cationic liposomes carriers, into mice. U.S. Pat. Nos. 4,897,355, 4,946,787, 5,049,386, 5,459,127, 5,589,466, 5,693,622, 5,580,859, 5,703,055, and international publication no. WO 94/9469 (which are herein incorporated by reference) provide cationic lipids for use in transfecting DNA into cells and mammals. U.S. Pat. Nos. 5,589,466, 5,693,622, 5,580,859, 5,703,055, and international publication no. WO 94/9469 provide methods for delivering DNA-cationic lipid complexes to mammals.

[0507] In certain embodiments, cells are engineered, ex vivo or in vivo, using a retroviral particle containing RNA which comprises a sequence encoding a polypeptide of the present invention. Retroviruses from which the retroviral plasmid vectors may be derived include, but are not limited to, Moloney Murine Leukemia Virus, spleen necrosis virus, Rous sarcoma Virus, Harvey Sarcoma Virus, avian leukosis virus, gibbon ape leukemia virus, human immunodeficiency virus, Myeloproliferative Sarcoma Virus, and mammary tumor virus.

[0508] The retroviral plasmid vector is employed to transduce packaging cell lines to form producer cell lines. Examples of packaging cells which may be transfected include, but are not limited to, the PE501, PA317, R-2, R-AM, PA12, T19-14X, VT-19-17-H2, RCRE, RCRIP, GP+E-86, GP+envAm12, and DAN cell lines as described in Miller, Human Gene Therapy 1:5-14 (1990), which is incorporated herein by reference in its entirety. The vector may transduce the packaging cells through any means known in the art. Such means include, but are not limited to, electroporation, the use of liposomes, and CaPO₄ precipitation. In one alternative, the retroviral plasmid vector may be encapsulated into a liposome, or coupled to a lipid, and then administered to a host.

[0509] The producer cell line generates infectious retroviral vector particles which include polynucleotide encoding a polypeptide of the present invention. Such retroviral vector particles then may be employed, to transduce eukaryotic cells, either in vitro or in vivo. The transduced eukaryotic cells will express a polypeptide of the present invention.

[0510] In certain other embodiments, cells are engineered, ex vivo or in vivo, with polynucleotide contained in an adenovirus vector. Adenovirus can be manipulated such that it encodes and expresses a polypeptide of the present invention, and at the same time is inactivated in terms of its ability to replicate in a normal lytic viral life cycle. Adenovirus expression is achieved without integration of the viral DNA into the host cell chromosome, thereby alleviating concerns about insertional mutagenesis. Furthermore, adenoviruses have been used as live enteric vaccines for many years with an excellent safety profile (Schwartz et al. Am. Rev. Respir. Dis.109:233-238 (1974)). Finally, adenovirus mediated gene transfer has been demonstrated in a number of instances including transfer of alpha-1-antitrypsin and CFTR to the lungs of cotton rats (Rosenfeld, M. A. et al. (1991) Science 252:431-434; Rosenfeld et al., (1992) Cell 68:143-155). Furthermore, extensive studies to attempt to establish adenovirus as a causative agent in human cancer were uniformly negative (Green, M. et al. (1979) Proc. Natl. Acad. Sci. USA 76:6606).

[0511] Suitable adenoviral vectors useful in the present invention are described, for example, in Kozarsky and Wilson, Curr. Opin. Genet. Devel. 3:499-503 (1993); Rosenfeld et al., Cell 68:143-155 (1992); Engelhardt et al., Human Genet. Ther. 4:759-769 (1993); Yang et al., Nature Genet. 7:362-369 (1994); Wilson et al., Nature 365:691-692 (1993); and U.S. Pat. No. 5,652,224, which are herein incorporated by reference. For example, the adenovirus vector Ad2 is useful and can be grown in human 293 cells. These cells contain the E1 region of adenovirus and constitutively express E1a and E1b, which complement the defective adenoviruses by providing the products of the genes deleted from the vector. In addition to Ad2, other varieties of adenovirus (e.g., Ad3, Ad5, and Ad7) are also useful in the present invention.

[0512] Preferably, the adenoviruses used in the present invention are replication deficient. Replication deficient adenoviruses require the aid of a helper virus and/or packaging cell line to form infectious particles. The resulting virus is capable of infecting cells and can express a polynucleotide of interest which is operably linked to a promoter, but cannot replicate in most cells. Replication deficient adenoviruses may be deleted in one or more of all or a portion of the following genes: E1a, E1b, E3, E4, E2a, or L1 through L5.

[0513] In certain other embodiments, the cells are engineered, ex vivo or in vivo, using an adeno-associated virus (AAV). AAVs are naturally occurring defective viruses that require helper viruses to produce infectious particles (Muzyczka, N., Curr. Topics in Microbiol. Immunol. 158:97 (1992)). It is also one of the few viruses that may integrate its DNA into non-dividing cells. Vectors containing as little as 300 base pairs of AAV can be packaged and can integrate, but space for exogenous DNA is limited to about 4.5 kb. Methods for producing and using such AAVs are known in the art. See, for example, U.S. Pat. Nos. 5,139,941, 5,173,414, 5,354,678, 5,436,146, 5,474,935, 5,478,745, and 5,589,377.

[0514] For example, an appropriate AAV vector for use in the present invention will include all the sequences necessary for DNA replication, encapsidation, and host-cell integration. The polynucleotide construct is inserted into the AAV vector using standard cloning methods, such as those found in Sambrook et al., Molecular Cloning: A Laboratory Manual, Cold Spring Harbor Press (1989). The recombinant AAV vector is then transfected into packaging cells which are infected with a helper virus, using any standard technique, including lipofection, electroporation, calcium phosphate precipitation, etc. Appropriate helper viruses include adenoviruses, cytomegaloviruses, vaccinia viruses, or herpes viruses. Once the packaging cells are transfected, they will produce infectious AAV viral particles which contain the polynucleotide construct. These viral particles are then used to transduce eukaryotic cells, either ex vivo or in vivo. The transduced cells will contain the polynucleotide construct integrated into its genome, and will express a polypeptide of the invention.

[0515] Another method of gene therapy involves operably associating heterologous control regions and endogenous polynucleotide sequences (e.g. encoding a polypeptide of the present invention) via homologous recombination (see, e.g., U.S. Pat. No. 5,641,670, issued Jun. 24, 1997; International Publication No. WO 96/29411, published Sep. 26, 1996; International Publication No. WO 94/12650, published Aug. 4, 1994; Koller et al., Proc. Natl. Acad. Sci. USA 86:8932-8935 (1989); and Zijlstra et al., Nature 342:435-438 (1989), which are herein encorporated by reference. This method involves the activation of a gene which is present in the target cells, but which is not normally expressed in the cells, or is expressed at a lower level than desired.

[0516] Polynucleotide constructs are made, using standard techniques known in the art, which contain the promoter with targeting sequences flanking the promoter. Suitable promoters are described herein. The targeting sequence is sufficiently complementary to an endogenous sequence to permit homologous recombination of the promoter-targeting sequence with the endogenous sequence. The targeting sequence will be sufficiently near the 5′ end of the desired endogenous polynucleotide sequence so the promoter will be operably linked to the endogenous sequence upon homologous recombination.

[0517] The promoter and the targeting sequences can be amplified using PCR. Preferably, the amplified promoter contains distinct restriction enzyme sites on the 5′ and 3′ ends. Preferably, the 3′ end of the first targeting sequence contains the same restriction enzyme site as the 5′ end of the amplified promoter and the 5′ end of the second targeting sequence contains the same restriction site as the 3′ end of the amplified promoter. The amplified promoter and targeting sequences are digested and ligated together.

[0518] The promoter-targeting sequence construct is delivered to the cells, either as naked polynucleotide, or in conjunction with transfection-facilitating agents, such as liposomes, viral sequences, viral particles, whole viruses, lipofection, precipitating agents, etc., described in more detail above. The P promoter-targeting sequence can be delivered by any method, included direct needle injection, intravenous injection, topical administration, catheter infusion, particle accelerators, etc. The methods are described in more detail below.

[0519] The promoter-targeting sequence construct is taken up by cells. Homologous recombination between the construct and the endogenous sequence takes place, such that an endogenous sequence is placed under the control of the promoter. The promoter then drives the expression of the endogenous sequence.

[0520] The polynucleotide encoding a polypeptide of the present invention may contain a secretory signal sequence that facilitates secretion of the protein. Typically, the signal sequence is positioned in the coding region of the polynucleotide to be expressed towards or at the 5′ end of the coding region. The signal sequence may be homologous or heterologous to the polynucleotide of interest and may be homologous or heterologous to the cells to be transfected. Additionally, the signal sequence may be chemically synthesized using methods known in the art.

[0521] Any mode of administration of any of the above-described polynucleotides constructs can be used so long as the mode results in the expression of one or more molecules in an amount sufficient to provide a therapeutic effect. This includes direct needle injection, systemic injection catheter infusion, biolistic injectors, particle accelerators (i.e., “gene guns”), gelfoam sponge depots, other commercially available depot materials, osmotic pumps (e.g., Alza minipumps), oral or suppositorial solid (tablet or pill) pharmaceutical formulations, and decanting or topical applications during surgery. For example, direct injection of naked calcium phosphate-precipitated plasmid into rat liver and rat spleen or a protein-coated plasmid into the portal vein has resulted in gene expression of the foreign gene in the rat livers (Kaneda et al., Science 243:375 (1989)).

[0522] A preferred method of local administration is by direct injection. Preferably, a recombinant molecule of the present invention complexed with a delivery vehicle is administered by direct injection into or locally within the area of arteries. Administration of a composition locally within the area of arteries refers to injecting the composition centimeters and preferably, millimeters within arteries.

[0523] Another method of local administration is to contact a polynucleotide construct of the present invention in or around a surgical wound. For example, a patient can undergo surgery and the polynucleotide construct can be coated on the surface of tissue inside the wound or the construct can be injected into areas of tissue inside the wound.

[0524] Therapeutic compositions useful in systemic administration, include recombinant molecules of the present invention complexed to a targeted delivery vehicle of the present invention. Suitable delivery vehicles for use with systemic administration comprise liposomes comprising ligands for targeting the vehicle to a particular site. In specific embodiments, suitable delivery vehicles for use with systemic administration comprise liposomes comprising polypeptides of the invention for targeting the vehicle to a particular site.

[0525] Preferred methods of systemic administration, include intravenous injection, aerosol, oral and percutaneous (topical) delivery. Intravenous injections can be performed using methods standard in the art. Aerosol delivery can also be performed using methods standard in the art (see, for example, Stribling et al., Proc. Natl. Acad. Sci. USA 189:11277-11281, 1992, which is incorporated herein by reference). Oral delivery can be performed by complexing a polynucleotide construct of the present invention to a carrier capable of withstanding degradation by digestive enzymes in the gut of an animal. Examples of such carriers, include plastic capsules or tablets, such as those known in the art Topical delivery can be performed by mixing a polynucleotide construct of the present invention with a lipophilic reagent (e.g., DMSO) that is capable of passing into the skin.

[0526] Determining an effective amount of substance to be delivered can depend upon a number of factors including, for example, the chemical structure and biological activity of the substance, the age and weight of the animal, the precise condition requiring treatment and its severity, and the route of administration. The frequency of treatments depends upon a number of factors, such as the amount of polynucleotide constructs administered per dose, as well as the health and history of the subject The precise amount number of doses, and timing of doses will be determined by the attending physician or veterinarian.

[0527] Therapeutic compositions of the present invention can be administered to any animal, preferably to mammals and birds. Preferred mammals include humans, dogs, cats, mice, rats, rabbits sheep, cattle, horses and pigs, with humans being particularly preferred.

Biological Activities

[0528] Polynucleotides or polypeptides, or agonists or antagonists of the present invention, can be used in assays to test for one or more biological activities. If these polynucleotides or polypeptides, or agonists or antagonists of the present invention, do exhibit activity in a particular assay, it is likely that these molecules may be involved in the diseases associated with the biological activity. Thus, the polynucleotides and polypeptides, and agonists or antagonists could be used to treat the associated disease.

[0529] Members of the secreted family of proteins are believed to be involved in biological activities associated with, for example, cell signaling. Accordingly, compositions of the invention (including polynucleotides, polypeptides and antibodies of the invention, and fragments and variants thereof) may be used in diagnosis, prognosis, prevention and/or treatment of diseases and/or disorders associated with aberrant activity of secreted polypeptides.

[0530] In preferred embodiments, compositions of the invention (including polynucleotides, polypeptides and antibodies of the invention, fragments and variants thereof) may be used in the diagnosis, prognosis, prevention, treatment, and/or amelioration of diseases and/or disorders relating to the cardiovascular system (e.g., atherosclerosis, stroke, myocardial infarction, hypertension, and as described in the “Cardiovascular Disorders” section below).

[0531] In certain embodiments, a polypeptide of the invention, or polynucleotides, antibodies, agonists, or antagonists corresponding to polypeptide, may be used to diagnose and/or prognosticate diseases and/or disorders associated with the tissue(s) in which the polypeptide of the invention is expressed including one, two, three, four, five, or more tissues disclosed in Table 1B.2 (Tissue Distribution Library Code)

[0532] Thus, polynucleotides, translation products and antibodies of the invention are useful in the diagnosis, detection, prevention, prognistication, and/or treatment of diseases and/or disorders associated with activities that include, but are not limited to, prohormone activation, neurotransmitter activity, cellular signaling, cellular proliferation, cellular differentiation, and cell migration.

[0533] More generally, polynucleotides, translation products and antibodies corresponding to this gene may be useful for the diagnosis, prognosis, prevention, treatment and/or amelioration of diseases and/or disorders associated with the following system or systems.

Cardiovascular Disorders

[0534] Polynucleotides or polypeptides, or agonists or antagonists of the present invention, may be used to detect, prevent, diagnose, prognosticate, treat, and/or ameliorate cardiovascular diseases and disorders, including, but not limited to, peripheral artery disease, such as limb ischemia.

[0535] Cardiovascular disorders include, but are not limited to, cardiovascular abnormalities, such as arterio-arterial fistula, arteriovenous fistula, cerebral arteriovenous malformations, congenital heart defects, pulmonary atresia, and Scimitar Syndrome. Congenital heart defects include, but are not limited to, aortic coarctation, cor triatriatum, coronary vessel anomalies, crisscross heart, dextrocardia, patent ductus arteriosus, Ebstein's anomaly Eisenmenger complex, hypoplastic left heart syndrome, levocardia, tetralogy of fallot, transposition of great vessels, double outlet right ventrical, tricuspid atresia, persistent truncus arteriosus, and heart septal defects, such as aortopulmonary septal defect, endocardial cushion defects, Lutembacher's Syndrome, trilogy of Fallot ventricular heart septal defects.

[0536] Cardiovascular disorders also include, but are not limited to, heart disease, such as arrhythmias, carcinoid heart disease, high cardiac output low cardiac output, cardiac tamponade, endocarditis (including bacterial), heart aneurysm, cardiac arrest, congestive heart failure, congestive cardiomyopathy, paroxysmal dyspnea, cardiac edema, heart hypertrophy, congestive cardiomyopathy, left ventricular hypertrophy, right ventricular hypertrophy, post-infarction heart rupture, ventricular septal rupture, heart valve diseases, myocardial diseases, myocardial ischemia, pericarial effusion, pericarditis (including constrictive and tuberculous), pneumopericardium, postpericardiotomy syndrome, pulmonary heart disease, rheumatic heart disease, ventricular dysfunction, hyperemia, cardiovascular pregnancy complications, Scimitar Syndrome, cardiovascular syphilis, and cardiovascular tuberculosis.

[0537] Arrhythmias include, but are not limited to, sinus arrhythmia, atrial fibrillation, atrial flutter, bradycardia, extrasystole, Adams-Stokes Syndrome, bundle-branch block, sinoatrial block, long QT syndrome, parasystole, Lown-Ganong-Levine Syndrome, Mahaim-type pre-excitation syndrome, Wolff-Parkinson-White syndrome, sick sinus syndrome, tachycardias, and ventricular fibrillation. Tachycardias include paroxysmal tachycardia, supraventricular tachycardia, accelerated idioventricular rhythm, atrioventricular nodal reentry tachycardia, ectopic atrial tachycardia, ectopic junctional tachycardia, sinoatrial nodal reentry tachycardia, sinus tachycardia, Torsades de Pointes, and ventricular tachycardia

[0538] Heart valve diseases include, but are not limited to, aortic valve insufficiency, aortic valve stenosis, hear murmurs, aortic valve prolapse mitral valve prolapse, tricuspid valve prolapse, mitral valve insufficiency, mitral valve stenosis, pulmonary atresia, pulmonary valve insufficiency, pulmonary valve stenosis, tricuspid atresia, tricuspid valve insufficiency, and tricuspid valve stenosis.

[0539] Myocardial diseases include, but are not limited to, alcoholic cardiomyopathy, congestive cardiomyopathy, hypertrophic cardiomyopathy, aortic subvalvular stenosis, pulmonary subvalvular stenosis, restrictive cardiomyopathy, Chagas cardiomyopathy, endocardial fibroelastosis, endomyocardial fibrosis, Kearns Syndrome, myocardial reperfusion injury, and myocarditis.

[0540] Myocardial ischemias include, but are not limited to, coronary disease, such as angina pectoris, coronary aneurysm, coronary arteriosclerosis, coronary thrombosis, coronary vasospasm, myocardial infarction and myocardial stunning.

[0541] Cardiovascular diseases also include vascular diseases such as aneurysms, angiodysplasia, angiomatosis, bacillary angiomatosis, Hippel-Lindau Disease, Klippel-Trenaunay-Weber Syndrome, Sturge-Weber Syndrome, angioneurotic edema, aortic diseases, Takayasu's Arteritis, aortitis, Leriche's Syndrome, arterial occlusive diseases, arteritis, enarteritis, polyarteritis nodosa, cerebrovascular disorders, diabetic angiopathies, diabetic retinopathy, embolisms, thrombosis, erythromelalgia, hemorrhoids, hepatic veno-occlusive disease, hypertension, hypotension, ischemia, peripheral vascular diseases, phlebitis, pulmonary venoocclusive disease, Raynaud's disease, CREST syndrome, retinal vein occlusion, Scimitar syndrome, superior vena cava syndrome, telangiectasia, atacia telangiectasia, hereditary hemorrhagic telangiectasia, varicocele, varicose veins, varicose ulcer, vasculitis, and venous insufficiency.

[0542] Aneurysms include, but are not limited to, dissecting aneurysms, false aneurysms, infected aneurysms, ruptured aneurysms, aortic aneurysms, cerebral aneurysms, coronary aneurysms, heart aneurysms, and iliac aneurysms.

[0543] Arterial occlusive diseases include, but are not limited to, arteriosclerosis, intermittent claudication, carotid stenosis, fibromuscular dysplasias, mesenteric vascular occlusion, Moyamnoya disease, renal artery obstruction, retinal artery occlusion, and thromboangiitis obliterans.

[0544] Cerebrovascular disorders include, but are not limited to, carotid artery diseases, cerebral amyloid angiopathy, cerebral aneurysm, cerebral anoxia, cerebral arteriosclerosis, cerebral arteriovenous malformation, cerebral artery diseases, cerebral embolism and thrombosis, carotid artery thrombosis, sinus thrombosis, Wallenberg's syndrome, cerebral hemorrhage, epidural hematoma, subdural hematoma, subaraxhnoid hemorrhage, cerebral infarction, cerebral ischemia (including transient), subclavian steal syndrome, periventricular leukomalacia, vascular headache, cluster headache, migraine, and vertebrobasilar insufficiency.

[0545] Embolisms include, but are not limited to, air embolisms, amniotic fluid embolisms, cholesterol embolisms, blue toe syndrome, fat embolisms, pulmonary embolisms, and thromoboembolisms. Thrombosis include, but are not limited to, coronary thrombosis, hepatic vein thrombosis, retinal vein occlusion, carotid artery thrombosis, sinus thrombosis, Wallenberg's syndrome, and thrombophlebitis.

[0546] Ischemic disorders include, but are not limited to, cerebral ischemia, ischemic colitis, compartment syndromes, anterior compartment syndrome, myocardial ischemia, reperfusion injuries, and peripheral limb ischemia Vasculitis includes, but is not limited to, aortitis, arteritis, Behcet's Syndrome, Churg-Strauss Syndrome, mucocutaneous lymph node syndrome, thromboangiitis obliterans, hypersensitivity vasculitis, Schoenlein-Henoch purpura, allergic cutaneous vasculitis, and Wegener's granulomatosis.

[0547] Polypeptides may be administered using any method known in the art, including, but not limited to, direct needle injection at the delivery site, intravenous injection, topical administration, catheter infusion, biolistic injectors, particle accelerators, gelfoam sponge depots, other commercially available depot materials, osmotic pumps, oral or suppositorial solid pharmaceutical formulations, decanting or topical applications during surgery, aerosol delivery. Such methods are known in the art. Polypeptides may be administered as part of a Therapeutic, described in more detail below. Methods of delivering polynucleotides are described in more detail herein.

Wound Healing and Epithelial Cell Proliferation

[0548] In accordance with yet a further aspect of the present invention, there is provided a process for utilizing polynucleotides or polypeptides, as well as agonists or antagonists of the present invention, for therapeutic purposes, for example, to stimulate epithelial cell proliferation and basal keratinocytes for the purpose of wound healing, and to stimulate hair follicle production and healing of dermal wounds. Polynucleotides or polypeptides, as well as agonists or antagonists of the present invention, may be clinically useful in stimulating wound healing including surgical wounds, excisional wounds, deep wounds involving damage of the dermis and epidermis, eye tissue wounds, dental tissue wounds, oral cavity wounds, diabetic ulcers, dermal ulcers, cubitus ulcers, arterial ulcers, venous stasis ulcers, bums resulting from heat exposure or chemicals, and other abnormal wound healing conditions such as uremia, malnutrition, vitamin deficiencies and complications associated with systemic treatment with steroids, radiation therapy and antineoplastic drugs and antimetabolites. Polynucleotides or polypeptides, as well as agonists or antagonists of the present invention, could be used to promote dermal reestablishment subsequent to dermal loss

[0549] Polynucleotides or polypeptides, as well as agonists or antagonists of the present invention, could be used to increase the adherence of the grafts to a wound bed and to stimulate re-epithelialization from the wound bed. The following are types of grafts that polynucleotides or polypeptides, agonists or antagonists of the present invention, could be used to increase adherence to a wound bed: autografts, artificial skin, allografts, autodermic graft, autoepdermic grafts, avacular grafts, Blair-Brown grafts, bone graft, brephoplastic grafts, cutis graft, delayed graft, dermic graft, epidermic graft, fascia graft, full thickness graft, heterologous graft, xenograft, homologous graft, hyperplastic graft, lamellar graft, mesh graft, mucosal graft, Ollier-Thiersch graft, omenpal graft, patch graft, pedicle graft, penetrating graft, split skin graft, thick split graft. Polynucleotides or polypeptides, as well as agonists or antagonists of the present invention, can be used to promote skin strength and to improve the appearance of aged skin.

[0550] It is believed that polynucleotides or polypeptides, as well as agonists or antagonists of the present invention, will also produce changes in hepatocyte proliferation, and epithelial cell proliferation in the lung, breast, pancreas, stomach, small intestine, and large intestine. Polynucleotides or polypeptides, as well as agonists or antagonists of the present invention, could promote proliferation of epithelial cells such as sebocytes, hair follicles, hepatocytes, type II pneumocytes, mucin-producing goblet cells, and other epithelial cells and their progenitors contained within the skin, lung, liver, and gastrointestinal tract. Polynucleotides or polypeptides, agonists or antagonists of the present invention, may promote proliferation of endothelial cells, keratinocytes, and basal keratinocytes.

[0551] Polynucleotides or polypeptides, as well as agonists or antagonists of the present invention could also be used to reduce the side effects of gut toxicity that result from radiation, chemotherapy treatments or viral infections. Polynucleotides or polypeptides, as well as agonists or antagonists of the present invention, may have a cytoprotective effect on the small intestine mucosa. Polynucleotides or polypeptides, as well as agonists or antagonists of the present invention, may also stimulate healing of mucositis (mouth ulcers) that result from chemotherapy and viral infections.

[0552] Polynucleotides or polypeptides, as well as agonists or antagonists of the present invention, could further be used in full regeneration of skin in full and partial thickness skin defects, including bums, (i.e., repopulation of hair follicles, sweat glands, and sebaceous glands), treatment of other skin defects such as psoriasis. Polynucleotides or polypeptides, as well as agonists or antagonists of the present invention, could be used to treat epidermolysis bullosa, a defect in adherence of the epidermis to the underlying dermis which results in frequent, open and painful blisters by accelerating reepithelialization of these lesions. Polynucleotides or polypeptides, as well as agonists or antagonists of the present invention, could also be used to treat gastric and doudenal ulcers and help heal by scar formation of the mucosal lining and regeneration of glandular mucosa and duodenal mucosal lining more rapidly. Inflammatory bowel diseases, such as Crohn's disease and ulcerative colitis, are diseases which result in destruction of the mucosal surface of the small or large intestine, respectively. Thus, polynucleotides or polypeptides, as well as agonists or antagonists of the present invention, could be used to promote the resurfacing of the mucosal surface to aid more rapid healing and to prevent progression of inflammatory bowel disease. Treatment with polynucleotides or polypeptides, agonists or antagonists of the present invention, is expected to have a significant effect on the production of mucus throughout the gastrointestinal tract and could be used to protect the intestinal mucosa from injurious substances that are ingested or following surgery. Polynucleotides or polypeptides, as well as agonists or antagonists of the present invention, could be used to treat diseases associate with the under expression.

[0553] Moreover, polynucleotides or polypeptides, as well as agonists or antagonists of the present invention, could be used to prevent and heal damage to the lungs due to various pathological states. Polynucleotides or polypeptides, as well as agonists or antagonists of the present invention, which could stimulate proliferation and differentiation and promote the repair of alveoli and brochiolar epithelium to prevent or treat acute or chronic lung damage. For example, emphysema, which results in the progressive loss of aveoli, and inhalation injuries, i.e., resulting from smoke inhalation and bums, that cause necrosis of the bronchiolar epithelium and alveoli could be effectively treated using polynucleotides or polypeptides, agonists or antagonists of the present invention. Also, polynucleotides or polypeptides, as well as agonists or antagonists of the present invention, could be used to stimulate the proliferation of and differentiation of type 11 pneumocytes, which may help treat or prevent disease such as hyaline membrane diseases, such as infant respiratory distress syndrome and bronchopulmonary displasia, in premature infants.

[0554] Polynucleotides or polypeptides, as well as agonists or antagonists of the present invention, could stimulate the proliferation and differentiation of hepatocytes and, thus, could be used to alleviate or treat liver diseases and pathologies such as fulminant liver failure caused by cirrhosis, liver damage caused by viral hepatitis and toxic substances (i.e., acetaminophen, carbon tetraholoride and other hepatotoxins known in the art).

[0555] In addition, polynucleotides or polypeptides, as well as agonists or antagonists of the present invention, could be used treat or prevent the onset of diabetes mellitus. In patients with newly diagnosed Types I and II diabetes, where some islet cell function remains, polynucleotides or polypeptides, as well as agonists or antagonists of the present invention, could be used to maintain the islet function so as to alleviate, delay or prevent permanent manifestation of the disease. Also, polynucleotides or polypeptides, as well as agonists or antagonists of the present invention, could be used as an auxiliary in islet cell transplantation to improve or promote islet cell function.

Chemotaxis

[0556] Polynucleotides or polypeptides, as well as agonists or antagonists of the present invention may have chemotaxis activity. A chemotaxic molecule attracts or mobilizes cells (e.g., monocytes, fibroblasts, neutrophils, T-cells, mast cells, eosinophils, epithelial and/or endothelial cells) to a particular site in the body, such as inflammation, infection, or site of hyperproliferation. The mobilized cells can then fight off and/or heal the particular trauma or abnormality.

[0557] Polynucleotides or polypeptides, as well as agonists or antagonists of the present invention may increase chemotaxic activity of particular cells. These chemotactic molecules can then be used to treat inflammation, infection, hyperproliferative disorders, or any immune system disorder by increasing the number of cells targeted to a particular location in the body. For example, chemotaxic molecules can be used to treat wounds and other trauma to tissues by attracting immune cells to the injured location. Chemotactic molecules of the present invention can also attract fibroblasts, which can be used to treat wounds.

[0558] It is also contemplated that polynucleotides or polypeptides, as well as agonists or antagonists of the present invention may inhibit chemotactic activity. These molecules could also be used to treat disorders. Thus, polynucleotides or polypeptides, as well as agonists or antagonists of the present invention could be used as an inhibitor of chemotaxis.

Binding Activity

[0559] A polypeptide of the present invention may be used to screen for molecules that bind to the polypeptide or for molecules to which the polypeptide binds. The binding of the polypeptide and the molecule may activate (agonist), increase, inhibit (antagonist), or decrease activity of the polypeptide or the molecule bound. Examples of such molecules include antibodies, oligonucleotides, proteins (e.g., receptors),or small molecules.

[0560] Preferably, the molecule is closely related to the natural ligand of the polypeptide, e.g., a fragment of the ligand, or a natural substrate, a ligand, a structural or functional mimetic. (See, Coligan et al., Current Protocols in Immunology 1(2): Chapter 5 (1991). Similarly, the molecule can be closely related to the natural receptor to which the polypeptide binds, or at least, a fragment of the receptor capable of being bound by the polypeptide (e.g., active site). In either case, the molecule can be rationally designed using known techniques.

[0561] Preferably, the screening for these molecules involves producing appropriate cells which express the polypeptide. Preferred cells cells from mammals, yeast, Drosophila, or E. coli. Cells expressing the polypeptide (or cell membrane containing the expressed polypeptide) are then preferably contacted with a test compound potentially containing the molecule to observe binding, stimulation, or inhibition of activity of either the polypeptide or the molecule.

[0562] The assay may simply test binding of a candidate compound to the polypeptide, wherein binding is detected by a label, or in an assay involving competition with a labeled competitor. Further, the assay may test whether the candidate compound results in a signal generated by binding to the polypeptide.

[0563] Alternatively, the assay can be carried out using cell-free preparations, polypeptide/molecule affixed to a solid support, chemical libraries, or natural product mixtures. The assay may also simply comprise the steps of mixing a candidate compound with a solution containing a polypeptide, measuring polypeptide/molecule activity or binding, and comparing the polypeptide/molecule activity or binding to a standard.

[0564] Preferably, an ELISA assay can measure polypeptide level or activity in a sample (e.g., biological sample) using a monoclonal or polyclonal antibody. The antibody can measure polypeptide level or activity by either binding, directly or indirectly, to the polypeptide or by competing with the polypeptide for a substrate.

[0565] Additionally, the receptor to which the polypeptide of the present invention binds can be identified by numerous methods known to those of skill in the art, for example, ligand panning and FACS sorting (Coligan, et al., Current Protocols in Immun., 1(2), Chapter 5, (1991)). For example, expression cloning is employed wherein polyadenylated RNA is prepared from a cell responsive to the polypeptides, for example, N1H3T3 cells which are known to contain multiple receptors for the FGF family proteins, and SC-3 cells, and a cDNA library created from this RNA is divided into pools and used to transfect COS cells or other cells that are not responsive to the polypeptides. Transfected cells which are grown on glass slides are exposed to the polypeptide of the present invention, after they have been labeled. The polypeptides can be labeled by a variety of means including iodination or inclusion of a recognition site for a site-specific protein kinase.

[0566] Following fixation and incubation, the slides are subjected to auto-radiographic analysis. Positive pools are identified and sub-pools prepared and re-transfected using an iterative sub-pooling and re-screening process, eventually yielding a single clones that encodes the putative receptor.

[0567] As an alternative approach for receptor identification, the labeled polypeptides can be photoaffinity linked with cell membrane or extract preparations that express the receptor molecule. Cross-linked material is resolved by PAGE analysis and exposed to X-ray film. The labeled complex containing the receptors of the polypeptides can be excised, resolved into peptide fragments, and subjected to protein microsequencing. The amino acids sequence obtained from microsequencing would be used to design a set of degenerate oligonucleotide probes to screen a cDNA library to identify the genes encoding the putative receptors.

[0568] Moreover, the techniques of gene-shuffling, motif-shuffling, exon-shuffling, and/or codon-shuffling (collectively referred to as “DNA shuffling”) may be employed to modulate the activities of the polypeptide of the present invention thereby effectively generating agonists and antagonists of the polypeptide of the present invention. See generally, U.S. Pat. Nos. 5,605,793, 5,811,238, 5,830,721, 5,834,252, and 5,837,458, and Patten, P. A., et al., Curr. Opinion Biotechnol. 8:724-33 (1997); Harayama, S. Trends Biotechnol. 16(2):76-82 (1998); Hansson, L. O., et al., J. Mol. Biol. 287:265-76 (1999); and Lorenzo, M. M. and Blasco, R. Biotechniques 24(2):308-13 (1998); each of these patents and publications are hereby incorporated by reference). In one embodiment, alteration of polynucleotides and corresponding polypeptides may be achieved by DNA shuffling. DNA shuffling involves the assembly of two or more DNA segments into a desired molecule by homologous, or site-specific, recombination. In another embodiment, polynucleotides and corresponding polypeptides may be altered by being subjected to random mutagenesis by error-prone PCR, random nucleotide insertion or other methods prior to recombination. In another embodiment, one or more components, motifs, sections, parts, domains, fragments, etc., of the polypeptide of the present invention may be recombined with one or more components, motifs, sections, parts, domains, fragments, etc. of one or more heterologous molecules. In preferred embodiments, the heterologous molecules are family members. In further preferred embodiments, the heterologous molecule is a growth factor such as, for example, platelet-derived growth factor (PDGF), insulin-like growth factor (IGF-I), transforming growth factor (TGF)-alpha, epidermal growth factor (EGF), fibroblast growth factor (FGF), TGF-beta, bone morphogenetic protein (BMP)-2, BMP-4, BMP-5, BMP-6, BMP-7, activins A and B, decapentaplegic(dpp), 60A, OP-2, dorsalin, growth differentiation factors (GDFs), nodal, MIS, inhibin-alpha, TGF-beta1, TGF-beta2, TGF-beta3, TGF-beta5, and glial-derived neurotrophic factor (GDNF).

[0569] Other preferred fragments are biologically active fragments of the polypeptide of the present invention. Biologically active fragments are those exhibiting activity similar, but not necessarily identical, to an activity of the polypeptide of the present invention. The biological activity of the fragments may include an improved desired activity, or a decreased undesirable activity.

[0570] Additionally, this invention provides a method of screening compounds to identify those which modulate the action of the polypeptide of the present invention. An example of such an assay comprises combining a mammalian fibroblast cell, a the polypeptide of the present invention, the compound to be screened and ³[H] thymidine under cell culture conditions where the fibroblast cell would normally proliferate. A control assay may be performed in the absence of the compound to be screened and compared to the amount of fibroblast proliferation in the presence of the compound to determine if the compound stimulates proliferation by determining the uptake of 3[H] thymidine in each case. The amount of fibroblast cell proliferation is measured by liquid scintillation chromatography which measures the incorporation of ³[H] thymidine. Both agonist and antagonist compounds may be identified by this procedure.

[0571] In another method, a mammalian cell or membrane preparation expressing a receptor for a polypeptide of the present invention is incubated with a labeled polypeptide of the present invention in the presence of the compound. The ability of the compound to enhance or block this interaction could then be measured. Alternatively, the response of a known second messenger system following interaction of a compound to be screened and the receptor is measured and the ability of the compound to bind to the receptor and elicit a second messenger response is measured to determine if the compound is a potential agonist or antagonist Such second messenger systems include but are not limited to, cAMP guanylate cyclase, ion channels or phosphoinositide hydrolysis.

[0572] All of these above assays can be used as diagnostic or prognostic markers. The molecules discovered using these assays can be used to treat disease or to bring about a particular result in a patient (e.g., blood vessel growth) by activating or inhibiting the polypeptide/molecule. Morover, the assays can discover agents which may inhibit or enhance the production of the polypeptides of the invention from suitably manipulated cells or tissues.

[0573] Therefore, the invention includes a method of identifying compounds which bind to a polypeptide of the invention comprising the steps of: (a) incubating a candidate binding compound with a polypeptide of the present invention; and (b) determining if binding has occurred. Moreover, the invention includes a method of identifying agonists/antagonists comprising the steps of: (a) incubating a candidate compound with a polypeptide of the present invention, (b) assaying a biological activity, and (b) determining if a biological activity of the polypeptide has been altered.

Targeted Delivery

[0574] In another embodiment, the invention provides a method of delivering compositions to targeted cells expressing a receptor for a polyprptide of the invention, or cells expressing a cell bound form of a polypeptide of the invention.

[0575] As discussed herein, polypeptides or antibodies of the invention may be associated with heterologous polypeptides, heterologous nucleic acids, toxins, or prodrugs via hydrophobic, hydrophilic, ionic and/or covalent interactions. In one embodiment, the invention provides a method for the specific delivery of compositions of the invention to cells by administering polypeptides of the invention (including antibodies) that are associated with heterologous polypeptides or nucleic acids. In one example, the invention provides a method for delivering a therapeutic protein into the targeted cell. In another example, the invention provides a method for delivering a single stranded nucleic acid (e.g., antisense or ribozymes) or double stranded nucleic acid (e.g., DNA that can integrate into the cell's genome or replicate episomally and that can be transcribed) into the targeted cell.

[0576] In another embodiment, the invention provides a method for the specific destruction of cells (e.g., the destruction of tumor cells) by administering polypeptides of the invention (e.g., polypeptides of the invention or antibodies of the invention) in association with toxins or cyotoxic prodrugs.

[0577] By “toxin” is meant compounds that bind and activate endogenous cytotoxic effector systems, radioisotopes, holotoxins, modified toxins, catalytic subunits of toxins, or any molecules or enzymes not normally present in or on the surface of a cell that under defined conditions cause the cell's death. Toxins that may be used according to the methods of the invention include, but are not limited to, radioisotopes known in the art. compounds such as, for example, antibodies (or complement fixing containing portions thereof) that bind an inherent or induced endogenous cytotoxic effector system, thymidine kinase, endonuclease, RNAse, alpha toxin, ricin, abrin, Pseudomonas exotoxin A, diphtheria toxin, saporin, momordin, gelonin, pokeweed antiviral protein, alpha-sarcin and cholera toxin. By “cytotoxic prodrug” is meant a non-toxic compound that is converted by an enzyme, normally present in the cell, into a cytotoxic compound. Cytotoxic prodrugs that may be used according to the methods of the invention include, but are not limited to, glutamyl derivatives of benzoic acid mustard alkylating agent, phosphate derivatives of etoposide or mitomycin C, cytosine arabinoside, daunorubisin, and phenoxyacetamide derivatives of doxorubicin.

Drug Screening

[0578] Further contemplated is the use of the polypeptides of the present invention, or the polynucleotides encoding these polypeptides, to screen for molecules which modify the activities of the polypeptides of the present invention. Such a method would include contacting the polypeptide of the present invention with a selected compound(s) suspected of having antagonist or agonist activity, and assaying the activity of these polypeptides following binding.

[0579] This invention is particularly useful for screening therapeutic compounds by using the polypeptides of the present invention, or binding fragments thereof, in any of a variety of drug screening techniques. The polypeptide or fragment employed in such a test may be affixed to a solid support, expressed on a cell surface, free in solution, or located intracellularly. One method of drug screening utilizes eukaryotic or prokaryotic host cells which are stably transformed with recombinant nucleic acids expressing the polypeptide or fragment. Drugs are screened against such transformed cells in competitive binding assays. One may measure, for example, the formulation of complexes between the agent being tested and a polypeptide of the present invention.

[0580] Thus, the present invention provides methods of screening for drugs or any other agents which affect activities mediated by the polypeptides of the present invention. These methods comprise contacting such an agent with a polypeptide of the present invention or a fragment thereof and assaying for the presence of a complex between the agent and the polypeptide or a fragment thereof, by methods well known in the art. In such a competitive binding assay, the agents to screen are typically labeled. Following incubation, free agent is separated from that present in bound form, and the amount of free or uncomplexed label is a measure of the ability of a particular agent to bind to the polypeptides of the present invention.

[0581] Another technique for drug screening provides high throughput screening for compounds having suitable binding affinity to the polypeptides of the present invention, and is described in great detail in European Patent Application 84/03564, published on Sep. 13, 1984, which is incorporated herein by reference herein. Briefly stated, large numbers of different small peptide test compounds are synthesized on a solid substrate, such as plastic pins or some other surface. The peptide test compounds are reacted with polypeptides of the present invention and washed. Bound polypeptides are then detected by methods well known in the art. Purified polypeptides are coated directly onto plates for use in the aforementioned drug screening techniques. In addition, non-neutralizing antibodies may be used to capture the peptide and immobilize it on the solid support.

[0582] This invention also contemplates the use of competitive drug screening assays in which neutralizing antibodies capable of binding polypeptides of the present invention specifically compete with a test compound for binding to the polypeptides or fragments thereof. In this manner, the antibodies are used to detect the presence of any peptide which shares one or more antigenic epitopes with a polypeptide of the invention.

Antisense and Ribozyme (Antatonists)

[0583] In specific embodiments, antagonists according to the present invention are nucleic acids corresponding to the sequences contained in SEQ ID NO:X, or the complementary strand thereof, and/or to cDNA sequences contained in cDNA ATCC Deposit No:Z identified for example, in Table 1A and/or 1B. In one embodiment, antisense sequence is generated intemally, by the organism, in another embodiment, the antisense sequence is seperately administered (see, for example, O'Connor, J., Neurochem. 56:560 (1991). Oligodeoxynucleotides as Antisense Inhibitors of Gene Expression, CRC Press, Boca Raton, Fla. (1988). Antisense technology can be used to control gene expression through antisense DNA or RNA, or through triple-helix formation. Antisense techniques are discussed for example, in Okano, J., Neurochem. 56:560 (1991); Oligodeoxynucleotides as Antisense Inhibitors of Gene Expression, CRC Press, Boca Raton, Fla. (1988). Triple helix formation is discussed in, for instance, Lee et al., Nucleic Acids Research 6:3073 (1979); Cooney et al., Science 241:456 (1988); and Dervan et al., Science 251:1300 (1991). The methods are based on binding of a polynucleotide to a complementary DNA or RNA.

[0584] For example, the use of c-myc and c-myb antisense RNA constructs to inhibit the growth of the non-lymphocytic leukemia cell line HL-60 and other cell lines was previously described. (Wickstrom et al. (1988); Anfossi et al. (1989)). These experiments were performed in vitro by incubating cells with the oligoribonucleotide. A similar procedure for in vivo use is described in WO 91/15580. Briefly, a pair of oligonucleotides for a givin antisense RNA is produced as follows: A sequence complimentary to the first 15 bases of the open reading frame is flanked by an EcoR1 site on the 5 end and a HindIII site on the 3 end. Next, the pair of oligonucleotides is heated at 90° C. for one minute and then annealed in 2× ligation buffer (20 mM TRIS HCl pH 7.5, 10 mM MgCl2, 10 MM dithiothreitol (DTT) and 0.2 mM ATP) and then ligated to the EcoR1/HindIII site of the retroviral vector PMV7 (WO 91/15580).

[0585] For example, the 5′ coding portion of a polynucleotide that encodes the polypeptide of the present invention may be used to design an antisense RNA oligonucleotide of from about 10 to 40 base pairs in length. A DNA oligonucleotide is designed to be complementary to a region of the gene involved in transcription thereby preventing transcription and the production of the receptor. The antisense RNA oligonucleotide hybridizes to the mRNA in vivo and blocks translation of the mRNA molecule into receptor polypeptide.

[0586] In one embodiment, the antisense nucleic acid of the invention is produced intracellularly by transcription from an exogenous sequence. For example, a vector or a portion thereof, is transcribed, producing an antisense nucleic acid (RNA) of the invention. Such a vector would contain a sequence encoding the antisense nucleic acid. Such a vector can remain episomal or become chromosomally integrated, as long as it can be transcribed to produce the desired antisense RNA. Such vectors can be constructed by recombinant DNA technology methods standard in the art. Vectors can be plasmid, viral, or others known in the art, used for replication and expression in vertebrate cells. Expression of the sequence encoding the polypeptide of the present invention or fragments thereof, can be by any promoter known in the art to act in vertebrate, preferably human cells. Such promoters can be inducible or constitutive. Such promoters include, but are not limited to, the SV40 early promoter region (Bemoist and Charobon, Nature 29: 304-310 (1981), the promoter contained in the 3′ long terminal repeat of Rous sarcoma virus (Yamamoto et al., Cell 22:787-797 (1980), the herpes thymidine promoter (Wagner et al., Proc. Natl. Acad. Sci. U.S.A. 78:1441-1445 (1981), the regulatory sequences of the metallothein gene (Brinster, et al., Nature 296:39-42 (1982)), etc.

[0587] The antisense nucleic acids of the invention comprise a sequence complementary to at least a portion of an RNA transcript of a gene of the present invention. However, absolute complementarity, although preferred, is not required. A sequence “complementary to at least a portion of an RNA,” referred to herein, means a sequence having sufficient complementarity to be able to hybridize with the RNA, forming a stable duplex; in the case of double stranded antisense nucleic acids, a single strand of the duplex DNA may thus be tested, or triplex formation may be assayed. The ability to hybridize will depend on both the degree of complementarity and the length of the antisense nucleic acid. Generally, the larger the hybridizing nucleic acid, the more base mismatches with a RNA it may contain and still form a stable duplex (or triplex as the case may be). One skilled in the art can ascertain a tolerable degree of mismatch by use of standard procedures to determine the melting point of the hybridized complex.

[0588] Oligonucleotides that are complementary to the 5′ end of the message, e.g., the 5′ untranslated sequence up to and including the AUG initiation codon, should work most efficiently at inhibiting translation. However, sequences complementary to the 3′ untranslated sequences of mRNAs have been shown to be effective at inhibiting translation of mRNAs as well. See generally, Wagner, R., 1994, Nature 372:333-335. Thus, oligonucleotides complementary to either the 5′- or 3′- non-translated, non-coding regions of polynucleotide sequences described herein could be used in an antisense approach to inhibit translation of endogenous mRNA. Oligonucleotides complementary to the 5′ untranslated region of the mRNA should include the complement of the AUG start codon. Antisense oligonucleotides complementary to mRNA coding regions are less efficient inhibitors of translation but could be used in accordance with the invention. Whether designed to hybridize to the 5′-, 3′- or coding region of mRNA of the present invention, antisense nucleic acids should be at least six nucleotides in length, and are preferably oligonucleotides ranging from 6 to about 50 nucleotides in length. In specific aspects the oligonucleotide is at least 10 nucleotides, at least 17 nucleotides, at least 25 nucleotides or at least 50 nucleotides.

[0589] The polynucleotides of the invention can be DNA or RNA or chimeric mixtures or derivatives or modified versions thereof, single-stranded or double-stranded. The oligonucleotide can be modified at the base moiety, sugar moiety, or phosphate backbone, for example, to improve stability of the molecule, hybridization, etc. The oligonucleotide may include other appended groups such as peptides (e.g., for targeting host cell receptors in vivo), or agents facilitating transport across the cell membrane (see, e.g., Letsinger et al., 1989, Proc. Nat. Acad. Sci. U.S.A. 86:6553-6556; Lemaitre et al., 1987, Proc. Natl. Acad. Sci. 84:648-652; PCT Publication No. WO88/09810, published Dec. 15, 1988) or the blood-brain barrier (see, e.g., PCT Publication No. WO89/10134, published Apr. 25, 1988), hybridization-triggered cleavage agents. (See, e.g., Krol et al., 1988, BioTechniques 6:958-976) or intercalating agents. (See, e.g., Zon, 1988, Pharm. Res. 5:539-549). To this end, the oligonucleotide may be conjugulated to another molecule, e.g., a peptide, hybridization triggered cross-linking agent, transport agent, hybridization-triggered cleavage agent, etc.

[0590] The antisense oligonucleotide may comprise at least one modified base moiety which is selected from the group including, but not limited to, 5-fluorouracil, 5-bromouracil, 5-chlorouracil, 5-iodouracil, hypoxanthine, xantine, 4-acetylcytosine, 5-(carboxyhydroxylmethyl)uracil, 5-carboxymethylaminomethyl-2-thiouridine, 5-carboxymethylaminomethyluracil, dihydrouracil, beta-D-galactosylqueosine, inosine, N6-isopentenyladenine, 1-methylguanine, 1-methylinosine, 2,2-dimethylguanine, 2-methyladenine, 2-methylguanine, 3-methylcytosine, 5-methylcytosine, N6-adenine, 7-methylguanine, 5-methylam inomethyluracil, 5-methoxyaminomethyl-2-thiouracil, beta-D-mannosylqueosine, 5′-methoxycarboxymethyluracil, 5-methoxyuracil, 2-methylthio-N6-isopentenyladenine, uracil-5-oxyacetic acid (v), wybutoxosine, pseudouracil, queosine, 2-thiocytosine, 5-methyl-2-thiouracil, 2-thiouracil, 4-thiouracil, 5-methyluracil, uracil-5-oxyacetic acid methylester, uracil-5-oxyacetic acid (v), 5-methyl-2-thiouracil, 3-(3-amino-3-N-2-carboxypropyl) uracil, (acp3)w, and 2,6-diaminopurine.

[0591] The antisense oligonucleotide may also comprise at least one modified sugar moiety selected from the group including, but not limited to arabinose, 2-fluoroarabinose, xylulose, and hexose.

[0592] In yet another embodiment, the antisense oligonucleotide comprises at least one modified phosphate backbone selected from the group including, but not limited to, a phosphorothioate, a phosphorodithioate, a phosphoramidothioate, a phosphoramidate, a phosphordiamidate, a methylphosphonate, an alkyl phosphotriester, and a formacetal or analog thereof.

[0593] In yet another embodiment, the antisense oligonucleotide is an a-anomeric oligonucleotide. An a-anomeric oligonucleotide forms specific double-stranded hybrids with complementary RNA in which, contrary to the usual b-units, the strands run parallel to each other (Gautier et al., 1987, Nucl. Acids Res. 15:6625-6641). The oligonucleotide is a 2′-0-methylribonucleotide (Inoue et al., 1987, Nucl. Acids Res. 15:6131-6148), or a chimeric RNA-DNA analogue (Inoue et al., 1987, FEBS Lett. 215:327-330).

[0594] Polynucleotides of the invention may be synthesized by standard methods known in the art, e.g. by use of an automated DNA synthesizer (such as are commercially available from Biosearch, Applied Biosystems, etc.). As examples, phosphorothioate oligonucleotides may be synthesized by the method of Stein et al. (1988, Nucl. Acids Res. 16:3209), methylphosphonate oligonucleotides can be prepared by use of controlled pore glass polymer supports (Sarin et al., 1988, Proc. Natl. Acad. Sci. U.S.A. 85:7448-7451), etc.

[0595] While antisense nucleotides complementary to the coding region sequence could be used, those complementary to the transcribed untranslated region are most preferred.

[0596] Potential antagonists according to the invention also include catalytic RNA, or a ribozyme (See, e.g., PCT International Publication WO 90/11364, published Oct. 4, 1990; Sarver et al, Science 247:1222-1225 (1990). While ribozymes that cleave mRNA at a site specific recognition sequences can be used to destroy mRNAs, the use of hammerhead ribozymes is preferred. Hammerhead ribozymes cleave mRNAs at locations dictated by flanking regions that form complementary base pairs with the target mRNA. The sole requirement is that the target mRNA have the following sequence of two bases: 5′-UG-3′. The construction and production of hammerhead ribozymes is well known in the art and is described more fully in Haseloff and Gerlach, Nature 334:585-591 (1988). There are numerous potential hammerhead ribozyme cleavage sites within the nucleotide sequence of SEQ ID NO:X. Preferably, the ribozyme is engineered so that the cleavage recognition site is located near the 5′ end of the mRNA; i.e., to increase efficiency and minimize the intracellular accumulation of non-functional MRNA transcripts.

[0597] As in the antisense approach, the ribozymes of the invention can be composed of modified oligonucleotides (e.g., for improved stability, targeting, etc.) and should be delivered to cells which express in vivo. DNA constructs encoding the ribozyme may be introduced into the cell in the same manner as described above for the introduction of antisense encoding DNA. A preferred method of delivery involves using a DNA construct “encoding” the ribozyme under the control of a strong constitutive promoter, such as, for example, po III or pol II promoter, so that transfected cells will produce sufficient quantities of the ribozyme to destroy endogenous messages and inhibit translation. Since ribozymes unlike antisense molecules, are catalytic, a lower intracellular concentration is required for efficiency.

[0598] Antagonist/agonist compounds may be employed to inhibit the cell growth and proliferation effects of the polypeptides of the present invention on neoplastic cells and tissues, i.e. stimulation of angiogenesis of tumors, and, therefore, retard or prevent abnormal cellular growth and proliferation, for example, in tumor formation or growth.

[0599] The antagonistlagonist may also be employed to prevent hyper-vascular diseases, and prevent the proliferation of epithelial lens cells after extracapsular cataract surgery. Prevention of the mitogenic activity of the polypeptides of the present invention may also be desirous in cases such as restenosis after balloon angioplasty.

[0600] The antagonist/agonist may also be employed to prevent the growth of scar tissue during wound healing.

[0601] The antagonist/agonist may also be employed to treat the diseases described herein.

[0602] Thus, the invention provides a method of treating disorders or diseases, including but not limited to the disorders or diseases listed throughout this application, associated with overexpression of a polynucleotide of the present invention by administering to a patient (a) an antisense molecule directed to the polynucleotide of the present invention, and/or (b) a ribozyme directed to the polynucleotide of the present invention.

Binding Peptides and Other Molecules

[0603] The invention also encompasses screening methods for identifying polypeptides and nonpolypeptides that bind polypeptides of the invention, and the binding molecules identified thereby. These binding molecules are useful, for example, as agonists and antagonists of the polypeptides of the invention. Such agonists and antagonists can be used, in accordance with the invention, in the therapeutic embodiments described in detail, below.

[0604] This method comprises the steps of:

[0605] contacting polypeptides of the invention with a plurality of molecules; and

[0606] identifying a molecule that binds the polypeptides of the invention.

[0607] The step of contacting the polypeptides of the invention with the plurality of molecules may be effected in a number of ways. For example, one may contemplate immobilizing the polypeptides on a solid support and bringing a solution of the plurality of molecules in contact with the immobilized polypeptides. Such a procedure would be akin to an affinity chromatographic process, with the affinity matrix being comprised of the immobilized polypeptides of the invention. The molecules having a selective affinity for the polypeptides can then be purified by affinity selection. The nature of the solid support, process for attachment of the polypeptides to the solid support, solvent, and conditions of the affinity isolation or selection are largely conventional and well known to those of ordinary skill in the art.

[0608] Alternatively, one may also separate a plurality of polypeptides into substantially separate fractions comprising a subset of or individual polypeptides. For instance, one can separate the plurality of polypeptides by gel electrophoresis, column chromatography, or like method known to those of ordinary skill for the separation of polypeptides. The individual polypeptides can also be produced by a transformed host cell in such a way as to be expressed on or about its outer surface (e.g., a recombinant phage). Individual isolates can then be “probed” by the polypeptides of the invention, optionally in the presence of an inducer should one be required for expression, to determine if any selective affinity interaction takes place between the polypeptides and the individual clone. Prior to contacting the polypeptides with each fraction comprising individual polypeptides, the polypeptides could first be transferred to a solid support for additional convenience. Such a solid support may simply be a piece of filter membrane, such as one made of nitrocellulose or nylon. In this manner, positive clones could be identified from a collection of transformed host cells of an expression library, which harbor a DNA construct encoding a polypeptide having a selective affinity for polypeptides of the invention. Furthermore, the amino acid sequence of the polypeptide having a selective affinity for the polypeptides of the invention can be determined directly by conventional means or the coding sequence of the DNA encoding the polypeptide can frequently be determined more conveniently. The primary sequence can then be deduced from the corresponding DNA sequence. If the amino acid sequence is to be determined from the polypeptide itself, one may use microsequencing techniques. The sequencing technique may include mass spectroscopy.

[0609] In certain situations, it may be desirable to wash away any unbound polypeptides from a mixture of the polypeptides of the invention and the plurality of polypeptides prior to attempting to determine or to detect the presence of a selective affinity interaction. Such a wash step may be particularly desirable when the polypeptides of the invention or the plurality of polypeptides are bound to a solid support.

[0610] The plurality of molecules provided according to this method may be provided by way of diversity libraries, such as random or combinatorial peptide or nonpeptide libraries which can be screened for molecules that specifically bind polypeptides of the invention. Many libraries are known in the art that can be used, e.g., chemically synthesized libraries, recombinant (e.g., phage display libraries), and in vitro translation-based libraries. Examples of chemically synthesized libraries are described in Fodor et al., 1991, Science 251:767-773; Houghten et al., 1991, Nature 354:84-86; Lam et al., 1991, Nature 354:82-84; Medynski, 1994, Bio/Technology 12:709-710;Gallop et al., 1994, J. Medicinal Chemistry 37(9):1233-1251; Ohimeyer et al., 1993, Proc. Natl. Acad. Sci. USA 90:10922-10926; Erb et al., 1994, Proc. Natl. Acad. Sci. USA 91:11422-11426; Houghten et al., 1992, Biotechniques 13:412; Jayawickreme et al., 1994, Proc. Natl. Acad. Sci. USA 91:1614-1618; Salmon et al., 1993, Proc. NatI. Acad. Sci. USA 90:11708-11712; PCT Publication No. WO 93/20242; and Brenner and Lemer, 1992, Proc. Natl. Acad. Sci. USA 89:5381-5383.

[0611] Examples of phage display libraries are described in Scott and Smith, 1990, Science 249:386-390; Devlin et al. 1990, Science, 249:404-406; Christian, R. B., et al., 1992, J. Mol. Biol. 227:711-718); Lenstra, 1992, J. Immunol. Meth. 152:149-157; Kay et al., 1993, Gene 128:59-65; and PCT Publication No. WO 94/18318 dated Aug. 18, 1994.

[0612] In vitro translation-based libraries include but are not limited to those described in PCT Publication No. WO 91/05058 dated Apr. 18, 1991; and Mattheakis et al., 1994, Proc. Natl. Acad. Sci. USA 91:9022-9026.

[0613] By way of examples of nonpeptide libraries, a benzodiazepine library (see e.g., Bunin et al., 1994, Proc. Natl. Acad. Sci. USA 91:4708-4712) can be adapted for use. Peptoid libraries (Simon et al., 1992, Proc. NatI. Acad. Sci. USA 89:9367-9371) can also be used. Another example of a library that can be used, in which the amide functionalities in peptides have been permethylated to generate a chemically transformed combinatorial library, is described by Ostresh et al. (1994, Proc. Natl. Acad. Sci. USA 91:11138-11142).

[0614] The variety of non-peptide libraries that are useful in the present invention is great. For example, Ecker and Crooke, 1995, Bio/Technology 13:351-360 list benzodiazepines, hydantoins, piperazinediones, biphenyls, sugar analogs, beta-mercaptoketones, arylacetic acids, acylpiperidines, benzopyrans, cubanes, xanthines, aminimides, and oxazolones as among the chemical species that form the basis of various libraries.

[0615] Non-peptide libraries can be classified broadly into two types: decorated monomers and oligomers. Decorated monomer libraries employ a relatively simple scaffold structure upon which a variety functional groups is added. Often the scaffold will be a molecule with a known useful pharmacological activity. For example, the scaffold might be the benzodiazepine structure.

[0616] Non-peptide oligomer libraries utilize a large number of monomers that are assembled together in ways that create new shapes that depend on the order of the monomers. Among the monomer units that have been used are carbamates, pyrrolinones, and morpholinos. Peptoids, peptide-like oligomers in which the side chain is attached to the alpha amino group rather than the alpha carbon, form the basis of another version of non-peptide oligomer libraries. The first non-peptide oligomer libraries utilized a single type of monomer and thus contained a repeating backbone. Recent libraries have utilized more than one monomer, giving the libraries added flexibility.

[0617] Screening the libraries can be accomplished by any of a variety of commonly known methods. See, e.g., the following references, which disclose screening of peptide libraries: Parmley and Smith, 1989, Adv. Exp. Med. Biol. 251:215-218; Scott and Smith, 1990, Science 249:386-390; Fowlkes et al., 1992; BioTechniques 13:422-427; Oldenburg et al., 1992, Proc. Natl. Acad. Sci. USA 89:5393-5397; Yu et al., 1994, Cell 76:933-945; Staudt et al., 1988, Science 241:577-580; Bock et al., 1992, Nature 355:564-566; Tuerk et al., 1992, Proc. Natl. Acad. Sci. USA 89:6988-6992; Ellington et al., 1992, Nature 355:850-852; U.S. Pat. No. 5,096,815, U.S. Pat. No. 5,223,409, and U.S. Pat. No. 5,198,346, all to Ladner et al.; Rebar and Pabo, 1993, Science 263:671-673; and CT Publication No. WO 94/18318.

[0618] In a specific embodiment, screening to identify a molecule that binds polypeptides of the invention can be carried out by contacting the library members with polypeptides of the invention immobilized on a solid phase and harvesting those library members that bind to the polypeptides of the invention. Examples of such screening methods, termed “panning” techniques are described by way of example in Parmley and Smith, 1988, Gene 73:305-318; Fowlkes et al., 1992, BioTechniques 13:422427; PCT Publication No. WO 94/18318; and in references cited herein.

[0619] In another embodiment, the two-hybrid system for selecting interacting proteins in yeast (Fields and Song, 1989, Nature 330:245-246; Chien et al., 1991, Proc. Natl. Acad. Sci. USA 88:9578-9582) can be used to identify molecules that specifically bind to polypeptides of the invention.

[0620] Where the binding molecule is a polypeptide, the polypeptide can be conveniently selected from any peptide library, including random peptide libraries, combinatorial peptide libraries, or biased peptide libraries. The term “biased” is used herein to mean that the method of generating the library is manipulated so as to restrict one or more parameters that govem the diversity of the resulting collection of molecules, in this case poptides.

[0621] Thus, a truly random peptide library would generate a collection of peptides in which the probability of finding a particular amino acid at a given position of the peptide is the same for all 20 amino acids. A bias can be introduced into the library, however, by specifying, for example, lysine occur every fifth amino acid or that positions 4, 8, and 9 of a decapeptide library be fixed to include only arginine. Clearly, many types of biases can be contemplated, and the present invention is not restricted to any particular bias. Furthermore, the present invention contemplates specific types of peptide libraries, such as phage displayed peptide libraries and those that utilize a DNA construct comprising a lambda phage vector with a DNA insert.

[0622] As mentioned above, in the case of a binding molecule that is a polypeptide, the polypeptide may have about 6 to less than about 60 amino acid residues, preferably about 6 to about 10 amino acid residues, and most preferably, about 6 to about 22 amino acids. In another embodiment, a binding polypeptide has in the range of 15-100 amino acids, or 20-50 amino acids.

[0623] The selected binding polypeptide can be obtained by chemical synthesis or recombinant expression.

Other Activities

[0624] A polypeptide, polynucleotide, agonist, or antagonist of the present invention, as a result of the ability to stimulate vascular endothelial cell growth, may be employed in treatment for stimulating re-vascularization of ischemic tissues due to various disease conditions such as thrombosis, arteriosclerosis, and other cardiovascular conditions. The polypeptide, polynucleotide, agonist, or antagonist of the present invention may also be employed to stimulate angiogenesis and limb regeneration, as discussed above.

[0625] A polypeptide, polynucleotide, agonist, or antagonist of the present invention may also be employed for treating wounds due to injuries, burns, post-operative tissue repair, and ulcers since they are mitogenic to various cells of different origins, such as fibroblast cells and skeletal muscle cells, and therefore, facilitate the repair or replacement of damaged or diseased tissue.

[0626] A polypeptide, polynucleotide, agonist, or antagonist of the present invention may also be employed stimulate neuronal growth and to treat and prevent neuronal damage which occurs in certain neuronal disorders or neuro-degenerative conditions such as Alzheimer's disease, Parkinson's disease, and AIDS-related complex. A polypeptide, polynucleotide, agonist, or antagonist of the present invention may have the ability to stimulate chondrocyte growth, therefore, they may be employed to enhance bone and periodontal regeneration and aid in tissue transplants or bone grafts.

[0627] A polypeptide, polynucleotide, agonist, or antagonist of the present invention may be also be employed to prevent skin aging due to sunburn by stimulating keratinocyte growth.

[0628] A polypeptide, polynucleotide, agonist, or antagonist of the present invention may also be employed for preventing hair loss, since FGF family members activate hair-forming cells and promotes melanocyte growth. Along the same lines, a polypeptide, polynucleotide, agonist, or antagonist of the present invention may be employed to stimulate growth and differentiation of hematopoietic cells and bone marrow cells when used in combination with other cytokines.

[0629] A polypeptide, polynucleotide, agonist, or antagonist of the present invention may also be employed to maintain organs before transplantation or for supporting cell culture of primary tissues. A polypeptide, polynucleotide, agonist, or antagonist of the present invention may also be employed for inducing tissue of mesodermal origin to differentiate in early embryos.

[0630] A polypeptide, polynucleotide, agonist, or antagonist of the present invention may also increase or decrease the differentiation or proliferation of embryonic stem cells, besides, as discussed above, hematopoietic lineage.

[0631] A polypeptide, polynucleotide, agonist, or antagonist of the present invention may also be used to modulate mammalian characteristics, such as body height, weight, hair color, eye color, skin, percentage of adipose tissue, pigmentation, size, and shape (e.g., cosmetic surgery). Similarly, a polypeptide, polynucleotide, agonist, or antagonist of the present invention may be used to modulate mammalian metabolism affecting catabolism, anabolism, processing, utilization, and storage of energy.

[0632] A polypeptide, polynucleotide, agonist, or antagonist of the present invention may be used to change a mammal's mental state or physical state by influencing biorhythms, caricadic rhythms, depression (including depressive disorders), tendency for violence, tolerance for pain, reproductive capabilities (preferably by Activin or Inhibin-like activity), hormonal or endocrine levels, appetite, libido, memory, stress, or other cognitive qualities.

[0633] A polypeptide, polynucleotide, agonist, or antagonist of the present invention may also be used as a food additive or preservative, such as to increase or decrease storage capabilities, fat content, lipid, protein, carbohydrate, vitamins, minerals, cofactors or other nutritional components.

[0634] The above-recited applications have uses in a wide variety of hosts. Such hosts include, but are not limited to, human, murine, rabbit, goat, guinea pig, camel, horse, mouse, rat, hamster, pig, micro-pig, chicken, goat, cow, sheep, dog, cat, non-human primate, and human. In specific embodiments, the host is a mouse, rabbit, goat, guinea pig, chicken, rat, hamster, pig, sheep, dog or cat. In preferred embodiments, the host is a mammal. In most preferred embodiments, the host is a human.

### Other Preferred Embodiments

[0635] Other preferred embodiments of the claimed invention include an isolated nucleic acid molecule comprising a nucleotide sequence which is at least 95% identical to a sequence of at least about 50 contiguous nucleotides in the nucleotide sequence of SEQ ID NO:X or the complementary strand thereto, the nucleotide sequence as defined in column 5 of Table 1B.1 or columns 8 and 9 of Table 2 complementary strand thereto, and/or cDNA contained in ATCC Deposit No:Z.

[0636] Also preferred is a nucleic acid molecule wherein said sequence of contiguous nucleotides is included in the nucleotide sequence of the portion of SEQ ID NO:X as defined in column 5, “ORF (From-To)”, in Table 1B.1.

[0637] Also preferred is a nucleic acid molecule wherein said sequence of contiguous nucleotides is included in the nucleotide sequence of the portion of SEQ ID NO:X as defined in columns 8 and 9, “NT From” and “NT To” respectively, in Table 2.

[0638] Also preferred is an isolated nucleic acid molecule comprising a nucleotide sequence which is at least 95% identical to a sequence of at least about 150 contiguous nucleotides in the nucleotide sequence of SEQ ID NO:X or the complementary strand thereto, the nucleotide sequence as define in column 5 of Table 1B.1 or columns 8 and 9 of Table 2 or the complementary strand thereto, and/or cDNA contained in ATCC Deposit No:Z.

[0639] Further preferred is an isolated nucleic acid molecule comprising a nucleotide sequence which is at least 95% identical to a sequence of at least about 500 contiguous nucleotides in the nucleotide sequence of SEQ ID NO:X or the complementary strand thereto, the nucleotide sequence as defined in column 5 of Table 1B. 1 or columns 8 and 9 of Table 2 or the complementary strand thereto, and/or cDNA contained in ATCC Deposit No:Z.

[0640] A further preferred embodiment is a nucleic acid molecule comprising a nucleotide sequence which is at least 95% identical to the nucleotide sequence of the portion of SEQ ID NO:X defined in column 5, “ORF (From-To)”, in Table 1B.1.

[0641] A further preferred embodiment is a nucleic acid molecule comprising a nucleotide sequence which is at least 95% identical to the nucleotide sequence of the portion of SEQ ID NO:X defined in columns 8 and 9, “NT From” and “NT To”, respectively, in Table 2.

[0642] A further preferred embodiment is an isolated nucleic acid molecule comprising a nucleotide sequence which is at least 95% identical to the complete nucleotide sequence of SEQ ID NO:X or the complementary strand thereto, the nucleotide sequence as defined in column 5 of Table 1B.1 or columns 8 and 9 of Table 2 or the complementary strand thereto, and/or cDNA contained in ATCC Deposit No:Z.

[0643] Also preferred is an isolated nucleic acid molecule which hybridizes under stringent hybridization conditions to a nucleic acid molecule comprising a nucleotide sequence of SEQ ID NO:X or the complementary strand thereto, the nucleotide sequence as defined in column 5 of Table 1B.1 or columns 8 and 9 of Table 2 or the complementary strand thereto, and/or cDNA contained in ATCC Deposit No:Z, wherein said nucleic acid molecule which hybridizes does not hybridize under stringent hybridization conditions to a nucleic acid molecule having a nucleotide sequence consisting of only A residues or of only T residues.

[0644] Also preferred is a composition of matter comprising a DNA molecule which comprises the cDNA contained in ATCC Deposit No:Z.

[0645] Also preferred is an isolated nucleic acid molecule comprising a nucleotide sequence which is at least 95% identical to a sequence of at least 50 contiguous nucleotides of the cDNA sequence contained in ATCC Deposit No:Z.

[0646] Also preferred is an isolated nucleic acid molecule, wherein said sequence of at least 50 contiguous nucleotides is included in the nucleotide sequence of an open reading frame sequence encoded by cDNA contained in ATCC Deposit No:Z.

[0647] Also preferred is an isolated nucleic acid molecule comprising a nucleotide sequence which is at least 95% identical to sequence of at least 150 contiguous nucleotides in the nucleotide sequence encoded by cDNA contained in ATCC Deposit No:Z.

[0648] A further preferred embodiment is an isolated nucleic acid molecule comprising a nucleotide sequence which is at least 95% identical to sequence of at least 500 contiguous nucleotides in the nucleotide sequence encoded by cDNA contained in ATCC Deposit No:Z.

[0649] A further preferred embodiment is an isolated nucleic acid molecule comprising a nucleotide sequence which is at least 95% identical to the complete nucleotide sequence encoded by cDNA contained in ATCC Deposit No:Z.

[0650] A further preferred embodiment is a method for detecting in a biological sample a nucleic acid molecule comprising a nucleotide sequence which is at least 95% identical to a sequence of at least 50 contiguous nucleotides in a sequence selected from the group consisting of: a nucleotide sequence of SEQ ID NO:X or the complementary strand thereto; the nucleotide sequence as defined in column 5 of Table 1B.1 or columns 8 and 9 of Table 2 or the complementary strand thereto; and a nucleotide sequence encoded by cDNA contained in ATCC Deposit No:Z; which method comprises a step of comparing a nucleotide sequence of at least one nucleic acid molecule in said sample with a sequence selected from said group and determining whether the sequence of said nucleic acid molecule in said sample is at least 95% identical to said selected sequence.

[0651] Also preferred is the above method wherein said step of comparing sequences comprises determining the extent of nucleic acid hybridization between nucleic acid molecules in said sample and a nucleic acid molecule comprising said sequence selected from said group. Similarly, also preferred is the above method wherein said step of comparing sequences is performed by comparing the nucleotide sequence determined from nucleic acid molecule in said sample with said sequence selected from said group. The nucleic acid molecules can comprise DNA molecules or RNA molecules.

[0652] A further preferred embodiment is a method for identifying the species, tissue or cell type of a biological sample which method comprises a step of detecting nucleic acid molecules in said sample, if any, comprising a nucleotide sequence that is at least 95% identical to a sequence of at least 50 contiguous nucleotides in a sequence selected from the group consisting of: a nucleotide sequence of SEQ ID NO:X or the complementary strand thereto; the nucleotide sequence as defined in column 5 of Table 1B.1 or columns 8 and 9 of Table 2 or the complementary strand thereto; and a nucleotide sequence of the cDNA contained in ATCC Deposit No:Z.

[0653] The method for identifying the species, tissue or cell type of a biological sample can comprise a step of detecting nucleic acid molecules comprising a nucleotide sequence in a panel of at least two nucleotide sequences, wherein at least one sequence in said panel is at least 95% identical to a sequence of at least 50 contiguous nucleotides in a sequence selected from said group.

[0654] Also preferred is a method for diagnosing in a subject a pathological condition associated with abnormal structure or expression of a nucleotide sequence of SEQ ID NO:X or the complementary strand thereto; the nucleotide sequence as defined in column 5 of Table 1B.1 or columns 8 and 9 of Table 2 or the complementary strand thereto; or the cDNA contained in ATCC Deposit No:Z which encodes a protein, wherein the method comprises a step of detecting in a biological sample obtained from said subject nucleic acid molecules, if any, comprising a nucleotide sequence that is at least 95% identical to a sequence of at least 50 contiguous nucleotides in a sequence selected from the group consisting of: a nucleotide sequence of SEQ ID NO:X or the complementary strand thereto; the nucleotide sequence as defined in column 5 of Table 1B.1 or columns 8 and 9 of Table 2 or the complementary strand thereto; and a nucleotide sequence of cDNA contained in ATCC Deposit No:Z.

[0655] The method for diagnosing a pathological condition can comprise a step of detecting nucleic acid molecules comprising a nucleotide sequence in a panel of at least two nucleotide sequences, wherein at least one sequence in said panel is at least 95% identical to a sequence of at least 50 contiguous nucleotides in a sequence selected from said group.

[0656] Also preferred is a composition of matter comprising isolated nucleic acid molecules wherein the nucleotide sequences of said nucleic acid molecules comprise a panel of at least two nucleotide sequences, wherein at least one sequence in said panel is at least 95% identical to a sequence of at least 50 contiguous nucleotides in a sequence selected from the group consisting of: a nucleotide sequence of SEQ ID NO:X or the complementary strand thereto; the nucleotide sequence as defined in column 5 of Table 1B.1 or columns 8 and 9 of Table 2 or the complementary strand thereto; and a nucleotide sequence encoded by cDNA contained in ATCC Deposit No:Z. The nucleic acid molecules can comprise DNA molecules or RNA molecules.

[0657] Also preferred is a composition of matter comprising isolated nucleic acid molecules wherein the nucleotide sequences of said nucleic acid molecules comprise a DNA microarray or “chip” of at least 1, 2, 3, 4, 5, 6, 7, 8, 9, 10, 15, 20, 25, 30, 40, 50, 100, 150, 200, 250 300, 500, 1000, 2000, 3000, or 4000 nucleotide sequences, wherein at least one sequence in said DNA microarray or “chip” is at least 95% identical to a sequence of at least 50 contiguous nucleotides in a sequence selected from the group consisting of: a nucleotide sequence of SEQ ID NO:X wherein X is any integer as defined in Table 1A and/or Table 1B.1; and a nucleotide sequence encoded by a human cDNA clone identified by a cDNA “Clone ID” in Table 1A and/or Table 1B.1.

[0658] Also preferred is an isolated polypeptide comprising an amino acid sequence at least 90% identical to a sequence of at least about 10 contiguous amino acids in the polypeptide sequence of SEQ ID NO:Y; a polypeptide encoded by SEQ ID NO:X or the complementary strand thereto; the polypeptide encoded by the nucleotide sequence as defined in columns 8 and 9 of Table 2; and/or a polypeptide encoded by cDNA contained in ATCC Deposit No:Z.

[0659] Also preferred is an isolated polypeptide comprising an amino acid sequence at least 95% identical to a sequence of at least about 30 contiguous amino acids in the amino acid sequence of SEQ ID NO:Y; a polypeptide encoded by SEQ ID NO:X or the complementary strand thereto; the polypeptide encoded by the nucleotide sequence as defined in columns 8 and 9 of Table 2; and/or a polypeptide encoded by cDNA contained in ATCC Deposit No:Z.

[0660] Further preferred is an isolated polypeptide comprising an amino acid sequence at least 95% identical to a sequence of at least 100 contiguous amino acids in the amino acid sequence of SEQ ID NO:Y; a polypeptide encoded by SEQ ID NO:X or the complementary strand thereto; the polypeptide encoded by the nucleotide sequence as defined in columns 8 and 9 of Table 2; and/or a polypeptide encoded by cDNA contained in ATCC Deposit No:Z.

[0661] Further preferred is an isolated polypeptide comprising an amino acid sequence at least 95% identical to the complete amino acid sequence of SEQ ID NO:Y; a polypeptide encoded by SEQ ID NO:X or the complementary strand thereto; the polypeptide encoded by the nucleotide sequence as defined in columns 8 and 9 of Table 2; and/or a polypeptide encoded by cDNA contained in ATCC Deposit No:Z.

[0662] Further preferred is an isolated polypeptide comprising an amino acid sequence at least 90% identical to a sequence of at least about 10 contiguous amino acids in the complete amino acid sequence of a polypeptide encoded by contained in ATCC Deposit No:Z

[0663] Also preferred is a polypeptide wherein said sequence of contiguous amino acids is included in the amino acid sequence of a portion of said polypeptide encoded by cDNA contained in ATCC Deposit No:Z; a polypeptide encoded by SEQ ID NO:X or the complementary strand thereto; the polypeptide encoded by the nucleotide sequence as defined in columns 8 and 9 of Table 2; and/or the polypeptide sequence of SEQ ID NO:Y.

[0664] Also preferred is an isolated polypeptide comprising an amino acid sequence at least 95% identical to a sequence of at least about 30 contiguous amino acids in the amino acid sequence of a polypeptide encoded by the cDNA contained in ATCC Deposit No:Z.

[0665] Also preferred is an isolated polypeptide comprising an amino acid sequence at least 95% identical to a sequence of at least about 100 contiguous amino acids in the amino acid sequence of a polypeptide encoded by cDNA contained in ATCC Deposit No:Z.

[0666] Also preferred is an isolated polypeptide comprising an amino acid sequence at least 95% identical to the amino acid sequence of a polypeptide encoded by the cDNA contained in ATCC Deposit No:Z.

[0667] Further preferred is an isolated antibody which binds specifically to a polypeptide comprising an amino acid sequence that is at least 90% identical to a sequence of at least 10 contiguous amino acids in a sequence selected from the group consisting of: a polypeptide sequence of SEQ ID NO:Y; a polypeptide encoded by SEQ ID NO:X or the complementary strand thereto; the polypeptide encoded by the nucleotide sequence as defined in columns 8 and 9 of Table 2; and a polypeptide encoded by the cDNA contained in ATCC Deposit No:Z.

[0668] Further preferred is a method for detecting in a biological sample a polypeptide comprising an amino acid sequence which is at least 90% identical to a sequence of at least 10 contiguous amino acids in a sequence selected from the group consisting of: a polypeptide sequence of SEQ ID NO:Y; a polypeptide encoded by SEQ ID NO:X or the complementary strand thereto; the polypeptide encoded by the nucleotide sequence as defined in columns 8 and 9 of Table 2; and a polypeptide encoded by the cDNA contained in ATCC Deposit No:Z; which method comprises a step of comparing an amino acid sequence of at least one polypeptide molecule in said sample with a sequence selected from said group and determining whether the sequence of said polypeptide molecule in said sample is at least 90% identical to said sequence of at least 10 contiguous amino acids.

[0669] Also preferred is the above method wherein said step of comparing an amino acid sequence of at least one polypeptide molecule in said sample with a sequence selected from said group comprises determining the extent of specific binding of polypeptides in said sample to an antibody which binds specifically to a polypeptide comprising an amino acid sequence that is at least 90% identical to a sequence of at least 10 contiguous amino acids in a sequence selected from the group consisting of: a polypeptide sequence of SEQ ID NO:Y; a polypeptide encoded by SEQ ID NO:X or the complementary strand thereto; the polypeptide encoded by the nucleotide sequence as defined in columns 8 and 9 of Table 2; and a polypeptide encoded by the cDNA contained in ATCC Deposit No:Z.

[0670] Also preferred is the above method wherein said step of comparing sequences is performed by comparing the amino acid sequence determined from a polypeptide molecule in said sample with said sequence selected from said group.

[0671] Also preferred is a method for identifying the species, tissue or cell type of a biological sample which method comprises a step of detecting polypeptide molecules in said sample, if any, comprising an amino acid sequence that is at least 90% identical to a sequence of at least 10 contiguous amino acids in a sequence selected from the group consisting of: polypeptide sequence of SEQ ID NO:Y; a polypeptide encoded by SEQ ID NO:X or the complementary strand thereto; the polypeptide encoded by the nucleotide sequence as defined in columns 8 and 9 of Table 2; and a polypeptide encoded by the cDNA contained in ATCC Deposit No:Z.

[0672] Also preferred is the above method for identifying the species, tissue or cell type of a biological sample, which method comprises a step of detecting polypeptide molecules comprising an amino acid sequence in a panel of at least two amino acid sequences, wherein at least one sequence in said panel is at least 90% identical to a sequence of at least 10 contiguous amino acids in a sequence selected from the above group.

[0673] Also preferred is a method for diagnosing in a subject a pathological condition associated with abnormal structure or expression of a nucleic acid sequence identified in Table 1A, 1B or Table 2 encoding a polypeptide, which method comprises a step of detecting in a biological sample obtained from said subject polypeptide molecules comprising an amino acid sequence in a panel of at least two amino acid sequences, wherein at least one sequence in said panel is at least 90% identical to a sequence of at least 10 contiguous amino acids in a sequence selected from the group consisting of: polypeptide sequence of SEQ ID NO:Y; a polypeptide encoded by SEQ ID NO:X or the complementary strand thereto; the polypeptide encoded by the nucleotide sequence as defined in columns 8 and 9 of Table 2; and a polypeptide encoded by the cDNA contained in ATCC Deposit No:Z.

[0674] In any of these methods, the step of detecting said polypeptide molecules includes using an antibody.

[0675] Also preferred is an isolated nucleic acid molecule comprising a nucleotide sequence which is at least 95% identical to a nucleotide sequence encoding a polypeptide wherein said polypeptide comprises an amino acid sequence that is at least 90% identical to a sequence of at least 10 contiguous amino acids in a sequence selected from the group consisting of: polypeptide sequence of SEQ ID NO:Y; a polypeptide encoded by SEQ ID NO:X or the complementary strand thereto; the polypeptide encoded by the nucleotide sequence as defined in columns 8 and 9 of Table 2; and a polypeptide encoded by the cDNA contained in ATCC Deposit No:Z.

[0676] Also preferred is an isolated nucleic acid molecule, wherein said nucleotide sequence encoding a polypeptide has been optimized for expression of said polypeptide in a prokaryotic host.

[0677] Also preferred is a polypeptide molecule, wherein said polypeptide comprises an amino acid sequence selected from the group consisting of: polypeptide sequence of SEQ ID NO:Y; a polypeptide encoded by SEQ ID NO:X or the complementary strand thereto; the polypeptide encoded by the nucleotide sequence as defined in columns 8 and 9 of Table 2; and a polypeptide encoded by the cDNA contained in ATCC Deposit No:Z.

[0678] Further preferred is a method of making a recombinant vector comprising inserting any of the above isolated nucleic acid molecule into a vector. Also preferred is the recombinant vector produced by this method. Also preferred is a method of making a recombinant host cell comprising introducing the vector into a host cell, as well as the recombinant host cell produced by this method.

[0679] Also preferred is a method of making an isolated polypeptide comprising culturing this recombinant host cell under conditions such that said polypeptide is expressed and recovering said polypeptide. Also preferred is this method of making an isolated polypeptide, wherein said recombinant host cell is a eukaryotic cell and said polypeptide is a human protein comprising an amino acid sequence selected from the group consisting of: polypeptide sequence of SEQ ID NO:Y; a polypeptide encoded by SEQ ID NO:X or the complementary strand thereto; the polypeptide encoded by the nucleotide sequence as defined in columns 8 and 9 of Table 2; and a polypeptide encoded by the cDNA contained in ATCC Deposit No.Z. The isolated polypeptide produced by this method is also preferred.

[0680] Also preferred is a method of treatment of an individual in need of an increased level of a protein activity, which method comprises administering to such an individual a Therapeutic comprising an amount of an isolated polypeptide, polynucleotide, immunogenic fragment or analogue thereof, binding agent, antibody, or antigen binding fragment of the claimed invention effective to increase the level of said protein activity in said individual.

[0681] Also preferred is a method of treatment of an individual in need of a decreased level of a protein activity, which method comprised administering to such an individual a Therapeutic comprising an amount of an isolated polypeptide, polynucleotide, immunogenic fragment or analogue thereof, binding agent, antibody, or antigen binding fragment of the claimed invention effective to decrease the level of said protein activity in said individual.

[0682] Also preferred is a method of treatment of an individual in need of a specific delivery of toxic compositions to diseased cells (e.g., tumors, leukemias or lymphomas), which method comprises administering to such an individual a Therapeutic comprising an amount of an isolated polypeptide of the invention, including, but not limited to a binding agent, or antibody of the claimed invention that are associated with toxin or cytotoxic prodrugs.

[0683] Having generally described the invention, the same will be more readily understood by reference to the following examples, which are provided by way of illustration and are not intended as limiting.

[0684] Description of Table 6

[0685] Table 6 summarizes some of the ATCC Deposits, Deposit dates, and ATCC designation numbers of deposits made with the ATCC in connection with the present application. These deposits were made in addition to those described in the Table 1A.

TABLE 6

| ATCC Deposits | Deposit Date | ATCC Designation Number |
|---|---|---|
| LP01, LP02, LP03, | May-20-97 | 209059, 209060, 209061, 209062, |
| LP04, LP05, LP06, | | 209063, 209064, 209065, |
| LP07, LP08, LP09, | | 209066, 209067, 209068, 209069 |
| LP10, LP11, | | |
| LP12 | Jan-12-98 | 209579 |
| LP13 | Jan-12-98 | 209578 |
| LP14 | Jul-16-98 | 203067 |
| LP15 | Jul-16-98 | 203068 |
| LP16 | Feb-1-99 | 203609 |
| LP17 | Feb-1-99 | 203610 |
| LP20 | Nov-17-98 | 203485 |
| LP21 | Jun-18-99 | PTA-252 |
| LP22 | Jun-18-99 | PTA-253 |
| LP23 | Dec-22-99 | PTA-1081 |

### EXAMPLES

### Example 1

### Isoladon of a Selected cDNA Clone from the Deposited Sample

[0686] Each ATCC Deposit No:Z is contained in a plasmid vector. Table 7 identifies the vectors used to construct the cDNA library from which each clone was isolated. In many cases, the vector used to construct the library is a phage vector from which a plasmid has been excised. The following correlates the related plasmid for each phage vector used in constructing the cDNA library. For example, where a particular clone is identified in Table 7 as being isolated in the vector “Lambda Zap,” the corresponding deposited clone is in “pBluescript.”

| Vector Used to | Corresponding |
|---|---|
| Construct Library | Deposited Plasmid |
| Lambda Zap | pBluescript (pBS) |
| Uni-Zap XR | pBluescript (pBS) |
| Zap Express | pBK |
| lafmid BA | plafmid BA |
| pSport1 | pSport1 |
| pCMVSport 2.0 | pCMVSport 2.0 |
| pCMVSport 3.0 | pCMVSport 3.0 |
| pCR ® 2.1 | pCR ® 2.1 |

[0687] Vectors Lambda Zap (U.S. Pat. Nos. 5,128,256 and 5,286,636), Uni-Zap XR (U.S. Pat. Nos. 5,128,256 and 5,286,636), Zap Express (U.S. Pat. Nos. 5,128,256 and 5,286,636), pBluescript (pBS) (Short, J. M. et al., Nucleic Acids Res. 16:7583-7600 (1988); Alting-Mees, M. A. and Short, J. M., Nucleic Acids Res. 17:9494 (1989)) and pBK (Alting-Mees, M. A. et al., Strategies 5:58-61 (1992)) are commercially available from Stratagene Cloning Systems, Inc., 11011 N. Torrey Pines Road, La Jolla, Calif., 92037. pBS contains an ampicillin resistance gene and pBK contains a neomycin resistance gene. Both can be transformed into E. coli strain XL-1 Blue, also available from Stratagene. pBS comes in 4 forms SK+, SK−, KS+ and KS. The S and K refers to the orientation of the polylinker to the T7 and T3 primer sequences which flank the polylinker region (“S” is for SacI and “K” is for KpnI which are the first sites on each respective end of the linker). “+” or “−” refer to the orientation of the f1 origin of replication (“on”), such that in one orientation, single stranded rescue initiated from the f1 ori generates sense strand DNA and in the other, antisense.

[0688] Vectors pSport1, pCMVSport 2.0 and pCMVSport 3.0, were obtained from Life Technologies, Inc., P.O. Box 6009, Gaithersburg, Md. 20897. All Sport vectors contain an ampicillin resistance gene and may be transformed into E. coli strain DH10B, also available from Life Technologies. (See, for instance, Gruber, C. E., et al., Focus 15:59 (1993)). Vector lafmid BA (Bento Soares, Columbia University, NY) contains an ampicillin resistance gene and can be transformed into E. coli strain XL-1 Blue. Vector pCR®2.1, which is available from Invitrogen, 1600 Faraday Avenue, Carlsbad, Calif. 92008, contains an ampicillin resistance gene and may be transformed into E. coli strain DH10B, available from Life Technologies. (See, for instance, Clark, J. M., Nuc. Acids Res. 16:9677-9686 (1988) and Mead, D. et al., Bio/Technology 9: (1991)). Preferably, a polynucleotide of the present invention does not comprise the phage vector sequences identified for the particular clone in Table 7 as well as the corresponding plasmid vector sequences designated above.

[0689] The deposited material in the sample assigned the ATCC Deposit Number cited by reference to Table 1A, Table 2, Table 6 and Table 7 for any given cDNA clone also may contain one or more additional plasmids, each comprising a cDNA clone different from that given clone. Thus, deposits sharing the same ATCC Deposit Number contain at least a plasmid for each ATCC Deposit No:Z.

TABLE 7

| | | | ATCC |
|---|---|---|---|
| Libraries owned by Catalog | Catalog Description | Vector | Deposit |
| HUKA HUKB HUKC HUKD HUKE HUKF | Human Uterine Cancer | Lambda ZAP II | LP01 |
| HUKG | | | |
| HCNA HCNB | Human Colon | Lambda Zap II | LP01 |
| HFFA | Human Fetal Brain, random primed | Lambda Zap II | LP01 |
| HTWA | Resting T-Cell | Lambda ZAP II | LP01 |
| HBQA | Early Stage Human Brain, random primed | Lambda ZAP II | LP01 |
| HLMB HLMF HLMG HLMH HLMI HLMJ | breast lymph node CDNA library | Lambda ZAP II | LP01 |
| HLMM HLMN | | | |
| HCQA HCQB | human colon cancer | Lamda ZAP II | LP01 |
| HMEA HMEC HMED HMEE HMEF | Human Microvascular Endothelial Cells, | Lambda ZAP II | LP01 |
| HMEG HMEI HMEJ HMEK HMEL | fract. A | | |
| HUSA HUSC | Human Umbilical Vein Endothelial Cells, | Lambda ZAP II | LP01 |
| | fract. A | | |
| HLQA HLQB | Hepatocellular Tumor | Lambda ZAP II | LP01 |
| HHGA HHGB HHGC HHGD | Hemangiopericytoma | Lambda ZAP II | LP01 |
| HSDM | Human Striatum Depression, re-rescue | Lambda ZAP II | LP01 |
| HUSH | H Umbilical Vein Endothelial Cells, frac A, | Lambda ZAP II | LP01 |
| | re-excision | | |
| HSGS | Salivary gland, subtracted | Lambda ZAP II | LP01 |
| HFXA HFXB HFXC HFXD HFXE HFXF | Brain frontal cortex | Lambda ZAP II | LP01 |
| HFXG HFXH | | | |
| HPQA HPQB HPQC | PERM TF274 | Lambda ZAP II | LP01 |
| HFXJ HFXK | Brain Frontal Cortex, re-excision | Lambda ZAP II | LP01 |
| HCWA HCWB HCWC HCWD HCWE | CD34 positive cells (Cord Blood) | ZAP Express | LP02 |
| HCWF HCWG HCWH HCWI HCWJ | | | |
| HCWK | | | |
| HCUA HCUB HCUC | CD34 depleted Buffy Coat (Cord Blood) | ZAP Express | LP02 |
| HRSM | A-14 cell line | ZAP Express | LP02 |
| HRSA | A1-CELL LINE | ZAP Express | LP02 |
| HCUD HCUE HCUF HCUG HCUH HCUI | CD34 depleted Buffy Coat (Cord Blood), re- | ZAP Express | LP02 |
| | excision | | |
| HBXE HBXF HBXG | H. Whole Brain #2, re-excision | ZAP Express | LP02 |
| HRLM | L8 cell line | ZAP Express | LP02 |
| HBXA HBXB HBXC HBXD | Human Whole Brain #2 - Oligo dT >1.5 Kb | ZAP Express | LP02 |
| HUDA HUDB HUDC | Testes | ZAP Express | LP02 |
| HHTM HHTN HHTO | H. hypothalamus, frac A; re-excision | ZAP Express | LP02 |
| HHTL | H. hypothalamus, frac A | ZAP Express | LP02 |
| HASA HASD | Human Adult Spleen | Uni-ZAP XR | LP03 |
| HFKC HFKD HFKE HFKF HFKG | Human Fetal Kidney | Uni-ZAP XR | LP03 |
| HE8A HE8B HE8C HE8D HE8E HE8F | Human 8 Week Whole Embryo | Uni-ZAP XR | LP03 |
| HE8M HE8N | | | |
| HGBA HGBD HGBE HGBF HGBG HGBH | Human Gall Bladder | Uni-ZAP XR | LP03 |
| HGBI | | | |
| HLHA HLHB HLHC HLHD HLHE HLHF | Human Fetal Lung III | Uni-ZAP XR | LP03 |
| HLHG HLHH HLHQ | | | |
| HPMA HPMB HPMC HPMD HPME HPMF | Human Placenta | Uni-ZAP XR | LP03 |
| HPMG HPMH | | | |
| HPRA HPRB HPRC HPRD | Human Prostate | Uni-ZAP XR | LP03 |
| HSIA HSIC HSID HSIE | Human Adult Small Intestine | Uni-ZAP XR | LP03 |
| HTEA HTEB HTEC HTED HTEE HTEF | Human Testes | Uni-ZAP XR | LP03 |
| HTEG HTEH HTEI HTEJ HTEK | | | |
| HTPA HTPB HTPC HTPD HTPE | Human Pancreas Tumor | Uni-ZAP XR | LP03 |
| HTTA HTTB HTTC HTTD HTTE HTTF | Human Testes Tumor | Uni-ZAP XR | LP03 |
| HAPA HAPB HAPC HAPM | Human Adult Pulmonary | Uni-ZAP XR | LP03 |
| HETA HETB HETC HETD HETE HETF | Human Endometrial Tumor | Uni-ZAP XR | LP03 |
| HETG HETH HETI | | | |
| HHFB HHFC HHFD HHFE HHFF HHFG | Human Fetal Heart | Uni-ZAP XR | LP03 |
| HHFH HHFI | | | |
| HHPB HHPC HHPD HHPE HHPF HHPG | Human Hippocampus | Uni-ZAP XR | LP03 |
| HHPH | | | |
| HCE1 HCE2 HCE3 HCE4 HCE5 HCEB | Human Cerebellum | Uni-ZAP XR | LP03 |
| HCEC HCED HCEE HCEF HCEG | | | |
| HUVB HUVC HUVD HUVE | Human Umbilical Vein, Endo. remake | Uni-ZAP XR | LP03 |
| HSTA HSTB HSTC HSTD | Human Skin Tumor | Uni-ZAP XR | LP03 |
| HTAA HTAB HTAC HTAD HTAE | Human Activated T-Cells | Uni-ZAP XR | LP03 |
| HFEA HFEB HFEC | Human Fetal Epithelium (Skin) | Uni-ZAP XR | LP03 |
| HJPA HJPB HJPC HJPD | HUMAN JURKAT MEMBRANE BOUND | Uni-ZAP XR | LP03 |
| | POLYSOMES | | |
| HESA | Human epithelioid sarcoma | Uni-Zap XR | LP03 |
| HLTA HLTB HLTC HLTD HLTE HLTF | Human T-Cell Lymphoma | Uni-ZAP XR | LP03 |
| HFTA HFTB HFTC HFTD | Human Fetal Dura Mater | Uni-ZAP XR | LP03 |
| HRDA HRDB HRDC HRDD HRDE HRDF | Human Rhabdomyosarcoma | Uni-ZAP XR | LP03 |
| HCAA HCAB HCAC | Cem cells cyclohexamide treated | Uni-ZAP XR | LP03 |
| HRGA HRGB HRGC HRGD | Raji Cells, cyclohexamide treated | Uni-ZAP XR | LP03 |
| HSUA HSUB HSUC HSUM | Supt Cells, cyclohexamide treated | Uni-ZAP XR | LP03 |
| HT4A HT4C HT4D | Activated T-Cells, 12 hrs. | Uni-ZAP XR | LP03 |
| HE9A HE9B HE9C HE9D HE9E HE9F | Nine Week Old Early Stage Human | Uni-ZAP XR | LP03 |
| HE9G HE9H HE9M HE9N | | | |
| HATA HATB HATC HATD HATE | Human Adrenal Gland Tumor | Uni-ZAP XR | LP03 |
| HT5A | Activated T-Cells, 24 hrs. | Uni-ZAP XR | LP03 |
| HFGA HFGM | Human Fetal Brain | Uni-ZAP XR | LP03 |
| HNEA HNEB HNEC HNED HNEE | Human Neutrophil | Uni-ZAP XR | LP03 |
| HBGB HBGD | Human Primary Breast Cancer | Uni-ZAP XR | LP03 |
| HBNA HBNB | Human Normal Breast | Uni-ZAP XR | LP03 |
| HCAS | Cem Cells, cyclohexamide treated, subtra | Uni-ZAP XR | LP03 |
| HHPS | Human Hippocampus, subtracted | pBS | LP03 |
| HKCS HKCU | Human Colon Cancer, subtracted | pBS | LP03 |
| HRGS | Raji cells, cyclohexamide treated, subtracted | pBS | LP03 |
| HSUT | Supt cells, cyclohexamide treated, | pBS | LP03 |
| | differentially expressed | | |
| HT4S | Activated T-Cells, 12 hrs, subtracted | Uni-ZAP XR | LP03 |
| HCDA HCDB HCDC HCDD HCDE | Human Chondrosarcoma | Uni-ZAP XR | LP03 |
| HOAA HOAB HOAC | Human Osteosarcoma | Uni-ZAP XR | LP03 |
| HTLA HTLB HTLC HTLD HTLE HTLF | Human adult testis, large inserts | Uni-ZAP XR | LP03 |
| HLMA HLMC HLMD | Breast Lymph node cDNA library | Uni-ZAP XR | LP03 |
| H6EA H6EB H6EC | HL-60, PMA 4 H | Uni-ZAP XR | LP03 |
| HTXA HTXB HTXC HTXD HTXE HTXF | Activated T-Cell (12 hs)/Thiouridine | Uni-ZAP XR | LP03 |
| HTXG HTXH | labelledEco | | |
| HNFA HNFB HNFC HNFD HNFE HNFF | Human Neutrophil, Activated | Uni-ZAP XR | LP03 |
| HNFG HNFH HNFJ | | | |
| HTOB HTOC | HUMAN TONSILS, FRACTION 2 | Uni-ZAP XR | LP03 |
| HMGB | Human OB MG63 control fraction I | Uni-ZAP XR | LP03 |
| HOPB | Human OB HOS control fraction I | Uni-ZAP XR | LP03 |
| HORB | Human OB HOS treated (10 nM E2) fraction I | Uni-ZAP XR | LP03 |
| HSVA HSVB HSVC | Human Chronic Synovitis | Uni-ZAP XR | LP03 |
| HROA | HUMAN STOMACH | Uni-ZAP XR | LP03 |
| HBJA HBJB HBJC HBJD HBJE HBJF | HUMAN B CELL LYMPHOMA | Uni-ZAP XR | LP03 |
| HBJG HBJH HBJI HBJJ HBJK | | | |
| HCRA HCRB HCRC | human corpus colosum | Uni-ZAP XR | LP03 |
| HODA HODB HODC HODD | human ovarian cancer | Uni-ZAP XR | LP03 |
| HDSA | Dermatofibrosarcoma Protuberance | Uni-ZAP XR | LP03 |
| HMWA HMWB HMWC HMWD HMWE | Bone Marrow Cell Line (RS4; 11) | Uni-ZAP XR | LP03 |
| HMWF HMWG HMWH HMWI HMWJ | | | |
| HSOA | stomach cancer (human) | Uni-ZAP XR | LP03 |
| HERA | SKIN | Uni-ZAP XR | LP03 |
| HMDA | Brain-medulloblastoma | Uni-ZAP XR | LP03 |
| HGLA HGLB HGLD | Glioblastoma | Uni-ZAP XR | LP03 |
| HEAA | H. Atrophic Endometrium | Uni-ZAP XR | LP03 |
| HBCA HBCB | H. Lymph node breast Cancer | Uni-ZAP XR | LP03 |
| HPWT | Human Prostate BPH, re-excision | Uni-ZAP XR | LP03 |
| HFVG HFVH HFVI | Fetal Liver, subtraction II | pBS | LP03 |
| HNFI | Human Neutrophils, Activated, re-excision | pBS | LP03 |
| HBMB HBMC HBMD | Human Bone Marrow, re-excision | pBS | LP03 |
| HKML HKMM HKMN | H. Kidney Medulla, re-excision | pBS | LP03 |
| HKIX HKIY | H. Kidney Cortex, subtracted | pBS | LP03 |
| HADT | H. Amygdala Depression, subtracted | pBS | LP03 |
| H6AS | H1-60, untreated, subtracted | Uni-ZAP XR | LP03 |
| H6ES | HL-60, PMA 4 H, subtracted | Uni-ZAP XR | LP03 |
| H6BS | HL-60, RA 4 h, Subtracted | Uni-ZAP XR | LP03 |
| H6CS | HL-60, PMA 1 d, subtracted | Uni-ZAP XR | LP03 |
| HTXJ HTXK | Activated T-cell(12 h)/Thiouridine-re- | Uni-ZAP XR | LP03 |
| | excision | | |
| HMSA HMSB HMSC HMSD HMSE HMSF | Monocyte activated | Uni-ZAP XR | LP03 |
| HMSG HMSH HMSI HMSJ HMSK | | | |
| HAGA HAGB HAGC HAGD HAGE HAGF | Human Amygdala | Uni-ZAP XR | LP03 |
| HSRA HSRB HSRE | STROMAL-OSTEOCLASTOMA | Uni-ZAP XR | LP03 |
| HSRD HSRF HSRG HSRH | Human Osteoclastoma Stromal Cells - | Uni-ZAP XR | LP03 |
| | unamplified | | |
| HSQA HSQB HSQC HSQD HSQE HSQF | Stromal cell TF274 | Uni-ZAP XR | LP03 |
| HSQG | | | |
| HSKA HSKB HSKC HSKD HSKE HSKF | Smooth muscle, serum treated | Uni-ZAP XR | LP03 |
| HSKZ | | | |
| HSLA HSLB HSLC HSLD HSLE HSLF | Smooth muscle, control | Uni-ZAP XR | LP03 |
| HSLG | | | |
| HSDA HSDD HSDE HSDF HSDG HSDH | Spinal cord | Uni-ZAP XR | LP03 |
| HPWS | Prostate-BPH subtracted II | pBS | LP03 |
| HSKW HSKX HSKY | Smooth Muscle-HASTE normalized | pBS | LP03 |
| HFPB HFPC HFPD | H. Frontal cortex, epileptic; re-excision | Uni-ZAP XR | LP03 |
| HSDI HSDJ HSDK | Spinal Cord, re-excision | Uni-ZAP XR | LP03 |
| HSKN HSKO | Smooth Muscle Serum Treated, Norm | pBS | LP03 |
| HSKG HSKH HSKI | Smooth muscle, serum induced, re-exc | pBS | LP03 |
| HFCA HFCB HFCC HFCD HFCE HFCF | Human Fetal Brain | Uni-ZAP XR | LP04 |
| HPTA HPTB HPTD | Human Pituitary | Uni-ZAP XR | LP04 |
| HTHB HTHC HTHD | Human Thymus | Uni-ZAP XR | LP04 |
| HE6B HE6C HE6D HE6E HE6F HE6G | Human Whole Six Week Old Embryo | Uni-ZAP XR | LP04 |
| HE6S | | | |
| HSSA HSSB HSSC HSSD HSSE HSSF | Human Synovial Sarcoma | Uni-ZAP XR | LP04 |
| HSSG HSSH HSSI HSSJ HSSK | | | |
| HE7T | 7 Week Old Early Stage Human, subtracted | Uni-ZAP XR | LP04 |
| HEPA HEPB HEPC | Human Epididymus | Uni-ZAP XR | LP04 |
| HSNA HSNB HSNC HSNM HSNN | Human Synovium | Uni-ZAP XR | LP04 |
| HPFB HPFC HPFD HPFE | Human Prostate Cancer, Stage C fraction | Uni-ZAP XR | LP04 |
| HE2A HE2D HE2E HE2H HE2I HE2M | 12 Week Old Early Stage Human | Uni-ZAP XR | LP04 |
| HE2N HE2O | | | |
| HE2B HE2C HE2F HE2G HE2P HE2Q | 12 Week Old Early Stage Human, II | Uni-ZAP XR | LP04 |
| HPTS HPTT HPTU | Human Pituitary, subtracted | Uni-ZAP XR | LP04 |
| HAUA HAUB HAUC | Amniotic Cells - TNF induced | Uni-ZAP XR | LP04 |
| HAQA HAQB HAQC HAQD | Amniotic Cells - Primary Culture | Uni-ZAP XR | LP04 |
| HWTA HWTB HWTC | wilm's tumor | Uni-ZAP XR | LP04 |
| HBSD | Bone Cancer, re-excision | Uni-ZAP XR | LP04 |
| HSGB | Salivary gland, re-excision | Uni-ZAP XR | LP04 |
| HSJA HSJB HSJC | Smooth muscle-ILb induced | Uni-ZAP XR | LP04 |
| HSXA HSXB HSXC HSXD | Human Substantia Nigra | Uni-ZAP XR | LP04 |
| HSHA HSHB HSHC | Smooth muscle, IL1b induced | Uni-ZAP XR | LP04 |
| HOUA HOUB HOUC HOUD HOUE | Adipocytes | Uni-ZAP XR | LP04 |
| HPWA HPWB HPWC HPWD HPWE | Prostate BPH | Uni-ZAP XR | LP04 |
| HELA HELB HELC HELD HELE HELF | Endothelial cells-control | Uni-ZAP XR | LP04 |
| HELG HELH | | | |
| HEMA HEMB HEMC HEMD HEME | Endothelial-induced | Uni-ZAP XR | LP04 |
| HEMF HEMG HEMH | | | |
| HBIA HBIB HBIC | Human Brain, Striatum | Uni-ZAP XR | LP04 |
| HHSA HHSB HHSC HHSD HHSE | Human Hypothalmus, Schizophrenia | Uni-ZAP XR | LP04 |
| HNGA HNGB HNGC HNGD HNGE HNGF | neutrophils control | Uni-ZAP XR | LP04 |
| HNGG HNGH HNGI HNGJ | | | |
| HNHA HNHB HNHC HNHD HNHE HNHF | Neutrophils IL-1 and LPS induced | Uni-ZAP XR | LP04 |
| HNHG HNHH HNHI HNHJ | | | |
| HSDB HSDC | STRIATUM DEPRESSION | Uni-ZAP XR | LP04 |
| HHPT | Hypothalamus | Uni-ZAP XR | LP04 |
| HSAT HSAU HSAV HSAW HSAX HSAY | Anergic T-cell | Uni-ZAP XR | LP04 |
| HSAZ | | | |
| HBMS HBMT HBMU HBMV HBMW | Bone marrow | Uni-ZAP XR | LP04 |
| HBMX | | | |
| HOEA HOEB HOEC HOED HOEE HOEF | Osteoblasts | Uni-ZAP XR | LP04 |
| HOEJ | | | |
| HAIA HAIB HAIC HAID HAIE HAIF | Epithelial-TNFa and INF induced | Uni-ZAP XR | LP04 |
| HTGA HTGB HTGC HTGD | Apoptotic T-cell | Uni-ZAP XR | LP04 |
| HMCA HMCB HMCC HMCD HMCE | Macrophage-oxLDL | Uni-ZAP XR | LP04 |
| HMAA HMAB HMAC HMAD HMAE | Macrophage (GM-CSF treated) | Uni-ZAP XR | LP04 |
| HMAF HMAG | | | |
| HPHA | Normal Prostate | Uni-ZAP XR | LP04 |
| HPIA HPIB HPIC | LNCAP prostate cell line | Uni-ZAP XR | LP04 |
| HPJA HPJB HPJC | PC3 Prostate cell line | Uni-ZAP XR | LP04 |
| HOSE HOSF HOSG | Human Osteoclastoma, re-excision | Uni-ZAP XR | LP04 |
| HTGE HTGF | Apoptotic T-cell, re-excision | Uni-ZAP XR | LP04 |
| HMAJ HMAK | H Macrophage (GM-CSF treated), re- | Uni-ZAP XR | LP04 |
| | excision | | |
| HACB HACC HACD | Human Adipose Tissue, re-excision | Uni-ZAP XR | LP04 |
| HFPA | H. Frontal Cortex, Epileptic | Uni-ZAP XR | LP04 |
| HFAA HFAB HFAC HFAD HFAE | Alzheimer's, spongy change | Uni-ZAP XR | LP04 |
| HFAM | Frontal Lobe, Dementia | Uni-ZAP XR | LP04 |
| HMIA HMIB HMIC | Human Manic Depression Tissue | Uni-ZAP XR | LP04 |
| HTSA HTSE HTSF HTSG HTSH | Human Thymus | pBS | LP05 |
| HPBA HPBB HPBC HPBD HPBE | Human Pineal Gland | pBS | LP05 |
| HSAA HSAB HSAC | HSA 172 Cells | pBS | LP05 |
| HSBA HSBB HSBC HSBM | HSC172 cells | pBS | LP05 |
| HJAA HJAB HJAC HJAD | Jurkat T-cell G1 phase | pBS | LP05 |
| HJBA HJBB HJBC HJBD | Jurkat T-Cell, S phase | pBS | LP05 |
| HAFA HAFB | Aorta endothelial cells + TNF-a | pBS | LP05 |
| HAWA HAWB HAWC | Human White Adipose | pBS | LP05 |
| HTNA HTNB | Human Thyroid | pBS | LP05 |
| HONA | Normal Ovary, Premenopausal | pBS | LP05 |
| HARA HARB | Human Adult Retina | pBS | LP05 |
| HLJA HLJB | Human Lung | pCMVSport 1 | LP06 |
| HOFM HOFN HOFO | H. Ovarian Tumor, II, OV5232 | pCMVSport 2.0 | LP07 |
| HOGA HOGB HOGC | OV 10-3-95 | pCMVSport 2.0 | LP07 |
| HCGL | CD34+cells, II | pCMVSport 2.0 | LP07 |
| HDLA | Hodgkin's Lymphoma I | pCMVSport 2.0 | LP07 |
| HDTA HDTB HDTC HDTD HDTE | Hodgkin's Lymphoma II | pCMVSport 2.0 | LP07 |
| HKAA HKAB HKAC HKAD HKAE HKAF | Keratinocyte | pCMVSport 2.0 | LP07 |
| HKAG HKAH | | | |
| HCIM | CAPFINDER, Crohn's Disease, lib 2 | pCMVSport 2.0 | LP07 |
| HKAL | Keratinocyte, lib 2 | pCMVSport 2.0 | LP07 |
| HKAT | Keratinocyte, lib 3 | pCMVSport 2.0 | LP07 |
| HNDA | Nasal polyps | pCMVSport 2.0 | LP07 |
| HDRA | H. Primary Dendritic Cells, lib 3 | pCMVSport 2.0 | LP07 |
| HOHA HOHB HOHC | Human Osteoblasts II | pCMVSport 2.0 | LP07 |
| HLDA HLDB HLDC | Liver, Hepatoma | pCMVSport 3.0 | LP08 |
| HLDN HLDO HLDP | Human Liver, normal | pCMVSport 3.0 | LP08 |
| HMTA | pBMC stimulated w/poly I/C | pCMVSport 3.0 | LP08 |
| HNTA | NTERA2, control | pCMVSport 3.0 | LP08 |
| HDPA HDPB HDPC HDPD HDPF HDPG | Primary Dendritic Cells, lib 1 | pCMVSport 3.0 | LP08 |
| HDPH HDPI HDPJ HDPK | | | |
| HDPM HDPN HDPO HDPP | Primary Dendritic cells, frac 2 | pCMVSport 3.0 | LP08 |
| HMUA HMUB HMUC | Myoloid Progenitor Cell Line | pCMVSport 3.0 | LP08 |
| HHEA HHEB HHEC HHED | T Cell helper I | pCMVSport 3.0 | LP08 |
| HHEM HHEN HHEO HHEP | T cell helper II | pCMVSport 3.0 | LP08 |
| HEQA HEQB HEQC | Human endometrial stromal cells | pCMVSport 3.0 | LP08 |
| HJMA HJMB | Human endometrial stromal cells-treated | pCMVSport 3.0 | LP08 |
| | with progesterone | | |
| HSWA HSWB HSWC | Human endometrial stromal cells-treated | pCMVSport 3.0 | LP08 |
| | with estradiol | | |
| HSYA HSYB HSYC | Human Thymus Stromal Cells | pCMVSport 3.0 | LP08 |
| HLWA HLWB HLWC | Human Placenta | pCMVSport 3.0 | LP08 |
| HRAA HRAB HRAC | Rejected Kidney, lib 4 | pCMVSport 3.0 | LP08 |
| HMTM | PCR, pBMC I/C treated | PCRII | LP09 |
| HMJA | H. Meniingima, M6 | pSport 1 | LP10 |
| HMKA HMKB HMKC HMKD HMKE | H. Meningima, M1 | pSport 1 | LP10 |
| HUSG HUSI | Human umbilical vein endothelial cells, IL-4 | pSport 1 | LP10 |
| | induced | | |
| HUSX HUSY | Human Umbilical Vein Endothelial Cells, | pSport 1 | LP10 |
| | uninduced | | |
| HOFA | Ovarian Tumor I, OV5232 | pSport 1 | LP10 |
| HCFA HCFB HCFC HCFD | T-Cell PHA 16 hrs | pSport 1 | LP10 |
| HCFL HCFM HCFN HCFO | T-Cell PHA 24 hrs | pSport 1 | LP10 |
| HADA HADC HADD HADE HADF HADG | Human Adipose | pSport 1 | LP10 |
| HOVA HOVB HOVC | Human Ovary | pSport 1 | LP10 |
| HTWB HTWC HTWD HTWE HTWF | Resting T-Cell Library, II | pSport 1 | LP10 |
| HMMA | Spleen metastic melanoma | pSport 1 | LP10 |
| HLYA HLYB HLYC HLYD HLYE | Spleen, Chronic lymphocytic leukemia | pSport 1 | LP10 |
| HCGA | CD34+ cell, I | pSport 1 | LP10 |
| HEOM HEON | Human Eosinophils | pSport 1 | LP10 |
| HTDA | Human Tonsil, Lib 3 | pSport 1 | LP10 |
| HSPA | Salivary Gland, Lib 2 | pSport 1 | LP10 |
| HCHA HCHB HCHC | Breast Cancer cell line, MDA 36 | pSport 1 | LP10 |
| HCHM HCHN | Breast Cancer Cell line, angiogenic | pSport 1 | LP10 |
| HCIA | Crohn's Disease | pSport 1 | LP10 |
| HDAA HDAB HDAC | HEL cell line | pSport 1 | LP10 |
| HABA | Human Astrocyte | pSport 1 | LP10 |
| HUFA HUFB HUFC | Ulcerative Colitis | pSport 1 | LP10 |
| HNTM | NTERA2 + retinoic acid, 14 days | pSport 1 | LP10 |
| HDQA | Primary Dendritic cells, CapFinder2, frac 1 | pSport 1 | LP10 |
| HDQM | Primary Dendritic Cells, CapFinder, frac 2 | pSport 1 | LP10 |
| HLDX | Human Liver, normal, CapFinder | pSport 1 | LP10 |
| HULA HULB HULC | Human Dermal Endothelial Cells, untreated | pSport 1 | LP10 |
| HUMA | Human Dermal Endothelial cells, treated | pSport 1 | LP10 |
| HCJA | Human Stromal Endometrial fibroblasts, | pSport 1 | LP10 |
| | untreated | | |
| HCJM | Human Stromal endometrial fibroblasts, | pSport 1 | LP10 |
| | treated w/ estradiol | | |
| HEDA | Human Stromal endometrial fibroblasts, | pSport 1 | LP10 |
| | treated with progesterone | | |
| HFNA | Human ovary tumor cell OV350721 | pSport 1 | LP10 |
| HKGA HKGB HKGC HKGD | Merkel Cells | pSport 1 | LP10 |
| HISA HISB HISC | Pancreas Islet Cell Tumor | pSport 1 | LP10 |
| HLSA | Skin, burned | pSport 1 | LP10 |
| HBZA | Prostate, BPH, Lib 2 | pSport 1 | LP10 |
| HBZS | Prostate BPH, Lib 2, subtracted | pSport 1 | LP10 |
| HFIA HFIB HFIC | Synovial Fibroblasts (control) | pSport 1 | LP10 |
| HFIH HFII HFIJ | Synovial hypoxia | pSport 1 | LP10 |
| HFIT HFIU HFIV | Synovial IL-1/TNF stimulated | pSport 1 | LP10 |
| HGCA | Messangial cell, frac 1 | pSport 1 | LP10 |
| HMVA HMVB HMVC | Bone Marrow Stromal Cell, untreated | pSport 1 | LP10 |
| HFIX HFIY HFIZ | Synovial Fibroblasts (I11/TNF), subt | pSport 1 | LP10 |
| HFOX HFOY HFOZ | Synovial hypoxia-RSF subtracted | pSport 1 | LP10 |
| HMQA HMQB HMQC HMQD | Human Activated Monocytes | Uni-ZAP XR | LP11 |
| HLIA HLIB HLIC | Human Liver | pCMVSport 1 | LP012 |
| HHBA HHBB HHBC HHBD HHBE | Human Heart | pCMVSport 1 | LP012 |
| HBBA HBBB | Human Brain | pCMVSport 1 | LP012 |
| HLJA HLJB HLJC HLJD HLJE | Human Lung | pCMVSport 1 | LP012 |
| HOGA HOGB HOGC | Ovarian Tumor | pCMVSport 2.0 | LP012 |
| HTJM | Human Tonsils, Lib 2 | pCMVSport 2.0 | LP012 |
| HAMF HAMG | KMH2 | pCMVSport 3.0 | LP012 |
| HAJA HAJB HAJC | L428 | pCMVSport 3.0 | LP012 |
| HWBA HWBB HWBC HWBD HWBE | Dendritic cells, pooled | pCMVSport 3.0 | LP012 |
| HWAA HWAB HWAC HWAD HWAE | Human Bone Marrow, treated | pCMVSport 3.0 | LP012 |
| HYAA HYAB HYAC | B Cell lymphoma | pCMVSport 3.0 | LP012 |
| HWHG HWHH HWHI | Healing groin wound, 6.5 hours post incision | pCMVSport 3.0 | LP012 |
| HWHP HWHQ HWHR | Healing groin wound; 7.5 hours post incision | pCMVSport 3.0 | LP012 |
| HARM | Healing groin wound - zero hr post-incision | pCMVSport 3.0 | LP012 |
| | (control) | | |
| HBIM | Olfactory epithelium; nasalcavity | pCMVSport 3.0 | LP012 |
| HWDA | Healing Abdomen wound; 70&90 min post | pCMVSport 3.0 | LP012 |
| | incision | | |
| HWEA | Healing Abdomen Wound; 15 days post | pCMVSport 3.0 | LP012 |
| | incision | | |
| HWJA | Healing Abdomen Wound; 21&29 days | pCMVSport 3.0 | LP012 |
| HNAL | Human Tongue, frac 2 | pSport 1 | LP012 |
| HMJA | H. Meniingima, M6 | pSport 1 | LP012 |
| HMKA HMKB HMKC HMKD HMKE | H. Meningima, M1 | pSport 1 | LP012 |
| HOFA | Ovarian Tumor I, OV5232 | pSport 1 | LP012 |
| HCFA HCFB HCFC HCFD | T-Cell PHA 16 hrs | pSport 1 | LP012 |
| HCFL HCFM HCFN HCFO | T-Cell PHA 24 hrs | pSport 1 | LP012 |
| HMMA HMMB HMMC | Spleen metastic melanoma | pSport 1 | LP012 |
| HTDA | Human Tonsil, Lib 3 | pSport 1 | LP012 |
| HDBA | Human Fetal Thymus | pSport 1 | LP012 |
| HDUA | Pericardium | pSport 1 | LP012 |
| HBZA | Prostate, BPH, Lib 2 | pSport 1 | LP012 |
| HWCA | Larynx tumor | pSport 1 | LP012 |
| HWKA | Normal lung | pSport 1 | LP012 |
| HSMB | Bone marrow stroma, treated | pSport 1 | LP012 |
| HBHM | Normal trachea | pSport 1 | LP012 |
| HLFC | Human Larynx | pSport 1 | LP012 |
| HLRB | Siebben Polyposis | pSport 1 | LP012 |
| HNIA | Mammary Gland | pSport 1 | LP012 |
| HNJB | Palate carcinoma | pSport 1 | LP012 |
| HNKA | Palate normal | pSport 1 | LP012 |
| HMZA | Pharynx carcinoma | pSport 1 | LP012 |
| HABG | Cheek Carcinoma | pSport 1 | LP012 |
| HMZM | Pharynx Carcinoma | pSport 1 | LP012 |
| HDRM | Larynx Carcinoma | pSport 1 | LP012 |
| HVAA | Pancreas normal PCA4 No | pSport 1 | LP012 |
| HICA | Tongue carcinoma | pSport 1 | LP012 |
| HUKA HUKB HUKC HUKD HUKE | Human Uterine Cancer | Lambda ZAP II | LP013 |
| HFFA | Human Fetal Brain, random primed | Lambda ZAP II | LP013 |
| HTUA | Activated T-cell labeled with 4-thioluri | Lambda ZAP II | LP013 |
| HBQA | Early Stage Human Brain, random primed | Lambda ZAP II | LP013 |
| HMEB | Human microvascular Endothelial cells, | Lambda ZAP II | LP013 |
| | fract. B | | |
| HUSH | Human Umbilical Vein Endothelial cells, | Lambda ZAP II | LP013 |
| | fract. A, re-excision | | |
| HLQC HLQD | Hepatocellular tumor, re-excision | Lambda ZAP II | LP013 |
| HTWJ HTWK HTWL | Resting T-cell, re-excision | Lambda ZAP II | LP013 |
| HF6S | Human Whole 6 week Old Embryo (II), subt | pBluescript | LP013 |
| HHPS | Human Hippocampus, subtracted | pBluescript | LP013 |
| HL1S | LNCAP, differential expression | pBluescript | LP013 |
| HLHS HLHT | Early Stage Human Lung, Subtracted | pBluescript | LP013 |
| HSUS | Supt cells, cyclohexamide treated, subtracted | pBluescript | LP013 |
| HSUT | Supt cells, cyclohexamide treated, | pBluescript | LP013 |
| | differentially expressed | | |
| HSDS | H. Striatum Depression, subtracted | pBluescript | LP013 |
| HPTZ | Human Pituitary, Subtracted VII | pBluescript | LP013 |
| HSDX | H. Striatum Depression, subt II | pBluescript | LP013 |
| HSDZ | H. Striatum Depression, subt | pBluescript | LP013 |
| HPBA HPBB HPBC HPBD HPBE | Human Pineal Gland | pBluescript SK− | LP013 |
| HRTA | Colorectal Tumor | pBluescript SK− | LP013 |
| HSBA HSBB HSBC HSBM | HSC172 cells | pBluescript SK− | LP013 |
| HJAA HJAB HJAC HJAD | Jurkat T-cell G1 phase | pBluescript SK− | LP013 |
| HJBA HJBB HJBC HJBD | Jurkat T-cell, S1 phase | pBluescript SK− | LP013 |
| HTNA HTNB | Human Thyroid | pBluescript SK− | LP013 |
| HAHA HAHB | Human Adult Heart | Uni-ZAP XR | LP013 |
| HE6A | Whole 6 week Old Embryo | Uni-ZAP XR | LP013 |
| HFCA HFCB HFCC HFCD HFCE | Human Fetal Brain | Uni-ZAP XR | LP013 |
| HFKC HFKD HFKE HFKF HFKG | Human Fetal Kidney | Uni-ZAP XR | LP013 |
| HGBA HGBD HGBE HGBF HGBG | Human Gall Bladder | Uni-ZAP XR | LP013 |
| HPRA HPRB HPRC HPRD | Human Prostate | Uni-ZAP XR | LP013 |
| HTEA HTEB HTEC HTED HTEE | Human Testes | Uni-ZAP XR | LP013 |
| HTTA HTTB HTTC HTTD HTTE | Human Testes Tumor | Uni-ZAP XR | LP013 |
| HYBA HYBB | Human Fetal Bone | Uni-ZAP XR | LP013 |
| HFLA | Human Fetal Liver | Uni-ZAP XR | LP013 |
| HHFB HHFC HHFD HHFE HHFF | Human Fetal Heart | Uni-ZAP XR | LP013 |
| HUVB HUVC HUVD HUVE | Human Umbilical Vein, End. remake | Uni-ZAP XR | LP013 |
| HTHB HTHC HTHD | Human Thymus | Uni-ZAP XR | LP013 |
| HSTA HSTB HSTC HSTD | Human Skin Tumor | Uni-ZAP XR | LP013 |
| HTAA HTAB HTAC HTAD HTAE | Human Activated T-cells | Uni-ZAP XR | LP013 |
| HFEA HFEB HFEC | Human Fetal Epithelium (skin) | Uni-ZAP XR | LP013 |
| HJPA HJPB HJPC HJPD | Human Jurkat Membrane Bound Polysomes | Uni-ZAP XR | LP013 |
| HESA | Human Epithelioid Sarcoma | Uni-ZAP XR | LP013 |
| HALS | Human Adult Liver, Subtracted | Uni-ZAP XR | LP013 |
| HFTA HFTB HFTC HFTD | Human Fetal Dura Mater | Uni-ZAP XR | LP013 |
| HCAA HCAB HCAC | Cem cells, cyclohexamide treated | Uni-ZAP XR | LP013 |
| HRGA HRGB HRGC HRGD | Raji Cells, cyclohexamide treated | Uni-ZAP XR | LP013 |
| HE9A HE9B HE9C HE9D HE9E | Nine Week Old Early Stage Human | Uni-ZAP XR | LP013 |
| HSFA | Human Fibrosarcoma | Uni-ZAP XR | LP013 |
| HATA HATB HATC HATD HATE | Human Adrenal Gland Tumor | Uni-ZAP XR | LP013 |
| HTRA | Human Trachea Tumor | Uni-ZAP XR | LP013 |
| HE2A HE2D HE2E HE2H HE2I | 12 Week Old Early Stage Human | Uni-ZAP XR | LP013 |
| HE2B HE2C HE2F HE2G HE2P | 12 Week Old Early Stage Human, II | Uni-ZAP XR | LP013 |
| HNEA HNEB HNEC HNED HNEE | Human Neutrophil | Uni-ZAP XR | LP013 |
| HBGA | Human Primary Breast Cancer | Uni-ZAP XR | LP013 |
| HPTS HPTT HPTU | Human Pituitary, subtracted | Uni-ZAP XR | LP013 |
| HMQA HMQB HMQC HMQD | Human Activated Monocytes | Uni-ZAP XR | LP013 |
| HOAA HOAB HOAC | Human Osteosarcoma | Uni-ZAP XR | LP013 |
| HTOA HTOD HTOE HTOF HTOG | human tonsils | Uni-ZAP XR | LP013 |
| HMGB | Human OB MG63 control fraction I | Uni-ZAP XR | LP013 |
| HOPB | Human OB HOS control fraction I | Uni-ZAP XR | LP013 |
| HOQB | Human OB HOS treated (1 nM E2) fraction I | Uni-ZAP XR | LP013 |
| HAUA HAUB HAUC | Amniotic Cells - TNF induced | Uni-ZAP XR | LP013 |
| HAQA HAQB HAQC HAQD | Amniotic Cells - Primary Culture | Uni-ZAP XR | LP013 |
| HROA HROC | HUMAN STOMACH | Uni-ZAP XR | LP013 |
| HBJA HBJB HBJC HBJD HBJE | HUMAN B CELL LYMPHOMA | Uni-ZAP XR | LP013 |
| HODA HODB HODC HODD | human ovarian cancer | Uni-ZAP XR | LP013 |
| HCPA | Corpus Callosum | Uni-ZAP XR | LP013 |
| HSOA | stomach cancer (human) | Uni-ZAP XR | LP013 |
| HERA | SKIN | Uni-ZAP XR | LP013 |
| HMDA | Brain-medulloblastoma | Uni-ZAP XR | LP013 |
| HGLA HGLB HGLD | Glioblastoma | Uni-ZAP XR | LP013 |
| HWTA HWTB HWTC | wilm's tumor | Uni-ZAP XR | LP013 |
| HEAA | H. Atrophic Endometrium | Uni-ZAP XR | LP013 |
| HAPN HAPO HAPP HAPQ HAPR | Human Adult Pulmonary; re-excision | Uni-ZAP XR | LP013 |
| HLTG HLTH | Human T-cell lymphoma; re-excision | Uni-ZAP XR | LP013 |
| HAHC HAHD HAHE | Human Adult Heart; re-excision | Uni-ZAP XR | LP013 |
| HAGA HAGB HAGC HAGD HAGE | Human Amygdala | Uni-ZAP XR | LP013 |
| HSJA HSJB HSJC | Smooth muscle-ILb induced | Uni-ZAP XR | LP013 |
| HSHA HSHB HSHC | Smooth muscle, IL1b induced | Uni-ZAP XR | LP013 |
| HPWA HPWB HPWC HPWD HPWE | Prostate BPH | Uni-ZAP XR | LP013 |
| HPIA HPIB HPIC | LNCAP prostate cell line | Uni-ZAP XR | LP013 |
| HPJA HPJB HPJC | PC3 Prostate cell line | Uni-ZAP XR | LP013 |
| HBTA | Bone Marrow Stroma, TNF&LPS ind | Uni-ZAP XR | LP013 |
| HMCF HMCG HMCH HMCI HMCJ | Macrophage-oxLDL; re-excision | Uni-ZAP XR | LP013 |
| HAGG HAGH HAGI | Human Amygdala; re-excision | Uni-ZAP XR | LP013 |
| HACA | H. Adipose Tissue | Uni-ZAP XR | LP013 |
| HKFB | K562 + PMA (36 hrs), re-excision | ZAP Express | LP013 |
| HCWT HCWU HCWV | CD34 positive cells (cord blood), re-ex | ZAP Express | LP013 |
| HBWA | Whole brain | ZAP Express | LP013 |
| HBXA HBXB HBXC HBXD | Human Whole Brain #2 - Oligo dT > 1.5 Kb | ZAP Express | LP013 |
| HAVM | Temporal cortex-Alzheizmer | pT-Adv | LP014 |
| HAVT | Hippocampus, Alzheimer Subtracted | pT-Adv | LP014 |
| HHAS | CHME Cell Line | Uni-ZAP XR | LP014 |
| HAJR | Larynx normal | pSport 1 | LP014 |
| HWLE HWLF HWLG HWLH | Colon Normal | pSport 1 | LP014 |
| HCRM HCRN HCRO | Colon Carcinoma | pSport 1 | LP014 |
| HWLI HWLJ HWLK | Colon Normal | pSport 1 | LP014 |
| HWLQ HWLR HWLS HWLT | Colon Tumor | pSport 1 | LP014 |
| HBFM | Gastrocnemius Muscle | pSport 1 | LP014 |
| HBOD HBOE | Quadriceps Muscle | pSport 1 | LP014 |
| HBKD HBKE | Soleus Muscle | pSport 1 | LP014 |
| HCCM | Pancreatic Langerhans | pSport 1 | LP014 |
| HWGA | Larynx carcinoma | pSport 1 | LP014 |
| HWGM HWGN | Larynx carcinoma | pSport 1 | LP014 |
| HWLA HWLB HWLC | Normal colon | pSport 1 | LP014 |
| HWLM HWLN | Colon Tumor | pSport 1 | LP014 |
| HVAM HVAN HVAO | Pancreas Tumor | pSport 1 | LP014 |
| HWGQ | Larynx carcinoma | pSport 1 | LP014 |
| HAQM HAQN | Salivary Gland | pSport 1 | LP014 |
| HASM | Stomach; normal | pSport 1 | LP014 |
| HBCM | Uterus; normal | pSport 1 | LP014 |
| HCDM | Testis; normal | pSport 1 | LP014 |
| HDJM | Brain; normal | pSport 1 | LP014 |
| HEFM | Adrenal Gland, normal | pSport 1 | LP014 |
| HBAA | Rectum normal | pSport 1 | LP014 |
| HFDM | Rectum tumour | pSport 1 | LP014 |
| HGAM | Colon, normal | pSport 1 | LP014 |
| HHMM | Colon, tumour | pSport 1 | LP014 |
| HCLB HCLC | Human Lung Cancer | Lambda Zap II | LP015 |
| HRLA | L1 Cell line | ZAP Express | LP015 |
| HHAM | Hypothalamus, Alzheimer's | pCMVSport 3.0 | LP015 |
| HKBA | Ku 812F Basophils Line | pSport 1 | LP015 |
| HS2S | Saos2, Dexamethosome Treated | pSport 1 | LP016 |
| HA5A | Lung Carcinoma A549 TNFalpha activated | pSport 1 | LP016 |
| HTFM | TF-1 Cell Line GM-CSF Treated | pSport 1 | LP016 |
| HYAS | Thyroid Tumour | pSport 1 | LP016 |
| HUTS | Larynx Normal | pSport 1 | LP016 |
| HXOA | Larynx Tumor | pSport 1 | LP016 |
| HEAH | Ea.hy.926 cell line | pSport 1 | LP016 |
| HINA | Adenocarcinoma Human | pSport 1 | LP016 |
| HRMA | Lung Mesothelium | pSport 1 | LP016 |
| HLCL | Human Pre-Differentiated Adipocytes | Uni-Zap XR | LP017 |
| HS2A | Saos2 Cells | pSport 1 | LP020 |
| HS2I | Saos2 Cells; Vitamin D3 Treated | pSport 1 | LP020 |
| HUCM | CHME Cell Line, untreated | pSport 1 | LP020 |
| HEPN | Aryepiglottis Normal | pSport 1 | LP020 |
| HPSN | Sinus Piniformis Tumour | pSport 1 | LP020 |
| HNSA | Stomach Normal | pSport 1 | LP020 |
| HNSM | Stomach Tumour | pSport 1 | LP020 |
| HNLA | Liver Normal Met5No | pSport 1 | LP020 |
| HUTA | Liver Tumour Met 5 Tu | pSport 1 | LP020 |
| HOCN | Colon Normal | pSport 1 | LP020 |
| HOCT | Colon Tumor | pSport 1 | LP020 |
| HTNT | Tongue Tumour | pSport 1 | LP020 |
| HLXN | Larynx Normal | pSport 1 | LP020 |
| HLXT | Larynx Tumour | pSport 1 | LP020 |
| HTYN | Thymus | pSport 1 | LP020 |
| HPLN | Placenta | pSport 1 | LP020 |
| HTNG | Tongue Normal | pSport 1 | LP020 |
| HZAA | Thyroid Normal (SDCA2 No) | pSport 1 | LP020 |
| HWES | Thyroid Thyroiditis | pSport 1 | LP020 |
| HFHD | Ficolled Human Stromal Cells, 5Fu treated | pTrip1Ex2 | LP021 |
| HFHM, HFHN | Ficolled Human Stromal Cells, Untreated | pTrip1Ex2 | LP021 |
| HPCI | Hep G2 Cells, lambda library | lambda Zap-CMV XR | LP021 |
| HBCA, HBCB, HBCC | H. Lymph node breast Cancer | Uni-ZAP XR | LP021 |
| HCOK | Chondrocytes | pSPORT1 | LP022 |
| HDCA, HDCB, HDCC | Dendritic Cells From CD34 Cells | pSPORT1 | LP022 |
| HDMA, HDMB | CD40 activated monocyte dendritic cells | pSPORT1 | LP022 |
| HDDM, HDDN, HDDO | LPS activated derived dendritic cells | pSPORT1 | LP022 |
| HPCR | Hep G2 Cells, PCR library | lambda Zap-CMV XR | LP022 |
| HAAA, HAAB, HAAC | Lung, Cancer (4005313A3): Invasive Poorly | pSPORT1 | LP022 |
| | Differentiated Lung Adenocarcinoma | | |
| HIPA, HIPB, HIPC | Lung, Cancer (4005163 B7): Invasive, | pSPORT1 | LP022 |
| | Poorly Diff. Adenocarcinoma, Metastatic | | |
| HOOH, HOOI | Ovary, Cancer: (4004562 B6) Papillary | pSPORT1 | LP022 |
| | Serous Cystic Neoplasm, Low Malignant Pot | | |
| HIDA | Lung, Normal: (4005313 B1) | pSPORT1 | LP022 |
| HUJA, HUJB, HUJC, HUJD, HUJE | B-Cells | pCMVSport 3.0 | LP022 |
| HNOA, HNOB, HNOC, HNOD | Ovary, Normal: (9805C040R) | pSPORT1 | LP022 |
| HNLM | Lung, Normal: (4005313 B1) | pSPORT1 | LP022 |
| HSCL | Stromal Cells | pSPORT1 | LP022 |
| HAAX | Lung, Cancer: (4005313 A3) Invasive | pSPORT1 | LP022 |
| | Poorly-differentiated Metastatic lung | | |
| | adenocarcinoma | | |
| HUUA, HUUB, HUUC, HUUD | B-cells (unstimulated) | pTrip1Ex2 | LP022 |
| HWWA, HWWB, HWWC, HWWD, HWWE, HWWF, | B-cells (stimulated) | pSPORT1 | LP022 |
| HWWG | | | |
| HCCC | Colon, Cancer: (9808C064R) | pCMVSport 3.0 | LP023 |
| HPDO HPDP HPDQ HPDR HPD | Ovary, Cancer (9809C332): Poorly | pSport 1 | LP023 |
| | differentiated adenocarcinoma | | |
| HPCO HPCP HPCQ HPCT | Ovary, Cancer (15395A1F): Grade II | pSport 1 | LP023 |
| | Papillary Carcinoma | | |
| HOCM HOCO HOCP HOCQ | Ovary, Cancer: (15799A1F) Poorly | pSport 1 | LP023 |
| | differentiated carcinoma | | |
| HCBM HCBN HCBO | Breast, Cancer: (4004943 A5) | pSport 1 | LP023 |
| HNBT HNBU HNBV | Breast, Normal: (4005522B2) | pSport 1 | LP023 |
| HBCP HBCQ | Breast, Cancer: (4005522 A2) | pSport 1 | LP023 |
| HBCJ | Breast, Cancer: (9806C012R) | pSport 1 | LP023 |
| HSAM HSAN | Stromal cells 3.88 | pSport 1 | LP023 |
| HVCA HVCB HVCC HVCD | Ovary, Cancer: (4004332 A2) | pSport 1 | LP023 |
| HSCK HSEN HSEO | Stromal cells (HBM3.18) | pSport 1 | LP023 |
| HSCP HSCQ | stromal cell clone 2.5 | pSport 1 | LP023 |
| HUXA | Breast Cancer: (4005385 A2) | pSport 1 | LP023 |
| HCOM HCON HCOO HCOP HCOQ | Ovary, Cancer (4004650 A3): Well- | pSport 1 | LP023 |
| | Differentiated Micropapillary Serous | | |
| | Carcinoma | | |
| HBNM | Breast, Cancer: (9802C020E) | pSport 1 | LP023 |
| HVVA HVVB HVVC HVVD HVVE | Human Bone Marrow, treated | pSport 1 | LP023 |

[0690] Two nonlimiting examples are provided below for isolating a particular clone from the deposited sample of plasmid cDNAs cited for that clone in Table 7. First, a plasmid is directly isolated by screening the clones using a polynucleotide probe corresponding to the nucleotide sequence of SEQ ID NO:X.

[0691] Particularly, a specific polynucleotide with 30-40 nucleotides is synthesized using an Applied Biosystems DNA synthesizer according to the sequence reported. The oligonucleotide is labeled, for instance, with ³²P-y-ATP using T4 polynucleotide kinase and purified according to routine methods. (E.g., Maniatis et al., Molecular Cloning: A Laboratory Manual, Cold Spring Harbor Press, Cold Spring, NY (1982)). The plasmid mixture is transformed into a suitable host, as indicated above (such as XL-I Blue (Stratagene)) using techniques known to those of skill in the ant, such as those provided by the vector supplier or in related publications or patents cited above. The transfonmants are plated on 1.5% agar plates (containing the appropriate selection agent, e.g., ampicillin) to a density of about 150 transformants (colonies) per plate. These plates are screened using Nylon membranes according to routine methods for bacterial colony screening (e.g., Sambrook et al., Molecular Cloning: A Laboratory Manual, 2nd Edit, (1989), Cold Spring Harbor Laboratory Press, pages 1.93 to 1.104), or other techniques known to those of skill in the art.

[0692] Alternatively, two primers of 17-20 nucleotides derived from both ends of the nucleotide sequence of SEQ ID NO:X are synthesized and used to amplify the desired cDNA using the deposited cDNA plasmid as a template. The polymerase chain reaction is carried out under routine conditions, for instance, in 25 μl of reaction mixture with 0.5 ug of the above cDNA template. A convenient reaction mixture is 1.5-5 mM MgCl₂, 0.01% (w/v) gelatin, 20 μM each of dATP, dCTP, dGTP, dTTP, 25 pmol of each primer and 0.25 Unit of Taq polymerase. Thirty five cycles of PCR (denaturation at 94° C. for 1 min; annealing at 55° C. for 1 min; elongation at 72° C. for 1 min) are performed with a Perkin-Elmer Cetus automated thermal cycler. The amplified product is analyzed by agarose gel electrophoresis and the DNA band with expected molecular weight is excised and purified. The PCR product is verified to be the selected sequence by subcloning and sequencing the DNA product.

[0693] Several methods are available for the identification of the 5′ or 3′ non-coding portions of a gene which may not be present in the deposited clone. These methods include but are not limited to, filter probing, clone enrichment using specific probes, and protocols similar or identical to 5′ and 3′ “RACE” protocols which are well known in the art. For instance, a method similar to 5′ RACE is available for generating the missing 5′ end of a desired full-length transcript. (Fromont-Racine et al., Nucleic Acids Res. 21(7):1683-1684 (1993)).

[0694] Briefly, a specific RNA oligonucleotide is ligated to the 5′ ends of a population of RNA presumably containing full-length gene RNA transcripts. A primer set containing a primer specific to the ligated RNA oligonucleotide and a primer specific to a known sequence of the gene of interest is used to PCR amplify the 5′ portion of the desired full-length gene. This amplified product may then be sequenced and used to full length gene.

[0695] This above method starts with total RNA isolated from the desired source, although poly-A+RNA can be used. The RNA preparation can then be treated with phosphatase if necessary to eliminate 5′ phosphate groups on degraded or damaged RNA which may interfere with the later RNA ligase step. The phosphatase should then be inactivated and the RNA treated with tobacco acid pyrophosphatase in order to remove the cap structure present at the 5′ ends of messenger RNAs. This reaction leaves a 5′ phosphate group at the 5′ end of the cap cleaved RNA which can then be ligated to an RNA oligonucleotide using T4 RNA ligase.

[0696] This modified RNA preparation is used as a template for first strand cDNA synthesis using a gene specific oligonucleotide. The first strand synthesis reaction is used as a template for PCR amplification of the desired 5′ end using a primer specific to the ligated RNA oligonucleotide and a primer specific to the known sequence of the gene of interest. The resultant product is then sequenced and analyzed to confirm that the 5′ end sequence belongs to the desired gene.

### Example 2

### Isolation of Genomic Clones Corresponding to a Polynucleotide

[0697] A human genomic P1 library (Genomic Systems, Inc.) is screened by PCR using primers selected for the sequence corresponding to SEQ ID NO:X according to the method described in Example 1. (See also, Sambrook.)

### Example 3

### Tissue Specific Expression Analysis

[0698] The Human Genome Sciences, Inc. (HGS) database is derived from sequencing tissue and/or disease specific cDNA libraries. Libraries generated from a particular tissue are selected and the specific tissue expression pattern of EST groups or assembled contigs within these libraries is determined by comparison of the expression patterns of those groups or contigs within the entire database. ESTs and assembled contigs which show tissue specific expression are selected.

[0699] The original clone from which the specific EST sequence was generated, or in the case of an assembled contig, the clone from which the 5′ most EST sequence was generated, is obtained from the catalogued library of clones and the insert amplified by PCR using methods known in the art. The PCR product is denatured and then transferred in 96 or 384 well format to a nylon membrane (Schleicher and Scheull) generating an array filter of tissue specific clones. Housekeeping genes, maize genes, and known tissue specific genes are included on the filters. These targets can be used in signal normalization and to validate assay sensitivity. Additional targets are included to monitor probe length and specificity of hybridization.

[0700] Radioactively labeled hybridization probes are generated by first strand cDNA synthesis per the manufacturer's instructions (Life Technologies) from mRNA/RNA samples prepared from the specific tissue being analyzed (e.g., prostate, prostate cancer, ovarian, ovarian cancer, etc.). The hybridization probes are purified by gel exclusion chromatography, quantitated, and hybridized with the array filters in hybridization bottles at 65° C. overnight. The filters are washed under stringent conditions and signals are captured using a Fuji phosphorimager.

[0701] Data is extracted using AIS software and following background subtraction, signal normalization is performed. This includes a normalization of filter-wide expression levels between different experimental runs. Genes that are differentially expressed in the tissue of interest are identified.

### Example 4

### Chromosomal Mapping of the Polynucleotides

[0702] An oligonucleotide primer set is designed according to the sequence at the 5 end of SEQ ID NO:X. This primer preferably spans about 100 nucleotides. This primer set is then used in a polymerase chain reaction under the following set of conditions: 30 seconds, 95° C.; 1 minute, 56° C.; 1 minute, 70° C. This cycle is repeated 32 times followed by one 5 minute cycle at 70° C. Human, mouse, and hamster DNA is used as template in addition to a somatic cell hybrid panel containing individual chromosomes or chromosome fragments (Bios, Inc). The reactions are analyzed on either 8% polyacrylamide gels or 3.5% agarose gels. Chromosome mapping is determined by the presence of an approximately 100 bp PCR fragment in the particular somatic cell hybrid.

### Example 5

### Bacterial Expression of a Polypeptide

[0703] A polynucleotide encoding a polypeptide of the present invention is amplified using PCR oligonucleotide primers corresponding to the 5′ and 3′ ends of the DNA sequence, as outlined in Example 1, to synthesize insertion fragments. The primers used to amplify the cDNA insert should preferably contain restriction sites, such as BamHI and XbaI, at the 5′ end of the primers in order to clone the amplified product into the expression vector. For example, BamHI and XbaI correspond to the restriction enzyme sites on the bacterial expression vector pQE-9. (Qiagen, Inc., Chatsworth, Calif.). This plasmid vector encodes antibiotic resistance (Amp^{r}), a bacterial origin of replication (ori), an IPTG-regulatable promoter/operator (P/O), a ribosome binding site (RBS), a 6-histidine tag (6-His), and restriction enzyme cloning sites.

[0704] The pQE-9 vector is digested with BamHI and XbaI and the amplified fragment is ligated into the pQE-9 vector maintaining the reading frame initiated at the bacterial RBS. The ligation mixture is then used to transform the E. coli strain M15/rep4 (Qiagen, Inc.) which contains multiple copies of the plasmid pREP4, which expresses the lacI repressor and also confers kanamycin resistance (Kan^{r}). Transformants are identified by their ability to grow on LB plates and ampicillin/kanamycin resistant colonies are selected. Plasmid DNA is isolated and confirmed by restriction analysis.

[0705] Clones containing the desired constructs are grown overnight (O/N) in liquid culture in LB media supplemented with both Amp (100 ug/ml) and Kan (25 ug/ml). The O/N culture is used to inoculate a large culture at a ratio of 1:100 to 1:250. The cells are grown to an optical density 600 (O.D.⁶⁰⁰) of between 0.4 and 0.6. IPTG (Isopropyl-B-D-thiogalacto pyranoside) is then added to a final concentration of 1 mM. IPTG induces by inactivating the lacI repressor, clearing the P/O leading to increased gene expression.

[0706] Cells are grown for an extra 3 to 4 hours. Cells are then harvested by centrifugation (20 mins at 6000×g). The cell pellet is solubilized in the chaotropic agent 6 Molar Guanidine HCl by stirring for 3-4 hours at 4° C. The cell debris is removed by centrifugation, and the supernatant containing the polypeptide is loaded onto a nickel-nitrilo-tri-acetic acid (“Ni—NTA38) affinity resin column (available from QIAGEN, Inc., supra). Proteins with a 6× His tag bind to the Ni—NTA resin with high affinity and can be purified in a simple one-step procedure (for details see: The QIAexpressionist (1995) QIAGEN, Inc., supra).

[0707] Briefly, the supernatant is loaded onto the column in 6 M guanidine-HCl, pH 8. The column is first washed with 10 volumes of 6 M guanidine-HCl, pH 8, then washed with 10 volumes of 6 M guanidine-HCl pH 6, and finally the polypeptide is eluted with 6 M guanidine-HCl, pH 5.

[0708] The purified protein is then renatured by dialyzing it against phosphate-buffered saline (PBS) or 50 mM Na-acetate, pH 6 buffer plus 200 mM NaCl. Alternatively, the protein can be successfully refolded while immobilized on the Ni—NTA column. The recommended conditions are as follows: renature using a linear 6M-1M urea gradient in 500 mM NaCl, 20% glycerol, 20 mM Tris/HCl pH 7.4, containing protease inhibitors. The renaturation should be performed over a period of 1.5 hours or more. After renaturation the proteins are eluted by the addition of 250 mM immidazole. Immidazole is removed by a final dialyzing step against PBS or 50 mM sodium acetate pH 6 buffer plus 200 mM NaCl. The purified protein is stored at 4° C. or frozen at −80° C.

[0709] In addition to the above expression vector, the present invention further includes an expression vector, called pHE4a (ATCC Accession Number 209645, deposited on Feb. 25, 1998) which contains phage operator and promoter elements operatively linked to a polynucleotide of the present invention, called pHIE4a (ATCC Accession Number 209645, deposited on Feb. 25, 1998.) This vector contains: 1) a neomycinphosphotransferase gene as a selection marker, 2) an E. coli origin of replication, 3) a T5 phage promoter sequence, 4) two lac operator sequences, 5) a Shine-Delgarno sequence, and 6) the lactose operon repressor gene (lacIq). The origin of replication (oriC) is derived from pUC19 (LTI, Gaithersburg, Md.). The promoter and operator sequences are made synthetically.

[0710] DNA can be inserted into the pHE4a by restricting the vector with NdeI and XbaI, BamHI, XhoI, or Asp718, running the restricted product on a gel, and isolating the larger fragment (the stuffer fragment should be about 310 base pairs). The DNA insert is generated according to the PCR protocol described in Example 1, using PCR primers having restriction sites for NdeI (5′ primer) and XbaI, BamHI, XhoI, or Asp718 (3′ primer). The PCR insert is gel purified and restricted with compatible enzymes. The insert and vector are ligated according to standard protocols.

[0711] The engineered vector could easily be substituted in the above protocol to express protein in a bacterial system.

### Example 6

### Purifcation of a Polypeptide from an Inclusion Body

[0712] The following alternative method can be used to purify a polypeptide expressed in E. coli when it is present in the form of inclusion bodies. Unless otherwise specified, all of the following steps are conducted at 4-10° C.

[0713] Upon completion of the production phase of the E. coli fermentation, the cell culture is cooled to 4-10° C. and the cells harvested by continuous centrifugation at 15,000 rpm (Heraeus Sepatech). On the basis of the expected yield of protein per unit weight of cell paste and the amount of purified protein required, an appropriate amount of cell paste, by weight, is suspended in a buffer solution containing 100 mM Tris, 50 mM EDTA, pH 7.4. The cells are dispersed to a homogeneous suspension using a high shear mixer.

[0714] The cells are then lysed by passing the solution through a microfluidizer (Microfuidics, Corp. or APV Gaulin, Inc.) twice at 4000-6000 psi. The homogenate is then mixed with NaCl solution to a final concentration of 0.5 M NaCl, followed by centriftigation at 7000×g for 15 min. The resultant pellet is washed again using 0.5M NaCl, 100 mM Tris, 50 mM EDTA, pH 7.4.

[0715] The resulting washed inclusion bodies are solubilized with 1.5 M guanidine hydrochloride (GuHCl) for 24 hours. After 7000×g centrifugation for 15 min., the pellet is discarded and the polypeptide containing supernatant is incubated at 4° C. overnight to allow further GuHCl extraction.

[0716] Following high speed centrifugation (30,000×g) to remove insoluble particles, the GuHCl solubilized protein is refolded by quickly mixing the GuHCl extract with 20 volumes of buffer containing 50 mM sodium, pH 4.5, 150 mM NaCl, 2 mM EDTA by vigorous stirring. The refolded diluted protein solution is kept at 4° C. without mixing for 12 hours prior to further purification steps.

[0717] To clarify the refolded polypeptide solution, a previously prepared tangential filtration unit equipped with 0.16 μm membrane filter with appropriate surface area (e.g., Filtron), equilibrated with 40 mM sodium acetate, pH 6.0 is employed. The filtered sample is loaded onto a cation exchange resin (e.g., Poros HS-50, Perseptive Biosystems). The column is washed with 40 mM sodium acetate, pH 6.0 and eluted with 250 mM, 500 mM, 1000 mM, and 1500 mM NaCl in the same buffer, in a stepwise manner. The absorbance at 280 nm of the effluent is continuously monitored. Fractions are collected and further analyzed by SDS-PAGE.

[0718] Fractions containing the polypeptide are then pooled and mixed with 4 volumes of water. The diluted sample is then loaded onto a previously prepared set of tandem columns of strong anion (Poros HQ-50, Perseptive Biosystems) and weak anion (Poros CM-20, Perseptive Biosystems) exchange resins. The columns are equilibrated with 40 mM sodium acetate, pH 6.0. Both columns are washed with 40 mM sodium acetate, pH 6.0, 200 mM NaCl. The CM-20 column is then eluted using a 10 column volume linear gradient ranging from 0.2 M NaCl, 50 mM sodium acetate, pH 6.0 to 1.0 M NaCl, 50 mM sodium acetate, pH 6.5. Fractions are collected under constant A₂₈₀ monitoring of the effluent. Fractions containing the polypeptide (determined, for instance, by 16% SDS-PAGE) are then pooled.

[0719] The resultant polypeptide should exhibit greater than 95% purity after the above refolding and purification steps. No major contaminant bands should be observed from Commassie blue stained 16% SDS-PAGE gel when 5 μg of purified protein is loaded. The purified protein can also be tested for endotoxin/LPS contamination, and typically the LPS content is less than 0.1 ng/ml according to LAL assays.

### Example 7

### Cloning and Expression of a Polypeptide in a Baculovirus Expression System

[0720] In this example, the plasmid shuttle vector pA2 is used to insert a polynucleotide into a baculovirus to express a polypeptide. This expression vector contains the strong polyhedrin promoter of the Autographa californica nuclear polyhedrosis virus (AcMNPV) followed by convenient restriction sites such as BamHI, Xba I and Asp718. The polyadenylation site of the simian virus 40 (“SV40”) is used for efficient polyadenylation. For easy selection of recombinant virus, the plasmid contains the beta-galactosidase gene from E. coli under control of a weak Drosophila promoter in the same orientation, followed by the polyadenylation signal of the polyhedrin gene. The inserted genes are flanked on both sides by viral sequences for cell-mediated homologous recombination with wild-type viral DNA to generate a viable virus that express the cloned polynucleotide.

[0721] Many other baculovirus vectors can be used in place of the vector above, such as pAc373, pVL941, and pAcIM1, as one skilled in the art would readily appreciate, as long as the construct provides appropriately located signals for transcription, translation, secretion and the like, including a signal peptide and an in-frame AUG as required. Such vectors are described, for instance, in Luckow et al., Virology 170: 31-39 (1989).

[0722] Specifically, the cDNA sequence contained in the deposited clone, including the AUG initiation codon, is amplified using the PCR protocol described in Example 1. If a naturally occurring signal sequence is used to produce the polypeptide of the present invention, the pA2 vector does not need a second signal peptide. Alternatively, the vector can be modified (pA2 GP) to include a baculovirus leader sequence, using the standard methods described in Summers et al., “A Manual of Methods for Baculovirus Vectors and Insect Cell Culture Procedures,” Texas Agricultural Experimental Station Bulletin No. 1555 (1987).

[0723] The amplified fragment is isolated from a 1% agarose gel using a commercially available kit (“Geneclean,” BIO 101 Inc., La Jolla, Calif.). The fragment then is digested with appropriate restriction enzymes and again purified on a 1% agarose gel.

[0724] The plasmid is digested with the corresponding restriction enzymes and optionally, can be dephosphorylated using calf intestinal phosphatase, using routine procedures known in the art. The DNA is then isolated from a 1% agarose gel using a commercially available kit (“Geneclean” BIO 101 Inc., La Jolla, Calif.).

[0725] The fragment and the dephosphorylated plasmid are ligated together with T4 DNA ligase. E. coli HB101 or other suitable E. coli hosts such as XL-1 Blue (Stratagene Cloning Systems, La Jolla, Calif.) cells are transformed with the ligation mixture and spread on culture plates. Bacteria containing the plasmid are identified by digesting DNA from individual colonies and analyzing the digestion product by gel electrophoresis. The sequence of the cloned fragment is confirmed by DNA sequencing.

[0726] Five μg of a plasmid containing the polynucleotide is co-transfected with 1.0 μg of a commercially available linearized baculovirus DNA (“BaculoGold™ baculovirus DNA, Pharmingen, San Diego, Calif.), using the lipofection method described by Feigner et al., Proc. Natl. Acad. Sci. US 84: 7413-7417 (1987). One μg of BaculoGold™ virus DNA and 5 μg of the plasmid are mixed in a sterile well of a microtiter plate containing 50 μl of serum-free Grace's medium (Life Technologies Inc., Gaithersburg, Md.). Afterwards, 10 μl Lipofectin plus 90 μl Grace's medium are added, mixed and incubated for 15 minutes at room temperature. Then the transfection mixture is added drop-wise to Sf9 insect cells (ATCC CRL 1711) seeded in a 35 mm tissue culture plate with 1 ml Grace's medium without serum. The plate is then incubated for 5 hours at 27° C. The transfection solution is then removed from the plate and 1 ml of Grace's insect medium supplemented with 10% fetal calf serum is added. Cultivation is then continued at 27° C. for four days.

[0727] After four days the supernatant is collected and a plaque assay is performed, as described by Summers and Smith, supra. An agarose gel with “Blue Gal” (Life Technologies Inc., Gaithersburg) is used to allow easy identification and isolation of gal-expressing clones, which produce blue-stained plaques. (A detailed description of a “plaque assay” of this type can also be found in the user's guide for insect cell culture and baculovirology distributed by Life Technologies Inc., Gaithersburg, page 9-10.) After appropriate incubation, blue stained plaques are picked with the tip of a micropipenor (e.g., Eppendorf). The agar containing the recombinant viruses is then resuspended in a microcentrifuge tube containing 200 μl of Grace's medium and the suspension containing the recombinant baculovirus is used to infect Sf9 cells seeded in 35 mm dishes. Four days later the supernatants of these culture dishes are harvested and then they are stored at 4° C.

[0728] To verify the expression of the polypeptide, Sf9 cells are grown in Grace's medium supplemented with 10% heat-inactivated FBS. The cells are infected with the recombinant baculovirus containing the polynucleotide at a multiplicity of infection (“MOI”) of about 2. If radiolabled proteins are desired, 6 hours later the medium is removed and is replaced with SF900 II medium minus methionine and cysteine (available from Life Technologies Inc., Rockville, Md.). After 42 hours, 5 μCi of ³⁵S-methionine and 5 μCi ³⁵S-cysteine (available from Amersham) are added. The cells are further incubated for 16 hours and then are harvested by centrifugation. The proteins in the supernatant as well as the intracellular proteins are analyzed by SDS-PAGE followed by autoradiography (if radiolabeled).

[0729] Microsequencing of the amino acid sequence of the amino terminus of purified protein may be used to determine the amino terminal sequence of the produced protein.

### Example 8

### Expression of a Polypeptide in Mammalian Cells

[0730] The polypeptide of the present invention can be expressed in a mammalian cell. A typical mammalian expression vector contains a promoter element, which mediates the initiation of transcription of mRNA, a protein coding sequence, and signals required for the termination of transcription and polyadenylation of the transcript. Additional elements include enhancers, Kozak sequences and intervening sequences flanked by donor and acceptor sites for RNA splicing. Highly efficient transcription is achieved with the early and late promoters from SV40, the long terminal repeats (LTRs) from Retroviruses, e.g., RSV, HTLVI, HIVI and the early promoter of the cytomegalovirus (CMV). However, cellular elements can also be used (e.g., the human actin promoter).

[0731] Suitable expression vectors for use in practicing the present invention include, for example, vectors such as pSVL and pMSG (Pharmacia, Uppsala, Sweden), pRSVcat (ATCC 37152), pSV2dhfr (ATCC 37146), pBC12M1 (ATCC 67109), pCMVSport 2.0, and pCMVSport 3.0. Mammalian host cells that could be used include, human Hela, 293, H9 and Jurkat cells, mouse NIH3T3 and C127 cells, Cos 1, Cos 7 and CV1, quail QC1-3 cells, mouse L cells and Chinese hamster ovary (CHO) cells.

[0732] Alternatively, the polypeptide can be expressed in stable cell lines containing the polynucleotide integrated into a chromosome. The co-transfection with a selectable marker such as DHFR, gpt, neomycin, or hygromycin allows the identification and isolation of the transfected cells.

[0733] The transfected gene can also be amplified to express large amounts of the encoded protein. The DHFR (dihydrofolate reductase) marker is useful in developing cell lines that carry several hundred or even several thousand copies of the gene of interest. (See, e.g., Alt, F. W., et al., J. Biol. Chem. 253: 1357-1370 (1978); Hamlin, J. L. and Ma, C., Biochem. et Biophys. Acta, 1097: 107-143 (1990); Page, M. J. and Sydenham, M. A., Biotechnology 9: 64-68 (1991)). Another useful selection marker is the enzyme glutamine synthase (GS) (Murphy et al., Biochem J. 227: 277-279 (1991); Bebbington et al., Bio/Technology 10: 169-175 (1992). Using these markers, the mammalian cells are grown in selective medium and the cells with the highest resistance are selected. These cell lines contain the amplified gene(s) integrated into a chromosome. Chinese hamster ovary (CHO) and NSO cells are often used for the production of proteins.

[0734] Derivatives of the plasmid pSV2-dhfr (ATCC Accession No. 37146), the expression vectors pC4 (ATCC Accession No. 209646) and pC6 (ATCC Accession No. 209647) contain the strong promoter (LTR) of the Rous Sarcoma Virus (Cullen et al., Molecular and Cellular Biology, 438-447 (March, 1985)) plus a fragment of the CMV-enhancer (Boshart et al., Cell 41: 521-530 (1985)). Multiple cloning sites, e.g., with the restriction enzyme cleavage sites BamHI, XbaI and Asp718, facilitate the cloning of the gene of interest. The vectors also contain the 3′ intron, the polyadenylation and termination signal of the rat preproinsulin gene, and the mouse DHFR gene under control of the SV40 early promoter.

[0735] Specifically, the plasmid pC6, for example, is digested with appropriate restriction enzymes and then dephosphorylated using calf intestinal phosphates by procedures known in the art. The vector is then isolated from a 1% agarose gel.

[0736] A polynucleotide of the present invention is amplified according to the protocol outlined in Example 1. If a naturally occurring signal sequence is used to produce the polypeptide of the present invention, the vector does not need a second signal peptide. Alternatively, if a naturally occurring signal sequence is not used, the vector can be modified to include a heterologous signal sequence. (See, e.g., International Publication No. WO 96/34891.)

[0737] The amplified fragment is isolated from a 1% agarose gel using a commercially available kit (“Geneclean,” BIO 101 Inc. La Jolla, Calif.). The fragment then is digested with appropriate restriction enzymes and again purified on a 1% agarose gel.

[0738] The amplified fragment is then digested with the same restriction enzyme and purified on a 1% agarose gel. The isolated fragment and the dephosphorylated vector are then ligated with T4 DNA ligase. E. coli HB101 or XL-1 Blue cells are then transformed and bacteria are identified that contain the fragment inserted into plasmid pC6 using, for instance, restriction enzyme analysis.

[0739] Chinese hamster ovary cells lacking an active DHFR gene is used for transfection. Five μg of the expression plasmid pC6 or pC4 is cotransfected with 0.5 μg of the plasmid pSVneo using lipofectin (Felgner et al., supra). The plasmid pSV2-neo contains a dominant selectable marker, the neo gene from Tn5 encoding an enzyme that confers resistance to a group of antibiotics including G418. The cells are seeded in alpha minus MEM supplemented with 1 mg/ml G418. After 2 days, the cells are trypsinized and seeded in hybridoma cloning plates (Greiner, Germany) in alpha minus MEM supplemented with 10, 25, or 50 ng/ml of methotrexate plus 1 mg/ml G418. After about 10-14 days single clones are trypsinized and then seeded in 6-well petri dishes or 10 ml flasks using different concentrations of methotrexate (50 nM, 100 nM, 200 nM, 400 nM, 800 nM). Clones growing at the highest concentrations of methotrexate are then transferred to new 6-well plates containing even higher concentrations of methotrexate (1 μM, 2 μM, 5 μM, 10 mM, 20 mM). The same procedure is repeated until clones are obtained which grow at a concentration of 100-200 μM. Expression of the desired gene product is analyzed, for instance, by SDS-PAGE and Western blot or by reversed phase HPLC analysis.

### Example 9

### Protein Fusions

[0740] The polypeptides of the present invention are preferably fused to other proteins. These fusion proteins can be used for a variety of applications. For example, fusion of the present polypeptides to His-tag, HA-tag, protein A, IgG domains, and maltose binding protein facilitates purification. (See Example 5; see also EP A 394,827; Traunecker, et al., Nature 331: 84-86 (1988)). Similarly, fusion to IgG-1, IgG-3, and albumin increases the halflife time in vivo. Nuclear localization signals fused to the polypeptides of the present invention can target the protein to a specific subcellular localization, while covalent heterodimer or homodimers can increase or decrease the activity of a fusion protein. Fusion proteins can also create chimeric molecules having more than one function. Finally, fusion proteins can increase solubility and/or stability of the fused protein compared to the non-fused protein. All of the types of fusion proteins described above can be made by modifying the following protocol, which outlines the fusion of a polypeptide to an IgG molecule, or the protocol described in Example 5.

[0741] Briefly, the human Fc portion of the IgG molecule can be PCR amplified, using primers that span the 5′ and 3′ ends of the sequence described below. These primers also should have convenient restriction enzyme sites that will facilitate cloning into an expression vector, preferably a mammalian expression vector.

[0742] For example, if pC4 (ATCC Accession No. 209646) is used, the human Fe portion can be ligated into the BamHI cloning site. Note that the 3′ BamHI site should be destroyed. Next, the vector containing the human Fc portion is re-restricted with BamHI, linearizing the vector, and a polynucleotide of the present invention, isolated by the PCR protocol described in Example 1, is ligated into this BamHI site. Note that the polynucleotide is cloned without a stop codon, otherwise a fusion protein will not be produced.

[0743] If the naturally occurring signal sequence is used to produce the polypeptide of the present invention, pC4 does not need a second signal peptide. Alternatively, if the naturally occurring signal sequence is not used, the vector can be modified to include a heterologous signal sequence. (See, e.g., International Publication No. WO 96/34891.)

[0744] Human IgG Fe region:

(SEQ ID NO: 1)

GGGATCCGGAGCCCAAATCTTCTGACAAAACTCACACATGCCCACCGTGC
CCAGCACCTGAATTCGAGGGTGCACCGTCAGTCTTCCTCTTCCCCCCAAA
ACCCAAGGACACCCTCATGATCTCCCGGACTCCTGAGGTCACATGCGTGG
TGGTGGACGTAAGCCACGAAGACCCTGAGGTCAAGTTCAACTGGTACGTG
GACGGCGTGGAGGTGCATAATGCCAAGACAAAGCCGCGGGAGGAGCAGTA
CAACAGCACGTACCGTGTGGTCAGCGTCCTCACCGTCCTGCACCAGGACT
GGCTGAATGGCAAGGAGTACAAGTGCAAGGTCTCCAACAAAGCCCTCCCA
ACCCCCATCGAGAAAACCATCTCCAAAGCCAAAGGGCAGCCCCGAGAACC
ACAGGTGTACACCCTGCCCCCATCCCGGGATGAGCTGACCAAGAACCAGG
TCAGCCTGACCTGCCTGGTCAAAGGCTTCTATCCAAGCGACATCGCCGTG
GAGTGGGAGAGCAATGGGCAGCCGGAGAACAACTACAAGACCACGCCTCC
CGTGCTGGACTCCGACGGCTCCTTCTTCCTCTACAGCAAGCTCACCGTGG
ACAAGAGCAGGTGGCAGCAGGGGAACGTCTTCTCATGCTCCGTGATGCAT
GAGGCTCTGCACAACCACTACACGCAGAAGAGCCTCTCCCTGTCTCCGGG
TAAATGAGTGCGACGGCCGCGACTCTAGAGGAT

### Example 10

### Production of an Antibody from a Polypeptide

a) Hybridoma Technology

[0745] The antibodies of the present invention can be prepared by a variety of methods. (See, Current Protocols, Chapter 2.) As one example of such methods, cells expressing a polypeptide of the present invention are administered to an animal to induce the production of sera containing polyclonal antibodies. In a preferred method, a preparation of a polypeptide of the present invention is prepared and purified to render it substantially free of natural contaminants. Such a preparation is then introduced into an animal in order to produce polyclonal antisera of greater specific activity.

[0746] Monoclonal antibodies specific for a polypeptide of the present invention are prepared using hybridoma technology (Kohler et al. Nature 256:495 (1975); Kohler et al., Eur. J. Immunol. 6:511 (1976); Kohler et al., Eur. J. Immunol. 6:292 (1976); Hammerling et al., in: Monoclonal Antibodies and T-Cell Hybridomas, Elsevier, N.Y., pp. 563-681 (1981)). In general, an animal (preferably a mouse) is immunized with a polypeptide of the present invention or, more preferably, with a secreted polypeptide-expressing cell. Such polypeptide-expressing cells are cultured in any suitable tissue culture medium, preferably in Earle's modified Eagle's medium supplemented with 10% fetal bovine serum (inactivated at about 56° C.), and supplemented with about 10 g/l of nonessential amino acids, about 1,000 U/ml of penicillin, and about 100 μg/ml of streptomycin.

[0747] The splenocytes of such mice are extracted and fused with a suitable myeloma cell line. Any suitable myeloma cell line may be employed in accordance with the present invention; however, it is preferable to employ the parent myeloma cell line (SP2O), available from the ATCC. After fusion, the resulting hybridoma cells are selectively maintained in HAT medium, and then cloned by limiting dilution as described by Wands et al. (Gastroenterology 80: 225-232 (1981)). The hybridoma cells obtained through such a selection are then assayed to identify clones which secrete antibodies capable of binding the polypeptide of the present invention.

[0748] Alternatively, additional antibodies capable of binding to a polypeptide of the present invention can be produced in a two-step procedure using anti-idiotypic antibodies. Such a method makes use of the fact that antibodies are themselves antigens, and therefore, it is possible to obtain an antibody which binds to a second antibody. In accordance with this method, protein specific antibodies are used to immunize an animal, preferably a mouse. The splenocytes of such an animal are then used to produce hybridoma cells, and the hybridoma cells are screened to identify clones which produce an antibody whose ability to bind to the polypeptide-specific antibody can be blocked by said polypeptide. Such antibodies comprise anti-idiotypic antibodies to the polypeptide-specific antibody and are used to immunize an animal to induce formation of further polypeptide-specific antibodies.

[0749] For in vivo use of antibodies in humans, an antibody is “humanized”. Such antibodies can be produced using genetic constructs derived from hybridoma cells producing the monoclonal antibodies described above. Methods for producing chimeric and humanized antibodies are known in the art and are discussed herein. (See, for review, Morrison, Science 229: 1202 (1985); Oi et al., BioTechniques 4: 214 (1986); Cabilly et al., U.S. Pat. No. 4,816,567; Taniguchi et al., EP 171496; Morrison et al., EP 173494; Neuberger et al., WO 8601533; Robinson et al., International Publication No. WO 8702671; Boulianne et al., Nature 312: 643 (1984); Neuberger et al., Nature 314: 268 (1985)).

[0750] b) Isolation of Antibody Fragments Directed Against a Polypeptide of the Present Invention From a Library of scFvs

[0751] Naturally occurring V-genes isolated from human PBLs are constructed into a library of antibody fragments which contain reactivities against a polypeptide of the present invention to which the donor may or may not have been exposed (see e.g., U.S. Pat. No. 5,885,793 incorporated herein by reference in its entirety).

[0752] Rescue of the Library. A library of scFvs is constructed from the RNA of human PBLs as described in International Publication No. WO 92/01047. To rescue phage displaying antibody fragments, approximately 10⁹ E. coli harboring the phagemid are used to inoculate 50 ml of 2×TY containing 1% glucose and 100 μg/ml of ampicillin (2×TY-AMP-GLU) and grown to an O.D. of 0.8 with shaking. Five ml of this culture is used to inoculate 50 ml of 2×TY-AMP-GLU, 2×108 TU of delta gene 3 helper (M13 delta gene III, see International Publication No. WO 92/01047) are added and the culture incubated at 37° C. for 45 minutes without shaking and then at 37° C. for 45 minutes with shaking. The culture is centrifuged at 4000 r.p.m. for 10 min. and the pellet resuspended in 2 liters of 2×TY containing 100 μg/ml ampicillin and 50 ug/ml kanamycin and grown overnight. Phage are prepared as described in International Publication No. WO 92/01047.

[0753] M13 delta gene III is prepared as follows: M13 delta gene III helper phage does not encode gene III protein, hence the phage(mid) displaying antibody fragments have a greater avidity of binding to antigen. Infectious M13 delta gene III particles are made by growing the helper phage in cells harboring a pUC19 derivative supplying the wild type gene III protein during phage morphogenesis. The culture is incubated for 1 hour at 37° C. without shaking and then for a further hour at 37° C. with shaking. Cells are spun down (LEC-Centra 8,400 r.p.m. for 10 min), resuspended in 300 ml 2×TY broth containing 100 μg ampicillin/ml and 25 μg kanamycin/ml (2×TY-AMP-KAN) and grown overnight, shaking at 37° C. Phage particles are purified and concentrated from the culture medium by two PEG-precipitations (Sambrook et al., 1990), resuspended in 2 ml PBS and passed through a 0.45 μm filter (Minisart NML; Sartorius) to give a final concentration of approximately 10¹³ transducing units/ml (ampicillin-resistant clones).

[0754] Panning of the Library. Immunotubes (Nunc) are coated overnight in PBS with 4 ml of either 100 μg/ml or 10 μg/ml of a polypeptide of the present invention. Tubes are blocked with 2% Marvel-PBS for 2 hours at 37° C. and then washed 3 times in PBS. Approximately 10¹³ TU of phage is applied to the tube and incubated for 30 minutes at room temperature tumbling on an over and under turntable and then left to stand for another 1.5 hours. Tubes are washed 10 times with PBS 0.1% Tween-20 and 10 times with PBS. Phage are eluted by adding 1 ml of 100 mM triethylamine and rotating 15 minutes on an under and over turntable after which the solution is immediately neutralized with 0.5 ml of 1.0M Tris-HCl, pH 7.4. Phage are then used to infect 10 ml of mid-log E. coli TG1 by incubating eluted phage with bacteria for 30 minutes at 37° C. The E. coli are then plated on TYE plates containing 1% glucose and 100 μg/ml ampicillin. The resulting bacterial library is then rescued with delta gene 3 helper phage as described above to prepare phage for a subsequent round of selection. This process is then repeated for a total of 4 rounds of affinity purification with tube-washing increased to 20 times with PBS, 0.1% Tween-20 and 20 times with PBS for rounds 3 and 4.

[0755] Characterization of Binders. Eluted phage from the 3rd and 4th rounds of selection are used to infect E. coli HB 2151 and soluble scFv is produced (Marks, et al., 1991) from single colonies for assay. ELISAs are performed with microtitre plates coated with either 10 pg/ml of the polypeptide of the present invention in 50 mM bicarbonate pH 9.6. Clones positive in ELISA are further characterized by PCR fingerprinting (see e.g., International Publication No. WO 92/01047) and then by sequencing. These ELISA positive clones may also be further characterized by techniques known in the art, such as, for example, epitope mapping, binding affinity, receptor signal transduction, ability to block or competitively inhibit antibody/antigen binding, and competitive agonistic or antagonistic activity.

### Example 11

### Method of Determining Alterations in a Gene Corresponding to a Polynucleotide

[0756] RNA isolated from entire families or individual patients presenting with a cardiovascular disease or disorder is isolated. cDNA is then generated from these RNA samples using protocols known in the art. (See, Sambrook.) The cDNA is then used as a template for PCR, employing primers surrounding regions of interest in SEQ ID NO:X; and/or the nucleotide sequence of the cDNA contained in ATCC Deposit No:Z. Suggested PCR conditions consist of 35 cycles at 95 degrees C. for 30 seconds; 60-120 seconds at 52-58 degrees C.; and 60-120 seconds at 70 degrees C., using buffer solutions described in Sidransky et al., Science 252: 706 (1991).

[0757] PCR products are then sequenced using primers labeled at their 5′ end with T4 polynucleotide kinase, employing SequiTherm Polymerase (Epicentre Technologies). The intron-exon boundaries of selected exons is also determined and genomic PCR products analyzed to confirm the results. PCR products harboring suspected mutations are then cloned and sequenced to validate the results of the direct sequencing.

[0758] PCR products are cloned into T-tailed vectors as described in Holton et al., Nucleic Acids Research, 19: 1156 (1991) and sequenced with T7 polymerase (United States Biochemical). Affected individuals are identified by mutations not present in unaffected individuals.

[0759] Genomic rearrangements are also observed as a method of determining alterations in a gene corresponding to a polynucleotide. Genomic clones isolated according to Example 2 are nick-translated with digoxigenindeoxy-uridine 5′-triphosphate (Boehringer Manheim), and FISH performed as described in Johnson et al., Methods Cell Biol. 35: 73-99 (1991). Hybridization with the labeled probe is carried out using a vast excess of human cot-1 DNA for specific hybridization to the corresponding genomic locus.

[0760] Chromosomes are counterstained with 4,6-diamino-2-phenylidole and propidium iodide, producing a combination of C- and R-bands Aligned images for precise mapping are obtained using a triple-band filter set (Chroma Technology, Brattleboro, Vt.) in combination with a cooled charge-coupled device camera (Photometrics, Tucson, Ariz.) and variable excitation wavelength filters. (Johnson et al., Genet. Anal. Tech. Appl., 8: 75 (1991)). Image collection, analysis and chromosomal fractional length measurements are performed using the ISee Graphical Program System. (Inovision Corporation, Durham, N.C.) Chromosome alterations of the genomic region hybridized by the probe are identified as insertions, deletions, and translocations. These alterations are used as a diagnostic marker for an associated disease.

### Example 12

### Method of Detecting Abnormal Levels of a Polypeptide in a Biological Sample

[0761] A polypeptide of the present invention can be detected in a biological sample, and if an increased or decreased level of the polypeptide is detected, this polypeptide is a marker for a particular phenotype. Methods of detection are numerous, and thus, it is understood that one skilled in the art can modify the following assay to fit their particular needs.

[0762] For example, antibody-sandwich ELISAs are used to detect polypeptides in a sample, preferably a biological sample. Wells of a microtiter plate are coated with specific antibodies, at a final concentration of 0.2 to 10 ug/ml. The antibodies are either monoclonal or polyclonal and are produced by the method described in Example 10. The wells are blocked so that non-specific binding of the polypeptide to the well is reduced.

[0763] The coated wells are then incubated for >2 hours at RT with a sample containing the polypeptide. Preferably, serial dilutions of the sample should be used to validate results. The plates are then washed three times with deionized or distilled water to remove unbound polypeptide.

[0764] Next, 50 ul of specific antibody-alkaline phosphatase conjugate, at a concentration of 25-400 ng, is added and incubated for 2 hours at room temperature. The plates are again washed three times with deionized or distilled water to remove unbound conjugate.

[0765] Add 75 ul of 4-methylumbelliferyl phosphate (MUP) or p-nitrophenyl phosphate (NPP) substrate solution to each well and incubate 1 hour at room temperature. Measure the reaction by a microtiter plate reader. Prepare a standard curve, using serial dilutions of a control sample, and plot polypeptide concentration on the X-axis (log scale) and fluorescence or absorbance of the Y-axis (linear scale). Interpolate the concentration of the polypeptide in the sample using the standard curve.

### Example 13

### Formulation

[0766] The invention also provides methods of preventing, treating and/or ameliorating a cardiovascular disease or disorder by administration to a subject of an effective amount of a Therapeutic. By therapeutic is meant polynucleotides or polypeptides of the invention (including fragments and variants), agonists or antagonists thereof, and/or antibodies thereto, in combination with a pharmaceutically acceptable carrier type (e.g., a sterile carrier).

[0767] The Therapeutic will be formulated and dosed in a fashion consistent with good medical practice, taking into account the clinical condition of the individual patient (especially the side effects of treatment with the Therapeutic alone), the site of delivery, the method of administration, the scheduling of administration, and other factors known to practitioners. The “effective amount” for purposes herein is thus determined by such considerations.

[0768] As a general proposition, the total pharmaceutically effective amount of the Therapeutic administered parenterally per dose will be in the range of about 1 ug/kg/day to 10 mg/kg/day of patient body weight, although, as noted above, this will be subject to therapeutic discretion. More preferably, this dose is at least 0.01 mg/kg/day, and most preferably for humans between about 0.01 and 1 mg/kg/day for the hormone. If given continuously, the Therapeutic is typically administered at a dose rate of about I ug/kg/hour to about 50 ug/kg/hour, either by 14 injections per day or by continuous subcutaneous infusions, for example, using a mini-pump. An intravenous bag solution may also be employed. The length of treatment needed to observe changes and the interval following treatment for responses to occur appears to vary depending on the desired effect.

[0769] Therapeutics can be are administered orally, rectally, parenterally, intracisternally, intravaginally, intraperitoneally, topically (as by powders, ointments, gels, drops or transdermal patch), bucally, or as an oral or nasal spray. “Pharmaceutically acceptable carrier” refers to a non-toxic solid, semisolid or liquid filler, diluent, encapsulating material or formulation auxiliary of any. The term “parenteral” as used herein refers to modes of administration which include intravenous, intramuscular, intraperitoneal, intrastemal, subcutaneous and intraarticular injection and infusion.

[0770] Therapeutics of the invention are also suitably administered by sustained-release systems. Suitable examples of sustained-release Therapeutics are administered orally, rectally, parenterally, intracisternally, intravaginally, intraperitoneally, topically (as by powders, ointments, gels drops or transdermal patch), bucally, or as an oral or nasal spray. “Pharmaceutically acceptable carrier” refers to a non-toxic solid, semisolid or liquid filler, diluent, encapsulating material or formulation auxiliary of any type. The term “parenteral” as used herein refers to modes of administration which include intravenous, intramuscular, intraperitoneal, intrastemal, subcutaneous and intraarticular injection and infusion.

[0771] Therapeutics of the invention are also suitably administered by sustained-release systems. Suitable examples of sustained-release Therapeutics include suitable polymeric materials (such as, for example, semi-permeable polymer matrices in the form of shaped articles, e.g., films, or mirocapsules), suitable hydrophobic materials (for example as an emulsion in an acceptable oil) or ion exchange resins, and sparingly soluble derivatives (such as, for example, a sparingly soluble salt).

[0772] Sustained-release matrices include polylactides (U.S. Pat. No. 3,773,919, EP 58,481), copolymers of L-glutamic acid and gamma-ethyl-L-glutamate (Sidman et al., Biopolymers 22: 547-556 (1983)), poly (2-hydroxyethyl methacrylate) (Langer et al., J. Biomed. Mater. Res. 15: 167-277 (1981), and Langer, Chem. Tech. 12:98-105 (1982)), ethylene vinyl acetate (Langer et al., Id.) or poly-D-(−)-3-hydroxybutyric acid (EP 133,988).

[0773] In a preferred embodiment, polypeptide, polynucleotide, and antibody compositions of the invention are formulated in a biodegradable, polymeric drug delivery system, for example as described in U.S. Pat. Nos. 4,938,763; 5,278,201; 5,278,202; 5,324,519; 5,340,849; and 5,487,897 and in International Publication Numbers WO01/35929, WO00/24374, and WO0/06117 which are hereby incorporated by reference in their entirety In specific preferred embodiments the polypeptide, polynucleotide, and antibody compositions of the invention are formulated using the ATRIGEL® Biodegradable System of Atrix Laboratories, Inc. (Fort Collins, Colo.).

[0774] Examples of biodegradable polymers which can be used in the formulation of polypeptide, polynucleotide, and antibody compositions, include but are not limited to, polylactides, polyglycolides, polycaprolactones, polyanhydrides, polyamides, polyurethanes, polyesteramides, polyorthoesters, polydioxanones, polyacetals, polyketals, polycarbonates, polyorthocarbonates, polyphosphazenes, polyhydroxybutyrates, polyhydroxyvalerates, polyalkylene oxalates, polyalkylene succinates, poly(malic acid), poly(amino acids), poly(methyl vinyl ether), poly(maleic anhydride), polyvinylpyrrolidone, polyethylene glycol, polyhydroxycellulose, chitin, chitosan, and copolymers, terpolymers, or combinations or mixtures of the above materials. The preferred polymers are those that have a lower degree of crystallization and are more hydrophobic. These polymers and copolymers are more soluble in the biocompatible solvents than the highly crystalline polymers such as polyglycolide and chitin which also have a high degree of hydrogen-bonding. Preferred materials with the desired solubility parameters are the polylactides, polycaprolactones, and copolymers of these with glycolide in which there are more amorphous regions to enhance solubility. In specific preferred embodiments, the biodegradable polymers which can be used in the formulation of polypeptide, polynucleotide, and antibody compositions are poly(lactide-co-glycolides). Polymer properties such as molecular weight, hydrophobicity, and lactide/glycolide ratio may be modified to obtain the desired polypeptide, polynucleotide, or antibody release profile (See, e.g., Ravivarapu et al., Journal of Pharmaceutical Sciences 89: 732-741 (2000), which is hereby incorporated by reference in its entirety).

[0775] It is also preferred that the solvent for the biodegradable polymer be non-toxic, water miscible, and otherwise biocompatible. Examples of such solvents include, but are not limited to, N-methyl-2-pyrrolidone, 2-pyrrolidone, C2 to C6 alkanols, C1 to C15 alcohols, dils, triols, and tetraols such as ethanol, glycerine propylene glycol, butanol; C3 to C15 alkyl ketones such as acetone, diethyl ketone and methyl ethyl ketone; C3 to C15 esters such as methyl acetate, ethyl acetate, ethyl lactate; alkyl ketones such as methyl ethyl ketone, C1 to C15 amides such as dimethylformamide, dimethylacetamide and caprolactam; C3 to C20 ethers such as tetrahydrofuran, or solketal; tweens, triacetin, propylene carbonate, decylmethylsulfoxide, dimethyl sulfoxide, oleic acid, 1-dodecylazacycloheptan-2-one, Other preferred solvents are benzyl alchohol, benzyl benzoate, dipropylene glycol, tributyrin, ethyl oleate, glycerin, glycofural, isopropyl myristate, isopropyl palmitate, oleic acid, polyethylene glycol, propylene carbonate, and triethyl citrate. The most preferred solvents are N-methyl-2-pyrrolidone, 2-pyrrolidone, dimethyl sulfoxide, triacetin, and propylene carbonate because of the solvating ability and their compatibility.

[0776] Additionally, formulations comprising polypeptide, polynucleotide, and antibody compositions and a biodegradable polymer may also include release-rate modification agents and/or pore-forming agents. Examples of release-rate modification agents include, but are not limited to, fatty acids, triglycerides, other like hydrophobic compounds, organic solvents, plasticizing compounds and hydrophilic compounds. Suitable release rate modification agents include, for example, esters of mono-, di-, and tricarboxylic acids, such as 2-ethoxyethyl acetate, methyl acetate, ethyl, acetate, diethyl phthalate, dimethyl phthalate, dibutyl phthalate, dimethyl adipate, dimethyl succinate, dimethyl oxalate, dimethyl citrate, triethyl citrate, acetyl tributyl citrate, acetyl triethyl citrate, glycerol triacetate, di(n-butyl) sebecate, and the like; polyhydroxy alcohols, such as propylene glycol, polyethylene glycol, glycerin, sorbitol, and the like; fatty acids; triesters of glycerol, such as triglycerides, epoxidized soybean oil, and other epoxidized vegetable oils; sterols, such as cholesterol; alcohols, such as C.sub.6-C.sub.12 alkanols, 2-ethoxyethanol. The release rate modification agent may be used singly or in combination with other such agents. Suitable combinations of release rate modification agents include, but are not limited to, glycerin/propylene glycol, sorbitoUglycerine, ethylene oxide/propylene oxide, butylene glycoUadipic acid, and the like. Preferred release rate modification agents include, but are not limited to, dimethyl citrate, triethyl citrate, ethyl heptanoate, glycerin, and hexanediol. Suitable pore-forming agents that may be used in the polymer composition include, but are not limited to, sugars such as sucrose and dextrose, salts such as sodium chloride and sodium carbonate, polymers such as hydroxylpropylcellulose, carboxymethylcellulose, polyethylene glycol, and polyvinylpyrrolidone. Solid crystals that will provide a defined pore size, such as salt or sugar, are preferred.

[0777] In specific preferred embodiments the polypeptide, polynucleotide, and antibody compositions of the invention are formulated using the BEMA™ BioErodible Mucoadhesive System, MCA™ MucoCutaneous Absorption System, SMP™ Solvent MicroParticle System, or BCP™ BioCompatible Polymer System of Atrix Laboratories, Inc. (Fort Collins, Colo.).

[0778] Sustained-release Therapeutics also include liposomally entrapped Therapeutics of the invention (see generally, Langer, Science 249: 1527-1533 (1990); Treat et al., in Liposomes in the Therapy of Infectious Disease and Cancer, Lopez-Berestein and Fidler (eds.) Liss, N.Y., pp. 317 -327 and 353-365 (1989)). Liposomes containing the Therapeutic are prepared by methods known per se: DE 3,218,121; Epstein et al., Proc. Natl. Acad. Sci. (USA) 82: 3688-3692 (1985); Hwang et al., Proc. Natl. Acad. Sci.(USA) 77: 4030-4034 (1980); EP 52,322; EP 36,676; EP 88,046; EP 143,949; EP 142,641; Japanese Pat. Appl. 83-118008; U.S. Pat. Nos. 4,485,045 and 4,544,545; and EP 102,324. Ordinarily, the liposomes are of the small (about 200-800 Angstroms) unilamellar type in which the lipid content is greater than about 30 mol. percent cholesterol, the selected proportion being adjusted for the optimal Therapeutic.

[0779] In yet an additional embodiment, the Therapeutics of the invention are delivered by way of a pump (see Langer, supra; Sefton, CRC Crit. Ref. Biomed. Eng. 14: 201 (1987); Buchwald et al., Surgery 88:507 (1980); Saudek et al., N. Engl. J. Med. 321:574 (1989)).

[0780] Other controlled release systems are discussed in the review by Langer (Science 249: 1527-1533 (1990)).

[0781] For parenteral administration, in one embodiment, the Therapeutic is formulated generally by mixing it at the desired degree of purity, in a unit dosage injectable form (solution, suspension, or emulsion), with a pharmaceutically acceptable carrier, i.e., one that is non-toxic to recipients at the dosages and concentrations employed and is compatible with other ingredients of the formulation. For example, the formulation preferably does not include oxidizing agents and other compounds that are known to be deleterious to the Therapeutic.

[0782] Generally, the formulations are prepared by contacting the Therapeutic uniformly and intimately with liquid carriers or finely divided solid carriers or both. Then, if necessary, the product is shaped into the desired formulation. Preferably the carrier is a parenteral carrier, more prefereably a solution that is isotonic with the blood of the recipient. Examples of such carrier vehicles include water, saline, Ringer's solution, and dextrose solution. Non-aqueous vehicles such as fixed oils and ethyl oleate are also useful herein, as well as liposomes.

[0783] The carrier suitably contains minor amounts of additives such as substances that enhance isotonicity and chemical stability. Such materials are non-toxic to recipients at the dosages and concentrations employed, and include buffers such as phosphate, citrate, succinate, acetic acid, and other organic acids or their salts; antioxidants such as ascorbic acid; low molecular weight (less than about ten residues) polypeptides, e.g., polyarginie or tripeptides; proteins, such as serum albumin, gelatin, or immunoglobulins; hydrophilic polymers such as polyvinylpyrrolidone; amino acids, such as glycine, glutamic acid, aspartic acid, or arginine; monosaccharides, disaccharides, and other carbohydrates including cellulose or its derivatives, glucose, manose, or dextrins; chelating agents such as EDTA; sugar alcohols such as mannitol or sorbitol; counterions such as sodium; and/or nonionic surfactants such as polysorbates, poloxaners, or PEG.

[0784] The Therapeutic is typically formulated in such vehicles at a concentration of about 0.1 mg/ml to 100 mg/ml, preferably 1-10 mg/ml, at a pH of about 3 to 8. It will be understood that the use of certain of the foregoing excipients, carriers, or stabilizers will result in the formation of polypeptide salts.

[0785] Any pharmaceutical used for therapeutic administration can be sterile. Sterility is readily accomplished by filtration through sterile filtration membranes (e.g., 0.2 micron membranes). Therapeutics generally are placed into a container having a sterile access port, for example, an intravenous solution bag or vial having a stopper pierceable by a hypodermic injection needle.

[0786] Therapeutics ordinarily will be stored in unit or multi-dose containers, for example, sealed ampoules or vials, as an aqueous solutions or as a lyophilized formulation for reconstitution. As an example of a lyophilized formulation, 10-ml vials are filled with 5 ml of sterile-filtered 1% (w/v) aqueous Therapeutic solution, and the resulting mixture is lyophilized. The infusion solution is prepared by reconstituting the lyophilized Therapeutic using bacteriostatic Water-for-Injection.

[0787] The invention also provides a pharmaceutical pack or kit comprising one or more containers filled with one or more of the ingredients of the Therapeutics of the invention. Associated with such container(s) can be a notice in the form prescribed by a governmental agency regulating the manufacture, use or sale of pharmaceuticals or biological products, which notice reflects approval by the agency of manufacture, use or sale for human administration. In addition, the Therapeutics may be employed in conjunction with other therapeutic compounds.

[0788] The Therapeutics of the invention may be administered alone or in combination with adjuvants. Adjuvants that may be administered with the Therapeutics of the invention include, but are not limited to, alum, alum plus deoxycholate (ImmunoAg), MTP-PE (Biocine Corp.), QS21 (Genentech, Inc.), BCG (e.g., THERACYS®), MPL and nonviable prepartions of Corynebacterium parvum. In a specific embodiment, Therapeutics of the invention are administered in combination with alum. In another specific embodiment, Therapeutics of the invention are administered in combination with QS-21. Further adjuvants that may be administered with the Therapeutics of the invention include, but are not limited to, Monophosphoryl lipid immunomodulator, AdjuVax 100a, QS-21, QS-18, CRL1005, Aluminum salts, MF-59, and Virosomal adjuvant technology Vaccines that may be administered with the Therapeutics of the invention include, but are not limited to, vaccines directed toward protection against MMR (measles, mumps, rubella), polio, varicella, tetanus/diptheria, hepatitis A, hepatitis B, haemophilus influenzae B, whooping cough, pneumonia, influenza, Lyme's Disease, rotavirus, cholera, yellow fever, Japanese encephalitis, poliomyelitis, rabies, typhoid fever, and pertussis. Combinations may be administered either concomitantly, e.g., as an admixture, separately but simultaneously or concurrently; or sequentially. This includes presentations in which the combined agents are administered together as a therapeutic mixture, and also procedures in which the combined agents are administered separately but simultaneously, e.g., as through separate intravenous lines into the same individual. Administration “in combination” further includes the separate administration of one of the compounds or agents given first, followed by the second.

[0789] The Therapeutics of the invention may be administered alone or in combination with other therapeutic agents. Therapeutic agents that may be administered in combination with the Therapeutics of the invention, include but not limited to, chemotherapeutic agents, antibiotics, steroidal and non-steroidal anti-inflammatories, conventional immunotherapeutic agents, and/or therapeutic treatments described below. Combinations may be administered either concomitantly, e.g., as an admixture, separately but simultaneously or concurrently; or sequentially. This includes presentations in which the combined agents are administered together as a therapeutic mixture, and also procedures in which the combined agents are administered separately but simultaneously, e.g., as through separate intravenous lines into the same individual. Administration “in combination” further includes the separate administration of one of the compounds or agents given first, followed by the second.

[0790] In one embodiment, the Therapeutics of the invention are administered in combination with an anticoagulant. Anticoagulants that may be administered with the compositions of the invention include, but are not limited to, heparin, low molecular weight heparin, warfarin sodium (e.g., COUMADIN®), dicumarol, 4-hydroxycoumarin, anisindione (e.g., MIRAON™), acenocoumarol (e.g., nicoumalone, SINTHROME™), indan-1,3-dione, phenprocoumon (e.g., MARCUMAR™), ethyl biscoumacetate (e.g., TROMEXAN™), and aspirin. In a specific embodiment, compositions of the invention are administered in combination with heparin and/or warfarin. In another specific embodiment, compositions of the invention are administered in combination with warfarin. In another specific embodiment, compositions of the invention are administered in combination with warfarin and aspirin. In another specific embodiment, compositions of the invention are administered in combination with heparin. In another specific embodiment, compositions of the invention are administered in combination with heparin and aspirin.

[0791] In another embodiment, the Therapeutics of the invention are administered in combination with thrombolytic drugs. Thrombolytic drugs that may be administered with the compositions of the invention include, but are not limited to, plasminogen, lys-plasminogen, alpha2-antiplasmin, streptokinae (e.g., KABIKINASE™), antiresplace (e.g., EMINASE™), tissue plasminogen activator (t-PA, altevase, ACTIVASE™), urokinase (e.g., ABBOKINASE™), sauruplase, (Prourokinase, single chain urokinase), and aminocaproic acid (e.g., AMICAR™). In a specific embodiment, compositions of the invention are administered in combination with tissue plasminogen activator and aspirin.

[0792] In another embodiment, the Therapeutics of the invention are administered in combination with antiplatelet drugs. Antiplatelet drugs that may be administered with the compositions of the invention include, but are not limited to, aspirin, dipyridamole (e.g., PERSANTINE™), and ticlopidine (e.g., TICLID™).

[0793] In specific embodiments, the use of anti-coagulants, thrombolytic and/or antiplatelet drugs in combination with Therapeutics of the invention is contemplated for the detection, prevention, diagnosis, prognostication, treatment, and/or amelioration of thrombosis, arterial thrombosis, venous thrombosis, thromboembolism, pulmonary embolism, atherosclerosis, myocardial infarction, transient ischemic attack, unstable angina. In specific embodiments, the use of anticoagulants, thrombolytic drugs and/or antiplatelet drugs in combination with Therapeutics of the invention is contemplated for the prevention of occulsion of saphenous grafts, for reducing the risk of periprocedural thrombosis as might accompany angioplasty procedures, for reducing the risk of stroke in patients with atrial fibrillation including nonrheumatic atrial fibrillation, for reducing the risk of embolism associated with mechanical heart valves and or mitral valves disease. Other uses for the therapeutics of the invention, alone or in combination with antiplatelet, anticoagulant, and/or thrombolytic drugs, include, but are not limited to, the prevention of occlusions in extracorporeal devices (e.g., intravascular canulas, vascular access shunts in hemodialysis patients, hemodialysis machines, and cardiopulmonary bypass machines).

[0794] Therapeutics of the invention may also be administered in combination with additional cardiovascular agents, such as, for example, beta-adrenergic blockers, calcium channel blockers, ACE inhibitors, angiotensin II blockers, alpha adrenergic blockers, hypotensive agents, antilipemic agents, and vasodilating agents.

[0795] Non-limiting examples of beta-adrenergic blockers includes TENORMIN™ (atenolol), BREVIBLOC™ (esmolol), NORMODYNE™ (labetalol), TRANDATE™, LOPRESSOR™ (metoprolol), INDERAL™ (propranolol), and BETApp96™ (sotalol). Calcium channel blockers includes, for example, NORVASC™ (amlodipine), CARDIZEM™ (diltiazem), PLENDIL™ (felodipine), DYNACRIC™ (isradipine), CARDENE™ (nicardipine), ADALAT™ (nifedipine), and CALAN™ (verapamil). ACE inhibitors includes, for example, LOTENSIN™ (benazepril), CAPOTEN™ (captopril), VASOTEC™ (enalapril), MONOPRIL™ (fosinopril), PRINIVIL™ (lisinopril), ACCUPRIL™ (quinapril), and ALTACE™ (ramipril). Non-limiting examples of angiotensin II blockers includes AVAPRO™ (irbesartan), COZAAR™ (losartan), and DIOVAN™ (valsartan). Alpha adrenergic blockers includes, for example, CARDURA™ (doxazosin), MINIPRESS™ (prazosin), FLOMAX™ (tamsulosin), and terazosin. Hypotensive agents include, for example, CATA-PREST™ (clonidine), APRESOLINE™ (hydralazine), ALDOMET™ (methyldopa), LONITEN™ (minoxidil), NIPRIDE™ (nitroprusside) and reserpine. Antilipemic agents include, for example, LIPITOR™ (atorvastatin), QUESTRAN™ (cholestyramine), LOLESTID™ (colestipol), TRICOR™ (fenofibrate), LOPID™ (gemfibrate), MEVACOR™ (lovstatin), PRAVACHOL™ (pravastatin), and ZOCOR™ (simvastatin). Non-limiting examples of vasodilating agents include alprostadil, amyl nitrite, PERSANTIN™ (dipyridamole), FLONAN™ (epoprostenol), ISORDIL™ (isosorbide dinitrate), IMDURT™ (isosorbide mononitrate), NIMOTOP™ (nimodipine), INOmax™ (nitric oxide gas), nitroglycerin, papaverine, and PRISCOLINE™ (tolazoline).

[0796] In certain embodiments, Therapeutics of the invention are administered in combination with antiretroviral agents, nucleoside/nucleotide reverse transcriptase inhibitors (NRTIs), non-nucleoside reverse transcriptase inhibitors (NNRTIs), and/or protease inhibitors (PIs). NRTIs that may be administered in combination with the Therapeutics of the invention, include, but are not limited to, RETROVIR™ (zidovudine/AZT), VIDEX™ (didanosine/ddI), HIVID™ (zalcitabine/ddC), ZERIT™ (stavudine/d4T), EPIVIR™ (lamivudine/3TC), and COMBIVIR™ (zidovudine/lamivudine). NNRTIs that may be administered in combination with the Therapeutics of the invention, include, but are not limited to, VIRAMUNE™ (nevirapine) RESCRIPTOR™ (delavirdine), and SUSTIVA™ (efavirenz). Protease inhibitors that may be administered in combination with the Therapeutics of the invention, include, but are not limited to, CRIXIVAN™ (indinavir), NORVIR™ (ritonavir), INVIRASE™ (saquinavir), and VIRACEPT™ (nelfinavir). In a specific embodiment, antiretroviral agents, nucleoside reverse transcriptase inhibitors, non-nucleoside reverse transcriptase inhibitors, and/or protease inhibitors may be used in any combination with Therapeutics of the invention to treat AIDS and/or to prevent or treat HIV infection.

[0797] Additional NRTIs include LODENOSINET™ (F-ddA; an acid-stable adenosine NRTI; Triangle/Abbon; COVIRAClL™ (emtricitabine/FTC; structurally related to lamivudine (3TC) but with 3- to 10-fold greater activity in vitro; Triangle/Abbott); dOTC (BCH-10652, also structurally related to lamivudine but retains activity against a substantial proportion of lamivudine-resistant isolates; Biochem Pharma); Adefovir (refused approval for anti-HIV therapy by FDA; Gilead Sciences); PREVEON® (Adefovir Dipivoxil, the active prodrug of adefovir; its active form is PMEA-pp); TENOFOVIR™ (bis-POC PMPA, a PMPA prodrug; Gilead); DAPD/DXG (active metabolite of DAPD; Triangle/Abbott); D-D4FC (related to 3TC, with activity against AZT/3TC-resistant virus); GW420867X (Glaxo Wellcome); ZIAGEN™ (abacavir/159U89; Glaxo Wellcome Inc.); CS-87 (3′azido-2′,3′-dideoxyuridine; WO 99/66936); and S-acyl-2-thioethyl (SATE)-bearing prodrug forms of β-L-FD4C and β-L-FddC (WO 98/17281).

[0798] Additional NNRTIs include COACTINON™ (Emivirine/MKC-442, potent NNRTI of the HEPT class; Triangle/Abbott); CAPRAVIRINE™ (AG-1549/S-1153, a next generation NNRTI with activity against viruses containing the K103N mutation; Agouron); PNU-14272 (has 20- to 50-fold greater activity than its predecessor delavirdine and is active against K103N mutants; Pharmacia & Upjohn), DPC-961 and DPC-963 (second-generation derivatives of efavirenz, designed to be active against viruses with the K103N mutation; DuPont); GW-420867X (has 25-fold greater activity than HBY097 and is active against K103N mutants; Glaxo Wellcome); CALANOLIDE A (naturally occurring agent from the latex tree; active against viruses containing either or both the Y181C and K103N mutations); and Propolis (WO 99/49830).

[0799] Additional protease inhibitors include LOPINAVIR™ (ABT378/r; Abbott Laboratories); BMS-232632 (an azapeptide; Bristol-Myres Squibb); TIPRANAVIR™ (PNU-140690, a non-peptic dihydropyrone; Pharmacia & Upjohn); PD-178390 (a nonpeptidic dihydropyrone; Parke-Davis); BMS 232632 (an azapeptide; Bristol-Myers Squibb); L-756,423 (an indinavir analog; Merck); DMP450 (a cyclic urea compound; Avid & DuPont); AG-1776 (a peptidomimetic with in vitro activity against protease inhibitor-resistant viruses; Agouron); VX-175/GW433908 (phosphate prodrug of amprenavir; Vertex & Glaxo Welcome); CGP61755 (Ciba); and AGENERASE™ (amprenavir; Glaxo Wellcome Inc.).

[0800] Additional antiretroviral agents include fusion inhibitors/gp4l binders. Fusion inhibitors/gp41 binders include T-20 (a peptide from residues 643-678 of the HIV gp41 transmembrane protein ectodomain which binds to gp41 in its resting state and prevents transformation to the fusogenic state; Trimeris) and T-1249 (a second-generation fusion inhibitor; Trimeris).

[0801] Additional antiretroviral agents include fusion inhibitors/chemokine receptor antagonists. Fusion inhibitors/chernokine receptor antagonists include CXCR4 antagonists such as AMD 3100 (a bicyclam), SDF-1 and its analogs, and ALX40-4C (a cationic peptide), T22 (and 18 amino acid peptide; Trimeris) and the T22 analogs T134 and T140; CCR5 antagonists such as RANTES (9-68), AOP-RANTES, NNY-RANTES, and TAK-779; and CCR5/CXCR4 antagonists such as NSC 651016 (a distamycin analog). Also included are CCR2B, CCR3, and CCR6 antagonists. Chemokine recpetor agonists such as RANTES, SDF-1, MIP-1α, MIP-1β, etc., may also inhibit fusion.

[0802] Additional antiretroviral agents include integrase inhibitors. Integrase inhibitors include dicaffeoylquinic (DFQA) acids; L-chicoric acid (a dicaffeoyltartaric (DCTA) acid); quinalizarin (QLC) and related anthraquinones; ZINTEVIR™ (AR 177, an oligonucleotide that probably acts at cell surface rather than being a true integrase inhibitor; Arondex); and naphthols such as those disclosed in WO 98/50347.

[0803] Additional antiretroviral agents include hydroxyurea-like compounds such as BCX-34 (a purine nucleoside phosphorylase inhibitor; Biocryst); ribonucleotide reductase inhibitors such as DIDOX™ (Molecules for Health); inosine monophosphate dehydrogenase (IMPDH) inhibitors sucha as VX497 (Vertex); and mycopholic acids such as CellCept (mycophenolate mofetil; Roche).

[0804] Additional antiretroviral agents include inhibitors of viral integrase, inhibitors of viral genome nuclear translocation such as arylene bis(methylketone) compounds; inhibitors of HIV entry such as AOP-RANTES, NNY-RANTES, RANTES-IgG fusion protein, soluble complexes of RANTES and glycosaminoglycans (GAG), and AMD-3100; nucleocapsid zinc finger inhibitors such as dithiane compounds; targets of HIV Tat and Rev; and pharmacoenhancers such as ABT-378.

[0805] Other antiretroviral therapies and adjunct therapies include cytokines and lymphokines such as MIP-1α, MIP-1β, SDF-1α, IL-2, PROLEUKIN™ (aldesleukin/L2-7001; Chiron), IL-4, IL-10, IL-12, and IL-13; interferons such as IFN-α2a; antagonists of TNFs, NFκB, GM-CSF, M-CSF, and IL-10; agents that modulate immune activation such as cyclosporin and prednisone; vaccines such as Remune™ (HIV Immunogen), APL 400-003 (Apollon), recombinant gp120 and fragments, bivalent (B/E) recombinant envelope glycoprotein, rgp120CM235, MN rgp120, SF-2 rgp120, gp120/soluble CD4 complex, Delta JR-FL protein, branched synthetic peptide derived from discontinuous gp120 C3/C4 domain, fusion-competent immunogens, and Gag, Pol, Nef, and Tat vaccines; gene-based therapies such as genetic suppressor elements (GSEs; WO 98/54366), and intrakines (genetically modified CC chemokines targetted to the ER to block surface expression of newly synthesized CCR5 (Yang et al., PNAS 94: 11567-72 (1997); Chen et al., Nat Med. 3:1110-16 (1997)); antibodies such as the anti-CXCR4 antibody 12G5, the anti-CCR5 antibodies 2D7, 5C7, PA8, PA9, PA10, PA11, PA12, and PA14, the anti-CD4 antibodies Q4120 and RPA-T4, the anti-CCR3 antibody 7B11, the anti-gp120 antibodies 17b, 48d, 447-52D, 257-D, 268-D and 50.1, anti-Tat antibodies, anti-TNF-α antibodies, and monoclonal antibody 33A; aryl hydrocarbon (AH) receptor agonists and antagonists such as TCDD, 3,3′,4,4′,5-pentachlorobiphenyl, 3,3′,4,4′-tetrachlorobiphenyl, and α-naphthoflavone (WO 98/30213); and antioxidants such as γ-L-glutamyl-L-cysteine ethyl ester (γ-GCE; WO 99/56764).

[0806] In a further embodiment, the Therapeutics of the invention are administered in combination with an antiviral agent. Antiviral agents that may be administered with the Therapeutics of the invention include, but are not limited to, acyclovir, ribavirin, amantadine, and remantidine.

[0807] In other embodiments, Therapeutics of the invention may be administered in combination with anti-opportunistic infection agents. Anti-opportunistic agents that may be administered in combination with the Therapeutics of the invention, include, but are not limited to, TRIMETHOPRIM-SULFAMETHOXAZOLE™, DAPSONE™, PENTAMIDINE™, ATOVAQUONE™, ISONIAZID™, RIFAMPIN™, PYRAZINAMIDET™, ETHAMBUTOL™, RIFABUTIN™, CLARITHROMYCIN™, AZITHROMYCIN™, GANCICLOVIR™, FOSCARNET™, CIDOFOVIR™, FLUCONAZOLE™, ITRACONAZOLE™, KETOCONAZOLE™, ACYCLOVIR™, FAMCICOLVIR™, PYRIMIETIAMINE™, LEUCOVORIN™, NEUPOGEN™ (filgrastim/G-CSF), and LEUKINE™ (sargramostim/GM-CSF). In a specific embodiment, Therapeutics of the invention are used in any combination with TRIMETHOPRIM-SULFAMETHOXAZOLE™, DAPSONE™, PENTAMIDINE™, and/or ATOVAQUONE™ to prophylactically treat or prevent an opportunistic Pneumocystis carinii pneumonia infection. In another specific embodiment, Therapeutics of the invention are used in any combination with ISONIAZID™, RIFAMPIN™, PYRAZINAMIDE™, and/or ETHAMBUTOL™ to prophylactically treat or prevent an opportunistic Mycobacterium avium complex infection. In another specific embodiment, Therapeutics of the invention are used in any combination with RIFABUTIN™, CLARITHROMYCIN™, and/or AZITHROMYClNT to prophylactically treat or prevent an opportunistic Mycobacterium tuberculosis infection. In another specific embodiment, Therapeutics of the invention are used in any combination with GANCICLOVIR™, FOSCARNE™, and/or CIDOFOVIR™ to prophylactically treat or prevent an opportunistic cytomegalovirus infection. In another specific embodiment, Therapeutics of the invention are used in any combination with FLUCONAZOLE™, ITRACONAZOLE™, and/or KETOCONAZOLE™ to prophylactically treat or prevent an opportunistic fungal infection. In another specific embodiment, Therapeutics of the invention are used in any combination with ACYCLOVR™ and/or FAMCICOLVIR™ to prophylactically treat or prevent an opportunistic herpes simplex virus type I and/or type II infection. In another specific embodiment, Therapeutics of the invention are used in any combination with PYRIMETHAMINE™ and/or LEUCOVORIN™ to prophylactically treat or prevent an opportunistic Toxoplasma gondii infection. In another specific embodiment, Therapeutics of the invention are used in any combination with LEUCOVORIN™ and/or NEUPOGEN™ to prophylactically treat or prevent an opportunistic bacterial infection.

[0808] In a further embodiment, the Therapeutics of the invention are administered in combination with an antibiotic agent. Antibiotic agents that may be administered with the Therapeutics of the invention include, but are not limited to, amoxicillin, beta-lactamases, aminoglycosides, beta-lactam (glycopeptide), beta-lactamases, Clindamycin, chloramphenicol, cephalosporins, ciprofloxacin, erythromycin, fluoroquinolones, macrolides, metronidazole, penicillins, quinolones, rapamycin, rifampin, streptomycin, sulfonamide, tetracyclines, trimethoprim, trimethoprim-sulfamethoxazole, and vancomycin.

[0809] In other embodiments, the Therapeutics of the invention are administered in combination with immunestimulants. Immunostimulants that may be administered in combination with the Therapeutics of the invention include, but are not limited to, levamisole (e.g., ERGAMISOL™), isoprinosine (e.g. INOSIPLEX™), interferons (e.g. interferon alpha), and interleukins (e.g., IL-2).

[0810] In other embodiments, Therapeutics of the invention are administered in combination with immunosuppressive agents. Immunosuppressive agents that may be administered in combination with the Therapeutics of the invention include, but are not limited to, steroids, cyclosporine, cyclosporine analogs, cyclophosphamide methylprednisone, prednisone, azathioprine, FK-506, 15-deoxyspergualin, and other immunosuppressive agents that act by suppressing the function of responding T cells. Other immunosuppressive agents that may be administered in combination with the Therapeutics of the invention include, but are not limited to, prednisolone, methotrexate, thalidomide, methoxsalen, rapamycin, leflunomide, mizoribine (BREDININ™), brequinar, deoxyspergualin, and azaspirane (SKF 105685), ORTHOCLONE OKT® 3 (muromonab-D3), SANDWIMMUNE™, NEORAL™, SANGDYA™ (cyclosporine), PROGRAF® (FK506, tacrolimus), CELLCEPT® (mycophenolate motefil, of which the active metabolite is mycophenolic acid), IMURAN™ (azathioprine), glucocorticosteroids, adrenocortical steroids such as DELTASONE™ (prednisone) and HYDELTRASOL™ (prednisolone), FOLEX™ and MEXATE™ (methotrxate), OXSORALEN-ULTRA™ (methoxsalen) and RAPAMUNE™ (sirolimus). In a specific embodiment, immunosuppressants may be used to prevent rejection of organ or bone marrow transplantation.

[0811] In an additional embodiment, Therapeutics of the invention are administered alone or in combination with one or more intravenous immune globulin preparations. Intravenous immune globulin preparations that may be administered with the Therapeutics of the invention include, but not limited to, GAMMAR™, IVEEGAM™, SANDOGLOBULIN™, GAMMAGARD S/D™, ATGAM™ (antithymocyte glubulin), and GAMIMUNE™. In a specific embodiment, Therapeutics of the invention are administered in combination with intravenous immune globulin preparations in transplantation therapy (e.g., bone marrow transplant).

[0812] In certain embodiments, the Therapeutics of the invention are administered alone or in combination with an anti-inflammatory agent. Anti-inflammatory agents that may be administered with the Therapeutics of the invention include, but are not limited to, corticosteroids (e.g. betamethasone, budesonide, cortisone, dexamethasone, hydrocortisone, methylprednisolone, prednisolone, prednisone, and triamcinolone), nonsteroidal anti-inflammatory drugs (e.g., diclofenac, diflunisal, etodolac, fenoprofen, floctafenine, flurbiprofen, ibuprofen, indomethacin, ketoprofen, meclofenamate, mefenamic acid, meloxicam, nabumetone, naproxen, oxaprozin, phenylbutazone, piroxicam, sulindac, tenoxicam, tiaprofenic acid, and tolmetin.), as well as antihistamines, aminoarylcarboxylic acid derivatives, arylacetic acid derivatives, arylbutyric acid derivatives, arylcarboxylic acids, arylpropionic acid derivatives, pyrazoles, pyrazolones, salicylic acid derivatives, thiazinecarboxamides, e-acetamidocaproic acid, S-adenosylmethionine, 3-amino-4-hydroxybutyric acid, amixetrine, bendazac, benzydamine, bucolome, difenpiramide, ditazol, emorfazone, guiazulene, nabumetone, nimesulide, orgotein, oxaceprol, paranyline, perisoxal, pifoxime, proquazone, proxazole, and tenidap.

[0813] In an additional embodiment, the compositions of the invention are administered alone or in combination with an anti-angiogenic agent. Anti-angiogenic agents that may be administered with the compositions of the invention include, but are not limited to, Angiostatin (Entremed, Rockville, Md.), Troponin-1 (Boston Life Sciences, Boston, Mass.), anti-Invasive Factor, retinoic acid and derivatives thereof, paclitaxel (Taxol), Suramin, Tissue Inhibitor of Metalloproteinase-1, Tissue Inhibitor of Metalloproteinase-2, VEGI, Plasminogen Activator Inhibitor-1, Plasminogen Activator Inhibitor-2, and various forms of the lighter “d group” transition metals.

[0814] Lighter “d group” transition metals include, for example, vanadium, molybdenum, tungsten, titanium, niobium, and tantalum species. Such transition metal species may form transition metal complexes. Suitable complexes of the above-mentioned transition metal species include oxo transition metal complexes.

[0815] Representative examples of vanadium complexes include oxo vanadium complexes such as vanadate and vanadyl complexes. Suitable vanadate complexes include metavanadate and orthovanadate complexes such as, for example, ammonium metavanadate, sodium metavanadate, and sodium orthovanadate. Suitable vanadyl complexes include, for example, vanadyl acetylacetonate and vanadyl sulfate including vanadyl sulfate hydrates such as vanadyl sulfate mono- and trihydrates.

[0816] Representative examples of tungsten and molybdenum complexes also include oxo complexes. Suitable oxo tungsten complexes include tungstate and tungsten oxide complexes. Suitable tungstate complexes include ammonium tungstate, calcium tungstate, sodium tungstate dihydrate, and tungstic acid. Suitable tungsten oxides include tungsten (IV) oxide and tungsten (VI) oxide. Suitable oxo molybdenum complexes include molybdate, molybdenum oxide, and molybdenyl complexes. Suitable molybdate complexes include ammonium molybdate and its hydrates, sodium molybdate and its hydrates, and potassium molybdate and its hydrates. Suitable molybdenum oxides include molybdenum (VI) oxide, molybdenum (VI) oxide, and molybdic acid. Suitable molybdenyl complexes include, for example, molybdenyl acetylacetonate. Other suitable tungsten and molybdenum complexes include hydroxo derivatives derived from, for example, glycerol, tartaric acid, and sugars.

[0817] A wide variety of other anti-angiogenic factors may also be utilized within the context of the present invention. Representative examples include, but are not limited to, platelet factor 4; protamine sulphate; sulphated chitin derivatives (prepared from queen crab shells), (Murata et al., Cancer Res. 51: 22-26, (1991)); Sulphated Polysaccharide Peptidoglycan Complex (SP-PG) (the function of this compound may be enhanced by the presence of steroids such as estrogen, and tamoxifen citrate); Staurosporine; modulators of matrix metabolism, including for example, proline analogs, cishydroxyproline, d,L-3,4-dehydroproline, Thiaproline, alpha,alpha-dipyridyl, aminopropionitrile fumarate; 4-propyl-5-(4-pyridinyl)-2(3H)-oxazolone; Methotrexate; Mitoxantrone; Heparin; Interferons; 2 Macroglobulin-serum; ChIMP-3 (Pavloff et al., J. Bio. Chem. 267:17321-17326, (1992)); Chymostatin (Tomkinson et al., Biochem J. 286: 475-480, (1992)); Cyclodextrin Tetradecasulfate; Eponemycin; Camptothecin; Fumagillin (Ingber et al., Nature 348: 555-557, (1990)); Gold Sodium Thiomalate (“GST”; Matsubara and Ziff, J. Clin. Invest. 79: 1440-1446, (1987)); anticollagenase-serum; alpha2-antiplasmin (Holmes et al., J. Biol. Chem. 262(4): 1659-1664, (1987)); Bisantrene (National Cance Institute); Lobenzarit disodium (N-(2)-carboxyphenyl-4-chloroanthronilic acid disodium or “CCA”; (Takeuchi et al., Agents Actions 36: 312-316, (1992)); and metalloproteinase inhibitors such as BB94.

[0818] Additional anti-angiogenic factors that may also be utilized within the context of the present invention include Thalidomide, (Celgene, Warren, N.J.); Angiostatic steroid; AGM-1470 (H. Brem and J. Folkman J Pediatr. Surg. 28: 445-51 (1993)); an integrin alpha v beta 3 antagonist (C. Storgard et al., J Clin. Invest. 103: 47-54 (1999)); carboxynaminolmidazole; Carboxyamidotriazole (CAI) (National Cancer Institute, Bethesda, Md.); Conbretastatin A-4 (CA4P) (OXiGENE, Boston, Mass.); Squalamine (Magainin Pharmaceuticals, Plymouth Meeting, Pa.); TNP-470, (Tap Pharmaceuticals, Deerfield, Ill.); ZD-0101 AstraZeneca (London, UK); APRA (CT2584); Benefin, Byrostatin-1 (SC339555); CGP-41251 (PKC 412); CM101; Dexrazoxane (ICRF187); DMXAA; Endostatin; Flavopridiol; Genestein; GTE; ImmTher; Iressa (ZD1839); Octreotide (Somatostain); Panretin; Penacillamine; Photopoint; PI-88; Prinomastat (AG-3340) Purlytin; Suradista (FCE26644); Tamoxifen (Nolvadex); Tazarotene; Tetrathiomolybdate; Xeloda (Capecitabine); and 5-Fluorouracil.

[0819] Anti-angiogenic agents that may be administed in combination with the compounds of the invention may work through a variety of mechanisms including, but not limited to, inhibiting proteolysis of the extracellular matrix, blocking the function of endothelial cell-extracellular matrix adhesion molecules, by antagonizing the function of angiogenesis inducers such as growth factors, and inhibiting integrin receptors expressed on proliferating endothelial cells. Examples of anti-angiogenic inhibitors that interfere with extracellular matrix proteolysis and which may be administered in combination with the compositons of the invention include, but are not limited to, AG-3340 (Agouron, La Jolla, Calif.), BAY-12-9566 (Bayer, West Haven, Conn.), BMS-275291 (Bristol Myers Squibb, Princeton, N.J.), CGS-27032A (Novartis, East Hanover, N.J.), Marimastat (British Biotech, Oxford, UK), and Metastat (Aetema, St-Foy, Quebec). Examples of anti-angiogenic inhibitors that act by blocking the function of endothelial cell-extracellular matrix adhesion molecules and which may be administered in combination with the compositons of the invention include, but are not limited to, EMD-121974 (Merck KcgaA Darmstadt, Germany) and Vitaxin (Ixsys, La Jolla, Calif./Medimmune, Gaithersburg, Md.). Examples of anti-angiogenic agents that act by directly antagonizing or inhibiting angiogenesis inducers and which may be administered in combination with the compositons of the invention include, but are not limited to, Angiozyme (Ribozyme, Boulder, Colo.), Anti-VEGF antibody (Genentech, S. San Francisco, Calif.), PTK-787/ZK-225846 (Novartis, Basel, Switzerland), SU-101 (Sugen, S. San Francisco, Calif.), SU-5416 (Sugen/Pharmacia Upjohn, Bridgewater, N.J.), and SU-6668 (Sugen). Other anti-angiogenic agents act to indirectly inhibit angiogenesis. Examples of indirect inhibitors of angiogensis which may be administered in combination with the compositons of the invention include, but are not limited to, IM-862 (Cytran, Kirkland, Wash.), Interferon-alpha, IL-12 (Roche, Nutley, N.J.), and Pentosan polysulfate (Georgetown University, Washington, DC).

[0820] In particular embodiments, the use of compositions of the invention in combination with anti-angiogenic agents is contemplated for the treatment, prevention, and/or amelioration of an autoimmune disease, such as for example, an autoimmune disease described herein.

[0821] In a particular embodiment, the use of compositions of the invention in combination with anti-angiogenic agents is contemplated for the treatment, prevention, and/or amelioration of arthritis. In a more particular embodiment, the use of compositions of the invention in combination with anti-angiogenic agents is contemplated for the treatment, prevention, and/or amelioration of rheumatoid arthritis.

[0822] In another embodiment, the polynucleotides encoding a polypeptide of the present invention are administered in combination with an angiogenic protein, or polynucleotides encoding an angiogenic protein. Examples of angiogenic proteins that may be administered with the compositions of the invention include, but are not limited to, acidic and basic fibroblast growth factors, VEGF-1, VEGF-2, VEGF-3, epidermal growth factor alpha and beta, platelet-derived endothelial cell growth factor, platelet-derived growth factor, tumor necrosis factor alpha, hepatocyte growth factor, insulin-like growth factor, colony stimulating factor, macrophage colony stimulating factor, granulocyte/macrophage colony stimulating factor, and nitric oxide synthase.

[0823] In additional embodiments, compositions of the invention are administered in combination with a chemotherapeutic agent. Chemotherapeutic agents that may be administered with the Therapeutics of the invention include, but are not limited to alkylating agents such as nitrogen mustards (for example, Mechlorethamine, cyclophosphamide, Cyclophosphamide Ifosfamide, Melphalan (L-sarcolysin), and Chlorambucil), ethylenimines and methylmelamines (for example, Hexamethylmelamine and Thiotepa), alkyl sulfonates (for example, Busulfan), nitrosoureas (for example, Canmustine (BCNU), Lomustine (CCNU), Semustine (methyl-CCNU), and Streptozocin (streptozotocin)), triazenes (for example, Dacarbazine (DTIC; dimethyltriazenoimidazolecarboxamide)), folic acid analogs (for example, Methotrexate (amethopterin)), pyrimidine analogs (for example, Fluorouacil (5-fluorouracil; 5-FU), Floxuridine (fluorodeoxyuridine; FudR), and Cytarabine (cytosine arabinoside)), purine analogs and related inhibitors (for example, Mercaptopurine (6-mercaptopurine; 6-MP), Thioguanine (6-thioguanine; TG), and Pentostatin (2′-deoxycoformycin)), vinca alkaloids (for example, Vinblastine (VLB, vinblastine sulfate)) and Vincristine (vincristine sulfate)), epipodophyllotoxins (for example, Etoposide and Teniposide), antibiotics (for example, Dactinomycin (actinomycin D), Daunorubicin (daunomycin; rubidomycin), Doxorubicin, Bleomycin, Plicamycin (mithramycin), and Mitomycin (mitomycin C), enzymes (for example, L-Asparaginase), biological response modifiers (for example, Interferon-alpha and interferon-alpha-2b), platinum coordination compounds (for example, Cisplatin (cis-DDP) and Carboplatin), anthracenedione (Mitoxantrone), substituted ureas (for example, Hydroxyurea), methylhydrazine derivatives (for example, Procarbazine (N-methylhydrazine; MIH), adrenocorticosteroids (for example, Prednisone), progestins (for example, Hydroxyprogesterone caproate, Medroxyprogesterone, Medroxyprogesterone acetate, and Megestrol acetate), estrogens (for example, Diethylstilbestrol (DES), Diethylstilbestrol diphosphate, Estradiol, and Ethinyl estradiol), antiestrogens (for example, Tamoxifen), androgens (Testosterone proprionate, and Fluoxymesterone), antiandrogens (for example, Flutamide), gonadotropin-releasing horomone analogs (for example, Leuprolide), other hormones and hormone analogs (for example, methyltestosterone, estramustine, estramustine phosphate sodium, chlorotrianisene, and testolactone), and others (for example, dicarbazine, glutamnic acid, and mitotane).

[0824] In one embodiment, the compositions of the invention are administered in combination with one or more of the following drugs: infliximab (also known as Remicade™ Centocor, Inc.), Trocade (Roche, RO-32-3555), Leflunomide (also known as Arava™ from Hoechst Marion Roussel), Kineret™ (an IL-1 Receptor antagonist also known as Anakinra from Amgen, Inc.)

[0825] In a specific embodiment, compositions of the invention are administered in combination with CHOP (cyclophosphamide, doxorubicin vincristine, and prednisone) or combination of one or more of the components of CHOP. In one embodiment, the compositions of the invention are administered in combination with anti-CD20 antibodies, human monoclonal anti-CD20 antibodies. In another embodiment, the compositions of the invention are administered in combination with anti-CD20 antibodies and CHOP, or anti-CD20 antibodies and any combination of one or more of the components of CHOP, particularly cyclophosphamide and/or prednisone. In a specific embodiment, compositions of the invention are administered in combination with Rituximab. In a further embodiment, compositions of the invention are administered with Rituximab and CHOP, or Rituximab and any combination of one or more of the components of CHOP, particularly cyclophosphamide and/or prednisone. In a specific embodiment, compositions of the invention are administered in combination with tositumomab. In a further embodiment, compositions of the invention are administered with tositumomab and CHOP, or tositumomab and any combination of one or more of the components of CHOP, particularly cyclophosphamide and/or prednisone. The anti-CD20 antibodies may optionally be associated with radioisotopes, toxins or cytotoxic prodrugs.

[0826] In another specific embodiment, the compositions of the invention are administered in combination Zevalin™. In a further embodiment, compositions of the invention are administered with Zevalin™ and CHOP, or Zevalin™ and any combination of one or more of the components of CHOP, particularly cyclophosphamide and/or prednisone. Zevalin™ may be associated with one or more radisotopes. Particularly preferred isotopes are ⁹⁰Y and ¹¹¹In.

[0827] In an additional embodiment, the Therapeutics of the invention are administered in combination with cytokines. Cytokines that may be administered with the Therapeutics of the invention include, but are not limited to, IL2, IL3, IL4, IL5, IL6, IL7, IL10, IL12, IL13, IL15, anti-CD40, CD40L, IFN-gamma and TNF-alpha. In another embodiment, Therapeutics of the invention may be administered with any interleukin, including, but not limited to, IL-1alpha, IL-1beta, IL-2, IL-3, IL-4, IL-5, IL-6, IL-7, IL-8, IL-9, IL-10, IL-11, IL-12, IL-13, IL-14, IL-15, IL-16, IL-17, IL-18, IL-19, IL-20, and IL-21.

[0828] In one embodiment, the Therapeutics of the invention are administered in combination with members of the TNF family. TNF, TNF-related or TNF-like molecules that may be administered with the Therapeutics of the invention include, but are not limited to, soluble forms of TNF-alpha, lymphotoxin-alpha (LT-alpha, also known as TNF-beta), LT-beta (found in complex heterotrimer LT-alpha2-beta), OPGL, FasL, CD27L, CD30L, CD40L, 4-1BBL, DcR3, OX40L, TNF-gamma (International Publication No. WO 96/14328), AIM-I (International Publication No. WO 97/33899), endokine-alpha (Intemational Publication No. WO 98/07880), OPG, and neutrokine-alpha (Intemational Publication No. WO 98/18921, OX40, and nerve growth factor (NGF), and soluble forms of Fas, CD30, CD27, CD40 and 4-1BB, TR2 (International Publication No. WO 96/34095), DR3 (International Publication No. WO 97/33904), DR4 (International Publication No. WO 98/32856), TR5 (International Publication No. WO 98/30693), TRANK, TR9 (International Publication No. WO 98/56892),TR10 (International Publication No. WO 98/54202), 312C2 (International Publication No. WO 98/06842), and TR12, and soluble forms CD154, CD70, and CD153.

[0829] In an additional embodiment, the Therapeutics of the invention are administered in combination with angiogenic proteins. Angiogenic proteins that may be administered with the Therapeutics of the invention include, but are not limited to, Glioma Derived Growth Factor (GDGF), as disclosed in European Patent Number EP-399816; Platelet Derived Growth Factor-A (PDGF-A), as disclosed in European Patent Number EP-682110; Platelet Derived Growth Factor-B (PDGF-B), as disclosed in European Patent Number EP-282317; Placental Growth Factor (PIGF), as disclosed in International Publication Number WO 92/06194; Placental Growth Factor-2 (PIGF-2), as disclosed in Hauser et al., Growth Factors, 4: 259-268 (1993); Vascular Endothelial Growth Factor (VEGF), as disclosed in International Publication Number WO 90/13649; Vascular Endothelial Growth Factor-A (VEGF-A), as disclosed in European Patent Number EP-506477; Vascular Endothelial Growth Factor-2 (VEGF-2), as disclosed in International Publication Number WO 96/39515; Vascular Endothelial Growth Factor B (VEGF-3); Vascular Endothelial Growth Factor B-1 86 (VEGF0B186), as disclosed in International Publication Number WO 96/26736; Vascular Endothelial Growth Factor-D (VEGF-D), as disclosed in International Publication Number WO 98/02543; Vascular Endothelial Growth Factor-D (VEGF-D), as disclosed in International Publication Number WO 98/07832; and Vascular Endothelial Growth Factor-E (VEGF-E), as disclosed in German Patent Number DE19639601. The above mentioned references are herein incorporated by reference in their entireties.

[0830] In an additional embodiment, the Therapeutics of the invention are administered in combination with Fibroblast Growth Factors. Fibroblast Growth Factors that may be administered with the Therapeutics of the invention include, but are not limited to, FGF-1, FGF-2, FGF-3, FGF-4, FGF-5, FGF-6, FGF-7, FGF-8, FGF-9, FGF-10, FGF-11, FGF-12, FGF-13, FGF-14, and FGF-15.

[0831] In an additional embodiment, the Therapeutics of the invention are administered in combination with hematopoietic growth factors Hematopoietic growth factors that may be administered with the Therapeutics of the invention include, but are not limited to, granulocyte macrophage colony stimulating factor (GM-CSF) (sargrarnostim, LEUKINE™, PROKINE™), granulocyte colony stimulating factor (G-CSF) (filgrastim, NEUPOGEN™), macrophage colony stimulating factor (M-CSF, CSF-1) crythropoietin (epoetin alfa, EPOGEN™, PROCRIT™), stem cell factor (SCF, c-kit ligand, steel factor), megakaryocyte colony stimulating factor, PIXY321 (a GMCSF/IL-3 fusion protein), interleukins, especially any one or more of IL-1 through IL-12, interferon-gamma, or thrombopoietin.

[0832] In certain embodiments, Therapeutics of the present invention are administered in combination with adrenergic blockers, such as, for example, acebutolol, atenolol, betaxolol, bisoprolol, carteolol, labetalol, metoprolol, nadolol, oxprenolol, penbutolol, pindolol, propranolol, sotalol, and timolol.

[0833] In another embodiment, the Therapeutics of the invention are administered in combination with an antiarrhythmic drug (e.g., adenosine, amidoarone, bretylium, digitalis, digoxin, digitoxin, diliazem, disopyramide, esmolol, flecainide, lidocaine, mexiletine, moricizine, phenytoin, procainamide, N-acetyl procainamide, propafenone, propranolol, quinidine, sotalol, tocainide, and verapamil).

[0834] In another embodiment, the Therapeutics of the invention are administered in combination with diuretic agents, such as carbonic anhydrase-inhibiting agents (e.g., acetazolamide, dichlorphenamide, and methazolamide), osmotic diuretics (e.g., glycerin, isosorbide, mannitol, and urea), diuretics that inhibit Na⁺-K⁺-2Cl⁻ symport (e.g., furosemide, bumetanide, azosemide, piretanide, tripamide, ethacrynic acid, muzolimine, and torsemide), thiazide and thiazide-like diuretics (e.g., bendroflumethiazide, benzthiazide, chlorothiazide, hydrochlorothiazide, hydroflumethiazide, methyclothiazide, polythiazide, trichormethiazide, chlorthalidone, indapamide, metolazone, and quinethazone), potassium sparing diuretics (e.g., amiloride and triamterene), and mineralcorticoid receptor antagonists (e.g., spironolactone, canrenone, and potassium canrenoate).

[0835] In one embodiment, the Therapeutics of the invention are administered in combination with treatments for endocrine and/or hormone imbalance disorders. Treatments for endocrine and/or hormone imbalance disorders include, but are not limited to, ¹²⁷I, radioactive isotopes of iodine such as ¹³¹I and ¹²³I; recombinant growth hormone, such as HUMATROPE™ (recombinant somatropin); growth hormone analogs such as PROTROPIN™ (somatrem); dopamine agonists such as PARLODEL™ (bromocriptine); somatostatin analogs such as SANDOSTATIN™ (octreotide); gonadotropin preparations such as PREGNYL™, A.P.L.™ and PROFASI™ (chorionic gonadotropin (CG)), PERGONAL™ (menotropins), and METRODIN™ (urofollitropin (uFSH)); synthetic human gonadotropin releasing hormone preparations such as FACTREL™ and LUTREPULSE™ (gonadorelin hydrochloride); synthetic gonadotropin agonists such as LUPRON™ (leuprolide acetate), SUPPRELIN™ (histrelin acetate), SYNAREL™ (nafarelin acetate), and ZOLADEX™ (goserelin acetate); synthetic preparations of thyrotropin-releasing hormone such as RELEFACT TRH™ and THYPINONE™ (protirelin); recombinant human TSH such as THYROGEN™; synthetic preparations of the sodium salts of the natural isomers of thyroid hormones such as L-T₄™, SYNTHROID™ and LEVOTHROID™ (levothyroxine sodium), L-T₃™, CYTOMEL™ and TRIOSTAT™ (liothyroine sodium), and THYROLAR™ (liotrix); antithyroid compounds such as 6-n-propylthiouracil (propylthiouracil), 1-methyl-2-mercaptoimidazole and TAPAZOLE™ (methimazole), NEO-MERCAZOLE™ (carbimazole); beta-adrenergic receptor antagonists such as propranolol and esmolol; Ca²⁺ channel blockers; dexamethasone and iodinated radiological contrast agents such as TELEPAQUE™ (iopanoic acid) and ORAGRAFIN™ (sodium ipodate).

[0836] Additional treatments for endocrine and/or hormone imbalance disorders include, but are not limited to, estrogens or congugated estrogens such as ESTRACE™ (estradiol), ESTINYL™ (ethinyl estradiol), PREMRIN™, ESTRATAB™, ORTHO-EST™, OGEN™ and estropipate (estrone), ESTROVIS™ (quinestrol), ESTRADERM™ (estradiol), DELESTROGEN™ and VALERGEN™ (estradiol valerate), DEPO-ESTRADIOL CYPIONATE™ and ESTROJECT LA™ (estradiol cypionate); antiestrogens such as NOLVADEX™ (tamoxifen), SEROPHENE™ and CLOMID™ (clomiphene); progestins such as DURALUTIN™ (hydroxyprogesterone caproate), MPA™ and DEPO-PROVERA™ (medroxyprogesterone acetate), PROVERA™ and CYCRIN™ (MPA), MEGACE™ (megestrol acetate), NORLUTIN™ (norethindrone), and NORLUTATE™ and AYGESTIN™ (norethindrone acetate); progesterone implants such as NORPLANT SYSTEM™ (subdermal implants of norgestrel); antiprogestins such as RU 486™ (mifepristone); hormonal contraceptives such as ENOVID™ (norethynodrel plus mestranol), PROGESTASERT™ (intrauterine device that releases progesterone), LOESTRIN™, BREVICON™, MODICON™, GENORA™, NELONA™, NORINYL™, OVACON-35™ and OVACON-50™ (ethinyl estradiol/norethindrone), LEVLEN™, NORDETE™, TRI-LEVLEN™ and TRIPHASIL-21™ (ethinyl estradiol/levonorgestrel) LO/OVRAL™ and OVRAL™ (ethinyl estradiounorgestrel), DEMULEN™ (ethinyl estradiol/ethynodiol diacetate), NORINYL™, ORTHO-NOVUM™, NORETHIN™, GENORA™, and NELOVA™ (norethindrone/mestranol), DESOGEN™ and ORTHO-CEPT™ (ethinyl estradiol/desogestrel), ORTHO-CYCLEN™ and ORTHO-TRICYCLEN™ (ethinyl estradiol/norgestimate), MICRONOR™ and NOR-QD™ (norethindrone), and OVRETFE™ (norgestrel).

[0837] Additional treatments for endocrine and/or hormone imbalance disorders include, but are not limited to, testosterone esters such as methenolone acetate and testosterone undecanoate; parenteral and oral androgens such as TESTOJECT-50™ (testosterone), TESTEX™ (testosterone propionate), DELATESTRYL™ (testosterone enanthate), DEPO-TESTOSTERONE™ (testosterone cypionate), DANOCRINE™ (danazol), HALOTESTIN™ (fluoxymesterone), ORETON METHYL™, TESTRED™ and VIRILON™ (methyltestosterone), and OXANDRIN™ (oxandrolone); testosterone transdermal systems such as TESTODERM™; androgen receptor antagonist and 5-alpha-reductase inhibitors such as ANDROCUR™ (cyproterone acetate), EULEXIN™ (flutamide), and PROSCAR™ (finasteride); adrenocorticotropic hormone preparations such as CORTROSYN™ (cosyntropin); adrenocortical steroids and their synthetic analogs such as ACLOVATE™ (alclometasone dipropionate), CYCLOCORT™ (amcinonide), BECLOVENT™ and VANCERIL™ (beclomethasone dipropionate), CELESTONE™ (betamethasone), BENISONE™ and UTICOR™ (betamethasone benzoate), DIPROSONE™ (betamethasone dipropionate), CELESTONE PHOSPHATE™ (betamethasone sodium phosphate), CELESTONE SOLUSPAN™ (betamethasone sodium phosphate and acetate), BETA-VAL™ and VALISONE™ (betamethasone valerate), TEMOVATE™ (clobetasol propionate), CLODERMT™ (clocortolone pivalate), CORTEF™ and HYDROCORTONE™ (cortisol (hydrocortisone)), HYDROCORTONE ACETATE™ (cortisol (hydrocortisone) acetate), LOCOID™ (cortisol (hydrocortisone) butyrate), HYDROCORTONE PHOSPHATE™ (cortisol (hydrocortisone) sodium phosphate), A-HYDROCORT™ and SOLU CORTEF™ (cortisol (hydrocortisone) sodium succinate), WESTCORT™ (cortisol (hydrocortisone) valerate), CORTISONE ACETATE™ (cortisone acetate), DESOWEN™ and TRIDESILON™ (desonide), TOPICORT™ (desoximetasone), DECADRON™ (dexamethasone), DECADRON LA™ (dexamethasone acetate), DECADRON PHOSPHATE™ and HEXADROL PHOSPHATE™ (dexamethasone sodium phosphate), FLORONE™ and MAXIFLOR™ (diflorasone diacetate), FLORINEF ACETATE™ (fludrocortisone acetate), AEROBID™ and NASALIDE™ (flunisolide), FLUONID™ and SYNALAR™ (fluocinolone acetonide), LIDEX™ (fluocinonide), FLUOR-OP™ and FML™ (fluorometholone), CORDRAN™ (flurandrenolide), HALOG™ (halcinonide), HMS LIZUIFILM™ (medrysone), MEDROL™ (methylprednisolone), DEPO-MEDROL™ and MEDROL ACETATE™ (methylprednisone acetate), A-METHAPRED™ and SOLUMEDROL™ (methylprednisolone sodium succinate), ELOCON™ (mometasone furoate), HALDRONE™ (paramethasone acetate), DELTA-CORTEF™ (prednisolone), ECONOPRED™ (prednisolone acetate), HYDELTRASOL™ (prednisolone sodium phosphate), HYDELTRA-T.B.A.™ (prednisolone tebutate), DELTASONE™ (prednisone), ARISTOCORT™ and KENACORT™ (triamncinolone), KENALOG™ (triamcinolone acetonide), ARISTOCORT™ and KENACORT DIACETATE™ (triamcinolone diacetate), and ARISTOSPAN™ (triarncinolone hexacetonide); inhibitors of biosynthesis and action of adrenocortical steroids such as CYTADREN™ (aminoglutethimide), NIZORAL™ (ketoconazole), MODRASTANE™ (trilostane), and METOPIRONE™ (metyrapone); bovine, porcine or human insulin or mixtures thereof; insulin analogs; recombinant human insulin such as HUMULIN™ and NOVOLIN™; oral hypoglycemic agents such as ORAMIDE™ and ORINASE™ (tolbutamide), DIABINESE™ (chlorpropamide), TOLAMIDE™ and TOLINASE™ (tolazamide), DYMELOR™ (acetohexamide), glibenclamide, MICRONASE™, DIBETA™ and GLYNASE™ (glyburide), GLUCOTROL™ (glipizide), and DIAMICRON™ (gliclazide), GLUCOPHAGE™ (metformin), ciglitazone, pioglitazone, and alpha-glucosidase inhibitors; bovine or porcine glucagon; somatostatins such as SANDOSTATIN™ (octreotide); and diazoxides such as PROGLYCEM™ (diazoxide).

[0838] In an additional embodiment, the Therapeutics of the invention are administered in combination with drugs effective in treating iron deficiency and hypochromic anemias, including but not limited to, ferrous sulfate (iron sulfate, FEOSOL™), ferrous fumarate (e.g., FEOSTAT™), ferrous gluconate (e.g., FERGON™), polysaccharide-iron complex (e.g., NIFEREX™), iron dextran injection (e.g., INFED™), cupric sulfate, pyroxidine, riboflavin, Vitamin B₁₂, cyancobalamin injection (e.g., REDISOL™, RUBRAMIN PC™), hydroxocobalamin, folic acid (e.g., FOLVITE™), leucovorin (folinic acid, 5-CHOH4PteGlu, citrovorum factor) or WELLCOVORIN (Calcium salt of leucovorin), transferrin or ferritin.

[0839] In another embodiment, Therapeutics of the invention are administered in combination with vasodilating agents and/or calcium channel blocking agents. Vasodilating agents that may be administered with the Therapeutics of the invention include, but are not limited to, Angiotensin Converting Enzyme (ACE) inhibitors (e.g., papaverine, isoxsuprine, benazepril, captopril, cilazapril, enalapril, enalaprilat, fosinopril, lisinopril, moexipril, perindopril, quinapril, ramipril, spirapril, trandolapril, and nylidrin), and nitrates (e.g., isosorbide dinitrate, isosorbide mononitrate, and nitroglycerin). Examples of calcium channel blocking agents that may be administered in combination with the Therapeutics of the invention include, but are not limited to amlodipine, bepridil, diltiazem, felodipine, flunarizine, isradipine, nicardipine, nifedipine, nimodipine, and verapamil.

[0840] In additional embodiments, the Therapeutics of the invention are administered in combination with other therapeutic or prophylactic regimens, such as, for example, radiation therapy.

### Exanple 14

### Method of Treating Decreased Levels of the Polypeptide

[0841] The present invention relates to a method for treating an individual in need of an increased level of a polypeptide of the invention in the body comprising administering to such an individual a composition comprising a therapeutically effective amount of polypeptides (including agonists thereto), and/or antibodies of the invention. Moreover, it will be appreciated that conditions caused by a decrease in the standard or normal expression level of a polypeptide of the present invention in an individual may be treated by administering agonists of said polypeptide. Thus, the invention also provides a method of treatment of an individual in need of an increased level of the polypeptide comprising administering to such an individual also Therapeutic comprising an amount of the agonist (including polypeptides and antibodies of the present invention) to increase the activity level of the polypeptide in such an individual.

[0842] For example, a patient with decreased levels of a polypeptide receives a daily dose 0.1-100 ug/kg of the agonist for six consecutive days The exact details of the dosing scheme, based on administration and formulation, are provided in Example 13.

### Example 15

### Method of Treating Increased Levels of the Polypeptide

[0843] The present invention also relates to a method of treating an individual in need of a decreased level of a polypeptide of the invention in the body comprising administering to such an individual a composition comprising a therapeutically effective amount of an antagonist of the invention (including polypeptides and antibodies of the invention).

[0844] In one example, antisense technology is used to inhibit production of a polypeptide of the present invention. This technology is one example of a method of decreasing levels of a polypeptide, due to a variety of etiologies, such as cancer.

[0845] For example, a patient diagnosed with abnormally increased levels of a polypeptide is administered intravenously antisense polynucleotides at 0.5, 1.0, 1.5, 2.0 and 3.0 mg/kg day for 21 days. This treatment is repeated after a 7-day rest period if the treatment was well tolerated. The antisense polynucleotides of the present invention can be formulated using techniques and formulations described herein (e.g. see Example 13), or otherwise known in the art.

### Example 16

### Method of Treatment Using Gene Therapy-Ex Vivo

[0846] One method of gene therapy transplants fibroblasts, which are capable of expressing a polypeptide, onto a patient. Generally, fibroblasts are obtained from a subject by skin biopsy. The resulting tissue is placed in tissue-culture medium and separated into small pieces. Small chunks of the tissue are placed on a wet surface of a tissue culture flask, approximately ten pieces are placed in each flask. The flask is turned upside down, closed tight and left at room temperature over night. After 24 hours at room temperature, the flask is inverted and the chunks of tissue remain fixed to the bottom of the flask and fresh media (e.g., Ham's F12 media, with 10% FBS, penicillin and streptomycin) is added. The flasks are then incubated at 37 degree C for approximately one week.

[0847] At this time, fresh media is added and subsequently changed every several days. After an additional two weeks in culture, a monolayer of fibroblasts emerge. The monolayer is trypsinized and scaled into larger flasks.

[0848] pMV-7 (Kirschmeier, P. T. et al., DNA, 7:219-25 (1988)), flanked by the long terminal repeats of the Moloney murine sarcoma virus, is digested with EcoRI and HindIII and subsequently treated with calf intestinal phosphatase. The linear vector is fractionated on agarose gel and purified, using glass beads.

[0849] The cDNA encoding a polypeptide of the present invention can be amplified using PCR primers which correspond to the 5′ and 3 ′ end sequences respectively as set forth in Example 1 using primers and having appropriate restriction sites and initiation/stop codons, if necessary. Preferably, the 5′ primer contains an EcoRI site and the 3′ primer includes a HindIII site. Equal quantities of the Moloney murine sarcoma virus linear backbone and the amplified EcoRI and HindIII fragment are added together, in the presence of T4 DNA ligase. The resulting mixture is maintained under conditions appropriate for ligation of the two fragments. The ligation mixture is then used to transform bacteria HB101, which are then plated onto agar containing kanamycin for the purpose of confirming that the vector has the gene of interest properly inserted.

[0850] The amphotropic pA317 or GP+am12 packaging cells are grown in tissue culture to confluent density in Dulbecco's Modified Eagles Medium (DMEM) with 10% calf serum (CS), penicillin and streptomycin. The MSV vector containing the gene is then added to the media and the packaging cells transduced with the vector. The packaging cells now produce infectious viral particles containing the gene (the packaging cells are now referred to as producer cells).

[0851] Fresh media is added to the transduced producer cells, and subsequently, the media is harvested from a 10 cm plate of confluent producer cells. The spent media, containing the infectious viral particles, is filtered through a millipore filter to remove detached producer cells and this media is then used to infect fibroblast cells. Media is removed from a sub-confluent plate of fibroblasts and quickly replaced with the media from the producer cells. This media is removed and replaced with fresh media. If the titer of virus is high, then virtually all fibroblasts will be infected and no selection is required. If the titer is very low, then it is necessary to use a retroviral vector that has a selectable marker, such as neo or his. Once the fibroblasts have been efficiently infected, the fibroblasts are analyzed to determine whether protein is produced.

[0852] The engineered fibroblasts are then transplanted onto the host, either alone or after having been grown to confluence on cytodex 3 microcarrier beads.

### Example 17

### Gene Therapy Using Endogenous Genes Corresponding to Polynucleoddes of the Invention

[0853] Another method of gene therapy according to the present invention involves operably associating the endogenous polynucleotide sequence of the invention with a promoter via homologous recombination as described, for example, in U.S. Pat. No. 5,641,670, issued Jun. 24, 1997; International Publication NO: WO 96/29411, published Sep. 26, 1996; Intemational Publication NO: WO 94/12650, published Aug. 4, 1994; Koller et al., Proc. Natl. Acad. Sci. USA, 86: 8932-8935 (1989); and Zijistra et al., Nature, 342: 435-438 (1989). This method involes the activation of a gene which is present in the target cells, but which is not expressed in the cells, or is expressed at a lower level than desired.

[0854] Polynucleotide constructs are made which contain a promoter and targeting sequences, which are homologous to the 5′ non-coding sequence of endogenous polynucleotide sequence, flanking the promoter. The targeting sequence will be sufficiently near the 5′ end of the polynucleotide sequence so the promoter will be operably linked to the endogenous sequence upon homologous recombination. The promoter and the targeting sequences can be amplified using PCR. Preferably, the amplified promoter contains distinct restriction enzyme sites on the 5′ and 3′ ends. Preferably, the 3′ end of the first targeting sequence contains the same restriction enzyme site as the 5′ end of the amplified promoter and the 5′ end of the second targeting sequence contains the same restriction site as the 3′ end of the amplified promoter.

[0855] The amplified promoter and the amplified targeting sequences are digested with the appropriate restriction enzymes and subsequently treated with calf intestinal phosphatase. The digested promoter and digested targeting sequences are added together in the presence of T4 DNA ligase. The resulting mixture is maintained under conditions appropriate for ligation of the two fragments. The construct is size fractionated on an agarose gel, then purified by phenol extraction and ethanol precipitation.

[0856] In this Example, the polynucleotide constructs are administered as naked polynucleotides via electroporation. However, the polynucleotide constructs may also be administered with transfection-facilitating agents, such as liposomes, viral sequences, viral particles, precipitating agents, etc. Such methods of delivery are known in the art.

[0857] Once the cells are transfected, homologous recombination will take place which results in the promoter being operably linked to the endogenous polynucleotide sequence. This results in the expression of polynucleotide corresponding to the polynucleotide in the cell. Expression may be detected by immunological staining, or any other method known in the art.

[0858] Fibroblasts are obtained from a subject by skin biopsy. The resulting tissue is placed in DMEM+10% fetal calf serum. Exponentially growing or early stationary phase fibroblasts are trypsinized and rinsed from the plastic surface with nutrient medium. An aliquot of the cell suspension is removed for counting, and the remaining cells are subjected to centrifuigation. The supernatant is aspirated and the pellet is resuspended in 5 ml of electroporation buffer (20 mM HEPES pH 7.3, 137 mM NaCl, 5 mM KCl, 0.7 mM Na₂ HPO₄, 6 mM dextrose). The cells are recentrifuged, the supernatant aspirated, and the cells resuspended in electroporation buffer containing 1 mg/ml acetylated bovine serum albumin. The final cell suspension contains approximately 3×10⁶ cells/ml. Electroporation should be performed immediately following resuspension.

[0859] Plasmid DNA is prepared according to standard techniques. For example, to construct a plasmid for targeting to the locus corresponing to the polynucleotide of the invention, plasmid pUC18 (MBI Fermentas, Amherst, N.Y.) is digested with HindlIl. The CMV promoter is amplified by PCR with an XbaI site on the 5′ end and a BamHI site on the 3′ end. Two non-coding sequences are amplified via PCR: one non-coding sequence (fragment 1) is amplified with a HindIII site at the 5′ end and an Xba site at the 3′end; the other non-coding sequence (fragment 2) is amplified with a BamHI site at the 5′end and a HindIII site at the 3′end. The CMV promoter and the fragments (1 and 2) are digested with the appropriate enzymes (CMV promoter—XbaI and BamHI; fragment 1—XbaI; fragment 2—BamHI) and ligated together. The resulting ligation product is digested with HindIII, and ligated with the HindIII-digested pUC18 plasmid.

[0860] Plasmid DNA is added to a sterile cuvette with a 0.4 cm electrode gap (Bio-Rad). The final DNA concentration is generally at least 120 μg/ml. 0.5 ml of the cell suspension (containing approximately 1.5×10⁶ cells) is then added to the cuvette, and the cell suspension and DNA solutions are gently mixed. Electroporation is performed with a Gene-Pulser apparatus (Bio-Rad). Capacitance and voltage are set at 960 μF and 250-300 V, respectively. As voltage increases, cell survival decreases, but the percentage of surviving cells that stably incorporate the introduced DNA into their genome increases dramatically. Given these parameters, a pulse time of approximately 14-20 mSec should be observed.

[0861] Electroporated cells are maintained at room temperature for approximately 5 min, and the contents of the cuvette are then gently removed with a sterile transfer pipette. The cells are added directly to 10 ml of prewarmed nutrient media (DMEM with 15% calf serum) in a 10 cm dish and incubated at 37 degree C. The following day, the media is aspirated and replaced with 10 ml of fresh media and incubated for a further 16-24 hours.

[0862] The engineered fibroblasts are then injected into the host, either alone or after having been grown to confluence on cytodex 3 microcarrier beads. The fibroblasts now produce the protein product The fibroblasts can then be introduced into a patient as described above.

### Example 18

### Method of Treatment Using Gene Therapy—In Vivo

[0863] Another aspect of the present invention is using in vivo gene therapy methods to prevent, treat, and/or ameliorate cardiovascular disease and disorders. The gene therapy method relates to the introduction of naked nucleic acid (DNA, RNA, and antisense DNA or RNA) sequences into an animal to increase or decrease the expression of the polypeptide. The polynucleotide of the present invention may be operatively linked to (i.e., associated with) a promoter or any other genetic elements necessary for the expression of the polypeptide by the target tissue. Such gene therapy and delivery techniques and methods are known in the art, see, for example, WO90/11092, WO98/11779; U.S. Pat. Nos. 5,693,622, 5,705,151, 5,580,859; Tabata et al., Cardiovasc. Res. 35(3): 470-479 (1997); Chao et al., Pharmacol. Res. 35(6): 517-522 (1997); Wolff, Neuromuscul. Disord. 7(5): 314-318 (1997); Schwartz et al., Gene Ther. 3(5): 405-411 (1996); Tsurumi et al., Circulation 94(12):3281-3290 (1996) (incorporated herein by reference).

[0864] The polynucleotide constructs may be delivered by any method that delivers injectable materials to the cells of an animal, such as, injection into the interstitial space of tissues (heart, muscle, skin, lung, liver, intestine and the like). The polynucleotide constructs can be delivered in a pharmaceutically acceptable liquid or aqueous carrier.

[0865] The term “naked” polynucleotide, DNA or RNA, refers to sequences that are free from any delivery vehicle that acts to assist, promote, or facilitate entry into the cell, including viral sequences, viral particles, liposome formulations, lipofectin or precipitating agents and the like. However, the polynucleotides of the present invention may also be delivered in liposome formulations (such as those taught in Feigner P. L. et al. (1995) Ann. NY Acad. Sci. 772:126-139 and Abdallah B. et al. (1995) Biol. Cell 85(1): 1-7) which can be prepared by methods well known to those skilled in the art.

[0866] The polynucleotide vector constructs used in the gene therapy method are preferably constructs that will not integrate into the host genome nor will they contain sequences that allow for replication. Any strong promoter known to those skilled in the art can be used for driving the expression of DNA. Unlike other gene therapy techniques, one major advantage of introducing naked nucleic acid sequences into target cells is the transitory nature of the polynucleotide synthesis in the cells. Studies have shown that non-replicating DNA sequences can be introduced into cells to provide production of the desired polypeptide for periods of up to six months.

[0867] The polynucleotide construct can be delivered to the interstitial space of tissues within an animal, including muscle, skin, brain, lung, liver, spleen, bone marrow, thymus, heart lymph, blood, bone, cartilage, pancreas, kidney, gall bladder, stomach, intestine, testis, ovary, uterus, rectum, nervous system, eye, gland, and connective tissue. Interstitial space of the tissues comprises the intercellular fluid, mucopolysaccharide matrix among the reticular fibers of organ tissues, elastic fibers in the walls of vessels or chambers, collagen fibers of fibrous tissues, or that same matrix within connective tissue ensheathing muscle cells or in the lacunae of bone. It is similarly the space occupied by the plasma of the circulation and the lymph fluid of the lymphatic channels. Delivery to the interstitial space of muscle tissue is preferred for the reasons discussed below. They may be conveniently delivered by injection into the tissues comprising these cells. They are preferably delivered to and expressed in persistent, non-dividing cells which are differentiated, although delivery and expression may be achieved in non-differentiated or less completely differentiated cells, such as, for example, stem cells of blood or skin fibroblasts. In vivo muscle cells are particularly competent in their ability to take up and express polynucleotides.

[0868] For the naked polynucleotide injection, an effective dosage amount of DNA or RNA will be in the range of from about 0.05 g/kg body weight to about 50 mg/kg body weight. Preferably the dosage will be from about 0.005 mg/kg to about 20 mg/kg and more preferably from about 0.05 mg/kg to about 5 mg/kg. Of course, as the artisan of ordinary skill will appreciate, this dosage will vary according to the tissue site of injection. The appropriate and effective dosage of nucleic acid sequence can readily be determined by those of ordinary skill in the art and may depend on the condition being treated and the route of administration. The preferred route of administration is by the parenteral route of injection into the interstitial space of tissues. However, other parenteral routes may also be used, such as, inhalation of an aerosol formulation particularly for delivery to lungs or bronchial tissues, throat or mucous membranes of the nose. In addition, naked polynucleotide constructs can be delivered to arteries during angioplasty by the catheter used in the procedure.

[0869] The dose response effects of injected polynucleotide in muscle in vivo is determined as follows. Suitable template DNA for product of mRNA coding for polypeptide of the present invention is prepared in accordance with a standard recombinant DNA methodology. The template DNA, which may be either circular or linear, is either used as naked DNA or complexed with liposomes. The quadriceps muscles of mice are then injected with various amounts of the template DNA.

[0870] Five to six week old female and male Balb/C mice are anesthetized by intraperitoneal injection with 0.3 ml of 2.5% Avertin. A 1.5 cm incision is made on the anterior thigh, and the quadriceps muscle is directly visualized. The template DNA is injected in 0.1 ml of carrier in a 1 cc syringe through a 27 gauge needle over one minute, approximately 0.5 cm from the distal insertion site of the muscle into the knee and about 0.2 cm deep. A suture is placed over the injection site for future localization, and the skin is closed with stainless steel clips.

[0871] After an appropriate incubation time (e.g., 7 days) muscle extracts are prepared by excising the entire quadriceps. Every fifth 15 um cross-section of the individual quadriceps muscles is histochemically stained for protein expression. A time course for protein expression may be done in a similar fashion except that quadriceps from different mice are harvested at different times. Persistence of DNA in muscle following injection may be determined by Southern blot analysis after preparing total cellular DNA and HIRT supernatants from injected and control mice. The results of the above experimentation in mice can be used to extrapolate proper dosages and other treatment parameters in humans and other animals using naked DNA.

### Example 19

### Transgenic Animals

[0872] The polypeptides of the invention can also be expressed in transgenic animals. Animals of any species, including, but not limited to, mice, rats, rabbits, hamsters, guinea pigs, pigs, micro-pigs, goats, sheep, cows and non-human primates, e.g., baboons, monkeys, and chimpanzees may be used to generate transgenic animals. In a specific embodiment, techniques described herein or otherwise known in the art, are used to express polypeptides of the invention in humans, as part of a gene therapy protocol.

[0873] Any technique known in the art may be used to introduce the transgene (i.e., polynucleotides of the invention) into animals to produce the founder lines of transgenic animals. Such techniques include, but are not limited to, pronuclear microinjection (Paterson et al., Appl. Microbiol. Biotechnol. 40: 691-698 (1994); Carver et al., Biotechnology (NY) 11: 1263-1270 (1993); Wright et al., Biotechnology (NY) 9: 830-834 (1991); and Hoppe et al., U.S. Pat. No. 4,873,191 (1989)); retrovirus mediated gene transfer into germ lines (Van der Putten et al., Proc. Natl. Acad. Sci., USA 82: 6148-6152 (1985)), blastocysts or embryos; gene targeting in embryonic stem cells (Thompson et al., Cell 56:313-321 (1989)); electoporation of cells or embryos (Lo, 1983, Mol Cell. Biol. 3: 1803-1814 (1983)); introduction of the polynucleotides of the invention using a gene gun (see e.g., Ulmer et al., Science 259:1745 (1993); introducing nucleic acid constructs into embryonic pleuripotent stem cells and transferring the stem cells back into the blastocyst; and sperm-mediated gene transfer (Lavitrano et al., Cell 57: 717-723 (1989); etc. For a review of such techniques, see Gordon, “Transgenic Animals,” Intl. Rev. Cytol. 115: 171-229 (1989), which is incorporated by reference herein in its entirety.

[0874] Any technique known in the art may be used to produce transgenic clones containing polynucleotides of the invention, for example, nuclear transfer into enucleated oocytes of nuclei from cultured embryonic, fetal, or adult cells induced to quiescence (Campell et al., Nature 380: 64-66 (1996); Wilmut et al., Nature 385: 810-813 (1997)).

[0875] The present invention provides for transgenic animals that carry the transgene in all their cells, as well as animals which carry the transgene in some, but not all their cells, i.e., mosaic animals or chimeric. The transgene may be integrated as a single transgene or as multiple copies such as in concatamers, e.g., head-to-head tandems or head-to-tail tandems. The transgene may also be selectively introduced into and activated in a particular cell type by following, for example, the teaching of Lasko et al. (Lasko et al., Proc. Natl. Acad. Sci. USA 89: 6232-6236 (1992)). The regulatory sequences required for such a cell-type specific activation will depend upon the particular cell type of interest, and will be apparent to those of skill in the art. When it is desired that the polynucleotide transgene be integrated into the chromosomal site of the endogenous gene, gene targeting is preferred. Briefly, when such a technique is to be utilized, vectors containing some nucleotide sequences homologous to the endogenous gene are designed for the purpose of integrating, via homologous recombination with chromosomal sequences, into and disrupting the function of the nucleotide sequence of the endogenous gene. The transgene may also be selectively introduced into a particular cell type, thus inactivating the endogenous gene in only that cell type, by following, for example, the teaching of Gu et al. (Gu et al., Science 265: 103-106 (1994)). The regulatory sequences required for such a cell-type specific inactivation will depend upon the particular cell type of interest, and will be apparent to those of skill in the art.

[0876] Once transgenic animals have been generated, the expression of the recombinant gene may be assayed utilizing standard techniques. Initial screening may be accomplished by Southern blot analysis or PCR techniques to analyze animal tissues to verify that integration of the transgene has taken place. The level of mRNA expression of the transgene in the tissues of the transgenic animals may also be assessed using techniques which include, but are not limited to, Northern blot analysis of tissue samples obtained from the animal, in situ hybridization analysis, and reverse transcriptase-PCR (rt-PCR). Samples of transgenic gene-expressing tissue may also be evaluated immunocytochemically or immunohistochemically using antibodies specific for the transgene product.

[0877] Once the founder animals are produced, they may be bred, inbred, outbred, or crossbred to produce colonies of the particular animal. Examples of such breeding strategies include, but are not limited to: outbreeding of founder animals with more than one integration site in order to establish separate lines; inbreeding of separate lines in order to produce compound transgenics that express the transgene at higher levels because of the effects of additive expression of each transgene; crossing of heterozygous transgenic animals to produce animals homozygous for a given integration site in order to both augment expression and eliminate the need for screening of animals by DNA analysis; crossing of separate homozygous lines to produce compound heterozygous or homozygous lines; and breeding to place the transgene on a distinct background that is appropriate for an experimental model of interest.

[0878] Transgenic animals of the invention have uses which include, but are not limited to, animal model systems useful in elaborating the biological function of polypeptides of the present invention, studying conditions and/or disorders associated with aberrant expression, and in screening for compounds effective in ameliorating such conditions and/or disorders.

### Example 20

### Knock-Out Animals

[0879] Endogenous gene expression can also be reduced by inactivating or “knocking out” the gene and/or its promoter using targeted homologous recombination. (e.g., see Smithies et al., Nature 317: 230-234 (1985); Thomas & Capecchi, Cell 51: 503-512 (1987); Thompson et al., Cell 5: 313-321 (1989); each of which is incorporated by reference herein in its entirety). For example, a mutant, non-functional polynucleotide of the invention (or a completely unrelated DNA sequence) flanked by DNA homologous to the endogenous polynucleotide sequence (either the coding regions or regulatory regions of the gene) can be used, with or without a selectable marker and/or a negative selectable marker, to transfect cells that express polypeptides of the invention in vivo. In another embodiment, techniques known in the art are used to generate knockouts in cells that contain, but do not express the gene of interest. Insertion of the DNA construct, via targeted homologous recombination, results in inactivation of the targeted gene. Such approaches are particularly suited in research and agricultural fields where modifications to embryonic stem cells can be used to generate animal offspring with an inactive targeted gene (e.g., see Thomas & Capecchi 1987 and Thompson 1989, supra). However this approach can be routinely adapted for use in humans provided the recombinant DNA constructs are directly administered or targeted to the required site in vivo using appropriate viral vectors that will be apparent to those of skill in the art.

[0880] In further embodiments of the invention, cells that are genetically engineered to express the polypeptides of the invention, or alternatively. that are genetically engineered not to express the polypeptides of the invention (e.g., knockouts) are administered to a patient in vivo. Such cells may be obtained from the patient (i.e., animal, including human) or an MHC compatible donor and can include, but are not limited to fibroblasts, bone marrow cells, blood cells (e.g., lymphocytes), adipocytes, muscle cells, endothelial cells etc. The cells are genetically engineered in vitro using recombinant DNA techniques to introduce the coding sequence of polypeptides of the invention into the cells, or alternatively, to disrupt the coding sequence and/or endogenous regulatory sequence associated with the polypeptides of the invention, e.g., by transduction (using viral vectors, and preferably vectors that integrate the transgene into the cell genome) or transfection procedures, including, but not limited to, the use of plasmids, cosmids, YACs, naked DNA, electroporation, liposomes, etc. The coding sequence of the polypeptides of the invention can be placed under the control of a strong constitutive or inducible promoter or promoter/enhancer to achieve expression, and preferably secretion, of the polypeptides of the invention. The engineered cells which express and preferably secrete the polypeptides of the invention can be introduced into the patient systemically, e.g., in the circulation, or intraperitoneally.

[0881] Alternatively, the cells can be incorporated into a matrix and implanted in the body, e.g., genetically engineered fibroblasts can be implanted as part of a skin graft; genetically engineered endothelial cells can be implanted as part of a lymphatic or vascular graft. (See, for example, Anderson et al. U.S. Pat. No. 5,399,349; and Mulligan & Wilson, U.S. Pat. No. 5,460,959 each of which is incorporated by reference herein in its entirety).

[0882] When the cells to be administered are non-autologous or non-MHC compatible cells, they can be administered using well known techniques which prevent the development of a host immune response against the introduced cells. For example, the cells may be introduced in an encapsulated form which, while allowing for an exchange of components with the immediate extracellular environment, does not allow the introduced cells to be recognized by the host immune system.

[0883] Transgenic and “knock-out” animals of the invention have uses which include, but are not limited to, animal model systems useful in elaborating the biological function of polypeptides of the present invention, studying conditions and/or disorders associated with aberrant expression, and in screening for compounds effective in ameliorating such conditions and/or disorders.

### Example 21

### Biological Effects of Agonists or Antagonists of the Invention

Fibroblast and Endothelial Cell Assays

[0884] Human lung fibroblasts are obtained from Clonetics (San Diego, Calif.) and maintained in growth media from Clonetics. Dermal microvascular endothelial cells are obtained from Cell Applications (San Diego, Calif.). For proliferation assays, the human lung fibroblasts and dermal microvascular endothelial cells can be cultured at 5,000 cells/well in a 96-well plate for one day in growth medium. The cells are then incubated for one day in 0.1% BSA basal medium. After replacing the medium with fresh 0.1% BSA medium, the cells are incubated with the test proteins for 3 days. Alamar Biosciences, Sacramento, Calif.) is added to each well to a final concentration of 10%. The cells are incubated for 4 hr. Cell viability is measured by reading in a CytoFluor fluorescence reader. For the PGE₂ assays, the human lung fibroblasts are cultured at 5,000 cells/well in a 96-well plate for one day. After a medium change to 0.1% BSA basal medium, the cells are incubated with FGF-2 or agonists or antagonists of the invention with or without IL-1α for 24 hours. The supernatants are collected and assayed for PGE₂ by EIA kit (Cayman, Ann Arbor, Mich.). For the IL-6 assays, the human lung fibroblasts are cultured at 5,000 cells/well in a 96-well plate for one day. After a medium change to 0.1% BSA basal medium, the cells are incubated with FGF-2 or with or without agonists or antagonists of the invention IL-1α for 24 hours. The supematants are collected and assayed for IL-6 by ELISA kit (Endogen, Cambridge, Mass.).

[0885] Human lung fibroblasts are cultured with FGF-2 or agonists or antagonists of the invention for 3 days in basal medium before the addition of Alamar Blue to assess effects on growth of the fibroblasts. FGF-2 should show a stimulation at 10-2500 ng/ml which can be used to compare stimulation with agonists or antagonists of the invention.

### Example 22

### The Effect of Agonists or Antagonists of the Invention on the Growth of Vascular Endothelial Cells

[0886] On day 1, human umbilical vein endothelial cells (HUVEC) are seeded at 2-5×10⁴ cells/35 mm dish density in M199 medium containing 4% fetal bovine serum (FBS), 16 units/ml heparin, and 50 units/ml endothelial cell growth supplements (ECGS, Biotechnique, Inc.). On day 2, the medium is replaced with M199 containing 10% FBS, 8 units/ml heparin. An agonist or antagonist of the invention, and positive controls, such as VEGF and basic FGF (bFGF) are added, at varying concentrations. On days 4 and 6, the medium is replaced. On day 8, cell number is determined with a Coulter Counter.

[0887] An increase in the number of HUVEC cells indicates that the compound of the invention may proliferate vascular endothelial cells, while a decrease in the number of HUVEC cells indicates that the compound of the invention inhibits vascular endothelial cells.

[0888] The studies described in this example tested activity of a polypeptide of the invention. However, one skilled in the art could easily modify the exemplified studies to test the activity of polynucleotides (e.g., gene therapy), agonists, and/or antagonists of the invention.

### Example 23

### Lymphadema Animal Model

[0889] The purpose of this experimental approach is to create an appropriate and consistent lymphedema model for testing the therapeutic effects of an agonist or antagonist of the invention in lymphangiogenesis and re-establishment of the lymphatic circulatory system in the rat hind limb. Effectiveness is measured by swelling volume of the affected limb, quantification of the amount of lymphatic vasculature, total blood plasma protein, and histopathology. Acute lymphedema is observed for 7-10 days. Perhaps more importantly, the chronic progress ofthe edema is followed for up to 3-4 weeks.

[0890] Prior to beginning surgery, blood sample is drawn for protein concentration analysis. Male rats weighing approximately ˜350 g are dosed with Pentobarbital. Subsequently, the right legs are shaved from knee to hip. The shaved area is swabbed with gauze soaked in 70% EtOH. Blood is drawn for serum total protein testing. Circumference and volumetric measurements are made prior to injecting dye into paws after marking 2 measurement levels (0.5 cm above heel, at mid-pt of dorsal paw). The intradermal dorsum of both right and left paws are injected with 0.05 ml of 1% Evan's Blue. Circumference and volumetric measurements are then made following injection of dye into paws.

[0891] Using the knee joint as a landmark, a mid-leg inguinal incision is made circumferentially allowing the femoral vessels to be located. Forceps and hemostats are used to dissect and separate the skin flaps. After locating the femoral vessels, the lymphatic vessel that runs along side and underneath the vessel(s) is located. The main lymphatic vessels in this area are then electrically coagulated or suture ligated.

[0892] Using a microscope, muscles in back of the leg (near the semitendinosis and adductors) are bluntly dissected. The popliteal lymph node is then located. The 2 proximal and 2 distal lymphatic vessels and distal blood supply of the popliteal node are then ligated by suturing. The politeal lymph node, and any accompanying adipose tissue, is then removed by cutting connective tissues.

[0893] Care is taken to control any mild bleeding resulting from this procedure. After lymphatics are occluded, the skin flaps are sealed by using liquid skin (Vetbond) (AJ Buck). The separated skin edges are sealed to the underlying muscle tissue while leaving a gap of ˜0.5 cm around the leg. Skin also may be anchored by suturing to underlying muscle when necessary.

[0894] To avoid infection, animals are housed individually with mesh (no bedding). Recovering animals are checked daily through the optimal edematous peak, which typically occurred by day 5-7. The plateau edematous peak are then observed. To evaluate the intensity of the lymphedema, the circumference and volumes of 2 designated places on each paw before operation and daily for 7 days are measured. The effect of plasma proteins on lymphedema is determined and whether protein analysis is a useful testing perimeter is also investigated. The weights of both control and edematous limbs are evaluated at 2 places. Analysis is performed in a blind manner.

[0895] Circumference Measurements: Under brief gas anesthetic to prevent limb movement, a cloth tape is used to measure limb circumference. Measurements are done at the ankle bone and dorsal paw by 2 different people and those 2 readings are averaged. Readings are taken from both control and edematous limbs.

[0896] Volumetric Measurements: On the day of surgery, animals are anesthetized with Pentobarbital and are tested prior to surgery. For daily volumetrics animals are under brief halothane anesthetic (rapid immobilization and quick recovery), and both legs are shaved and equally marked using waterproof marker on legs. Legs are first dipped in water, then dipped into instrument to each marked level then measured by Buxco edema software(Chen/Victor). Data is recorded by one person, while the other is dipping the limb to marked area.

[0897] Blood-plasma protein measurements: Blood is drawn, spun, and serum separated prior to surgery and then at conclusion for total protein and Ca2⁺ comparison.

[0898] Limb Weight Comparison: After drawing blood, the animal is prepared for tissue collection. The limbs are amputated using a quillitine, then both experimental and control legs are cut at the ligature and weighed. A second weighing is done as the tibio-cacaneal joint is disarticulated and the foot is weighed.

[0899] Histological Preparations: The transverse muscle located behind the knee (popliteal) area is dissected and arranged in a metal mold, filled with freezeGel, dipped into cold methylbutane, placed into labeled sample bags at −80 EC until sectioning. Upon sectioning, the muscle is observed under fluorescent microscopy for lymphatics.

[0900] The studies described in this example tested activity of agonists or antagonists of the invention. However, one skilled in the art could easily modify the exemplified studies to test the activity of polynucleotides or polypeptides of the invention (e.g., gene therapy).

### Example 24

### Suppression of TNF Alpha-Induced Adhesion Molecule Expression by an Agonist or Antagonist of the Invention

[0901] The recruitment of lymphocytes to areas of inflammation and angiogenesis involves specific receptor-ligand interactions between cell surface adhesion molecules (CAMs) on lymphocytes and the vascular endothelium. The adhesion process, in both normal and pathological settings, follows a multi-step cascade that involves intercellular adhesion molecule-1 (ICAM-1), vascular cell adhesion molecule-1 (VCAM-1), and endothelial leukocyte adhesion molecule-1 (E-selectin) expression on endothelial cells (EC). The expression of these molecules and others on the vascular endothelium determines the efficiency with which leukocytes may adhere to the local vasculature and extravasate into the local tissue during the development of an inflammatory response. The local concentration of cytokines and growth factor participate in the modulation of the expression of these CAMs.

[0902] Tumor necrosis factor alpha (TNF-a), a potent proinflammatory cytokine, is a stimulator of all three CAMs on endothelial cells and may be involved in a wide variety of inflammatory responses, often resulting in a pathological outcome.

[0903] The potential of an agonist or antagonist of the invention to mediate a suppression of TNF-a induced CAM expression can be examined. A modified ELISA assay which uses ECs as a solid phase absorbent is employed to measure the amount of CAM expression on TNF-a treated ECs when co-stimulated with a member of the FGF family of proteins.

[0904] To perform the experiment, human umbilical vein endothelial cell (HUVEC) cultures are obtained from pooled cord harvests and maintained in growth medium (EGM-2; Clonetics, San Diego, Calif.) supplemented with 10% FCS and 1% penicillin/streptomycin in a 37 degree C humidified incubator containing 5% CO₂. HUVECs are seeded in 96-well plates at concentrations of 1×10⁴ cells/well in EGM medium at 37 degree C for 18-24 hrs or until confluent. The monolayers are subsequently washed 3 times with a serum-free solution of RPMI-1640 supplemented with 100 U/ml penicillin and 100 mg/ml streptomycin, and treated with a given cytokine and/or growth factor(s) for 24 h at 37 degree C. Following incubation, the cells are then evaluated for CAM expression.

[0905] Human Umbilical Vein Endothelial cells (HUWECs) are grown in a standard 96 well plate to confluence. Growth medium is removed from the cells and replaced with 90 ul of 199 Medium (10% FBS). Samples for testing and positive or negative controls are added to the plate in triplicate (in 10 ul volumes). Plates are incubated at 37 degree C for either 5 h (selectin and integrin expression) or 24 h (integrin expression only). Plates are aspired to remove medium and 100 ul of 0.1% paraformaldehyde-PBS(with Ca++ and Mg++) is added to each well. Plates are held at 4°C. for 30 min.

[0906] Fixative is then removed from the wells and wells are washed 1× with PBS(+Ca,Mg)+0.5% BSA and drained. Do not allow the wells to dry. Add 10 μl of diluted primary antibody to the test and control wells. Anti-ICAM-1-Biotin, Anti-VCAM-1-Biotin and Anti-E-selectin-Biotin are used at a concentration of 10 μg/ml (1:10 dilution of 0.1 mg/ml stock antibody). Cells are incubated at 37° C. for 30 min. in a humidified environment. Wells are washed X3 with PBS(+Ca,Mg)+0.5% BSA.

[0907] Then add 20 μl of diluted ExtrAvidin-Alkaline Phosphotase (1:5,000 dilution) to each well and incubated at 37° C. for 30 min. Wells are washed X3 with PBS(+Ca,Mg)+0.5% BSA. 1 tablet of p-Nitrophenol Phosphate pNPP is dissolved in 5 ml of glycine buffer (pH 10.4). 100 μl of pNPP substrate in glycine buffer is added to each test well. Standard wells in triplicate are prepared from the working dilution of the ExtrAvidin-Alkaline Phosphotase in glycine buffer: 1:5,000 (10⁰)>10^{-0.5}>10⁻¹>10^{-1.5}>.5 μl of each dilution is added to triplicate wells is 5.50 ng, 1.74 ng, 0.55 ng, 0.18 ng. 100 μl of pNNP reagent must then be added to each of the standard wells. The plate must be incubated at 37° C. for 4 h. A volume of 50 μi of 3M NaOH is added to all wells. The results are quantified on a plate reader at 405 nm. The background subtraction option is used on blank wells filled with glycine buffer only. The template is set up to indicate the concentration of AP-conjugate in each standard well [5.50 ng; 1.74 ng; 0.55 ng; 0.18 ng]. Results are indicated as amount of bound AP-conjugate in each sample.

[0908] The studies described in this example tested activity of agonists or antagonists of the invention. However, one skilled in the art could easily modify the exemplified studies to test the activity of polynucleotides or polypeptides of the invention (e.g., gene therapy).

### Example 25

### Production of Polypeptide of the Invention for High-Throughput Screening Assays

[0909] The following protocol produces a supematant containing polypeptide of the present invention to be tested. This supematant can then be used in the Screening Assays described in Examples 27-30.

[0910] First, dilute Poly-D-Lysine (644 587 Boehringer-Mannheim) stock solution (1 mg/ml in PBS) 1:20 in PBS (w/o calcium or magnesium 17-516F Biowhittaker) for a working solution of 50 ug/ml. Add 200 ul of this solution to each well (24 well plates) and incubate at RT for 20 minutes. Be sure to distribute the solution over each well (note: a 12-channel pipetter may be used with tips on every other channel). Aspirate off the Poly-D-Lysine solution and rinse with Iml PBS (Phosphate Buffered Saline). The PBS should remain in the well until just prior to plating the cells and plates may be poly-lysine coated in advance for up to two weeks.

[0911] Plate 293T cells (do not carry cells past P+20) at 2×10⁵ cells/well in 0.5 ml DMEM(Dulbecco's Modified Eagle Medium)(with 4.5 G/L glucose and L-glutamine (12-604F Biowhittaker))/10% heat inactivated FBS(14-503F Biowhittaker)/1× Penstrep(17-602E Biowhittaker). Let the cells grow overnight.

[0912] The next day, mix together in a sterile solution basin: 300 ul Lipofectamine (18324-012 Gibco/BRL) and 5 ml Optimem I (31985070 Gibco/BRL)/96-well plate. With a small volume multi-channel pipetter, aliquot approximately 2 ug of an expression vector containing a polynucleotide insert, produced by the methods described in Examples 8-10, into an appropriately labeled 96-well round bottom plate. With a multi-channel pipetter, add 50 ul of the Lipofectamine/Optimem 1 mixture to each well. Pipette up and down gently to mix. Incubate at RT 15-45 minutes. After about 20 minutes, use a multi-channel pipener to add 150 ul Optimem I to each well. As a control, one plate of vector DNA lacking an insert should be transfected with each set of transfections.

[0913] Preferably, the transfection should be performed by tag-teaming the following tasks. By tag-teaming, hands on time is cut in half, and the cells do not spend too much time on PBS. First, person A aspirates off the media from four 24-well plates of cells, and then person B rinses each well with 0.5-1 ml PBS. Person A then aspirates off PBS rinse, and person B, using a12-channel pipetter with tips on every other channel, adds the 200 ul of DNA/Lipofectamine/Optimem I complex to the odd wells first, then to the even wells, to each row on the 24-well plates. Incubate at 37 degree C for 6 hours.

[0914] While cells are incubating, prepare appropriate media, either 1% BSA in DMEM with 1× penstrep, or HGS CHO-5 media (116.6 mg/L of CaCl2 (anhyd); 0.00130 mg/L CuSO₄.5H₂O; 0.050 mg/L of Fe(NO₃)₃.9H₂O; 0.417 mg/L of FeSO₄.7H₂O; 311.80 mg/L of Kcl; 28.64 mg/L of MgCl₂; 48.84 mg/L of MgSO₄; 6995.50 mg/L of NaCl; 2400.0 mg/L of NaHCO₃; 62.50 mg/L of NaH₂PO₄.H₂O; 71.02 mg/L of Na₂HPO4; 4320 mg/L of ZnSO₄.7H₂O; 0.002 mg/L of Arachidonic Acid; 1.022 mg/L of Cholesterol; 0.070 mg/L of DL-alpha-Tocopherol-Acetate; 0.0520 mg/L of Linoleic Acid; 0.010 mg/L of Linolenic Acid; 0.010 mg/L of Myristic Acid; 0.010 mg/L of Oleic Acid; 0.010 mg/L of Palmitric Acid; 0.010 mg/L of Palmitic Acid; 100 mg/L of Pluronic F-68; 0.010 mg/L of Stearic Acid; 2.20 mg/L of Tween 80; 4551 mg/L of D-Glucose; 130.85 mg/ml of L-Alanine; 147.50 mg/ml of L-Arginine-HCL; 7.50 mg/ml of L-Asparagine-H₂O; 6.65 mg/ml of L-Aspartic Acid; 29.56 mg/ml of L-Cystine-2HCL-H₂O; 31.29 mg/ml of L-Cystine-2HCL; 7.35 mg/ml of L-Glutamic Acid; 365.0 mg/ml of L-Glutamine; 18.75 mg/ml of Glycine; 52.48 mg/ml of L-Histidine-HCL-H₂O; 106.97 mg/ml of L-Isoleucine; 111.45 mg/ml of L-Leucine; 163.75 mg/ml of L-Lysine HCL; 32.34 mg/ml of L-Methionine; 68.48 mg/ml of L-Phenylalainine; 40.0 mg/ml of L-Proline; 26.25 mg/ml of L-Serine; 101.05 mg/ml of L-Threonine; 19.22 mg/ml of L-Tryptophan; 91.79 mg/ml of L-Tryrosine-2Na-2H₂O; and 99.65 mg/ml of L-Valine; 0.0035 mg/L of Biotin; 3.24 mg/L of D-Ca Pantothenate; 11.78 mg/L of Choline Chloride; 4.65 mg/L of Folic Acid; 15.60 mg/L of i-Inositol; 3.02 mg/L of Niacinamide; 3.00 mg/L of Pyridoxal HCL; 0.031 mg/L of Pyridoxine HCL; 0.319 mg/L of Riboflavin; 3.17 mg/L of Thiamine HCL; 0.365 mg/L of Thymidine; 0.680 mg/L of Vitamin B₁₂; 25 mM of HEPES Buffer; 2.39 mg/L of Na Hypoxanthine; 0.105 mg/L of Lipoic Acid; 0.081 mg/L of Sodium Putrescine-2HCL; 55.0 mg/L of Sodium Pyruvate; 0.0067 mg/L of Sodium Selenite; 20 uM of Ethanolamine; 0.122 mg/L of Ferric Citrate; 41.70 mg/L of Methyl-B-Cyclodextrin complexed with Linoleic Acid; 33.33 mg/L of Methyl-B-Cyclodextrin complexed with Oleic Acid; 10 mg/L of Methyl-B-Cyclodextrin complexed with Retinal Acetate. Adjust osmolarity to 327 mOsm) with 2 mm glutamine and 1× penstrep. (BSA (81-068-3 Bayer) 100 gm dissolved in 1L DMEM for a 10% BSA stock solution). Filter the media and collect 50 ul for endotoxin assay in 15 ml polystyrene conical.

[0915] The transfection reaction is terminated, preferably by tag-teaming, at the end of the incubation period. Person A aspirates off the activity originates transfection media, while person B adds 1.5 ml appropriate media to each well. Incubate at 37 degree C for 45 or 72 hours depending on the media used: 1% BSA for 45 hours or CHO-5 for 72 hours.

[0916] On day four, using a 300 ul multichannel pipetter, aliquot 600 ul in one 1 ml deep well plate and the remaining supernatant into a 2 ml deep well. The supernatants from each well can then be used in the assays described in Examples 27-30.

[0917] It is specifically understood that when activity is obtained in any of the assays described below using a supernatant, the activity originates from either the polypeptide of the present invention directly (e.g., as a secreted protein) or by polypeptide of the present invention inducing expression of other proteins, which are then secreted into the supernatant. Thus, the invention further provides a method of identifying the protein in the supernatant characterized by an activity in a particular assay.

### Example 26

### Construction of GAS Reporter Construct

[0918] One signal transduction pathway involved in the differentiation and proliferation of cells is called the Jaks-STATs pathway. Activated proteins in the Jaks-STATs pathway bind to gamma activation site “GAS” elements or interferon-sensitive responsive element (“ISRE”), located in the promoter of many genes. The binding of a protein to these elements alter the expression of the associated gene.

[0919] GAS and ISRE elements are recognized by a class of transcription factors called Signal Transducers and Activators of Transcription, or “STATs.” There are six members of the STATs family. Stat1 and Stat3 are present in many cell types, as is Stat2 (as response to IFN-alpha is widespread). Stat4 is more restricted and is not in many cell types though it has been found in T helper class I, cells after treatment with IL-12. Stat5 was originally called mammary growth factor, but has been found at higher concentrations in other cells including myeloid cells. It can be activated in tissue culture cells by many cytokines.

[0920] The STATs are activated to translocate from the cytoplasm to the nucleus upon tyrosine phosphorylation by a set of kinases known as the Janus Kinase (“Jaks”) family. Jaks represent a distinct family of soluble tyrosine kinases and include Tyk2, Jak1, Jak2, and Jak3. These kinases display significant sequence similarity and are generally catalytically inactive in resting cells.

[0921] The Jaks are activated by a wide range of receptors summarized in the Table below. (Adapted from review by Schidler and Darnell, Ann, Rev. Biochem. 64: 621-51 (1995)). A cytokine receptor family, capable of activating Jaks, is divided into two groups: (a) Class 1 includes receptors for IL-2, IL-3, IL-4, IL-6, IL-7, IL-9, IL-11, IL-12, IL-15, Epo, PRL, GH, G-CSF, GM-CSF, LIF, CNTF, and thrombopoietin; and (b) Class 2 includes IFN-a, IFN-g, and IL-10. The Class 1 receptors share a conserved cysteine motif (a set of four conserved cysteines and one tryptophan) and a WSXWS motif (a membrane proximal region encoding Trp-Ser-Xaa-Trp-Ser (SEQ ID NO: 2)).

[0922] Thus, on binding of a ligand to a receptor, Jaks are activated, which in turn activate STATs, which then translocate and bind to GAS elements. This entire process is encompassed in the Jaks-STATs signal transduction pathway. Therefore, activation of the Jaks-STATs pathway, reflected by the binding of the GAS or the ISRE element, can be used to indicate proteins involved in the proliferation and differentiation of cells. For example, growth factors and cytokines are known to activate the Jaks-STATs pathway (See Table below). Thus, by using GAS elements linked to reporter molecules, activators of the Jaks-STATs pathway can be identified.

| | JAKs | | | | | |
|---|---|---|---|---|---|---|
| Ligand | tyk2 | Jak1 | Jak2 | Jak3 | STATS | GAS(elements) or ISRE |
| IFN family | | | | | | |
| IFN-a/B | + | + | − | − | 1, 2, 3 | ISRE |
| IFN-g | | + | + | − | 1 | GAS (IRF1 > Lys6 > IFP) |
| Il-10 | + | ? | ? | − | 1, 3 | |
| gp130 family | | | | | | |
| IL-6 (Pleiotropic) | + | + | + | ? | 1, 3 | GAS (IRF1 > Lys6 > IFP) |
| Il-11 (Pleiotropic) | ? | + | ? | ? | 1, 3 | |
| OnM (Pleiotropic) | ? | + | + | ? | 1, 3 | |
| LIF (Pleiotropic) | ? | + | + | ? | 1, 3 | |
| CNTF (Pleiotropic) | −/+ | + | + | ? | 1, 3 | |
| G-CSF (Pleiotropic) | ? | + | ? | ? | 1, 3 | |
| IL-12 (Pleiotropic) | + | − | + | + | 1, 3 | |
| g-C family | | | | | | |
| IL-2 (lymphocytes) | − | + | − | + | 1, 3, 5 | GAS |
| IL-4 (lymph/myeloid) | − | + | − | + | 6 | GAS (IRF1 = IFP >> Ly6)(IgH) |
| IL-7 (lymphocytes) | − | + | − | + | 5 | GAS |
| IL-9 (lymphocytes) | − | + | − | + | 5 | GAS |
| IL-13 (lymphocyte) | − | + | ? | ? | 6 | GAS |
| IL-15 | ? | + | ? | + | 5 | GAS |
| gp140 family | | | | | | |
| IL-3 (myeloid) | − | − | + | − | 5 | GAS (IRF1 > IFP >> Ly6) |
| IL-5 (myeloid) | − | − | + | − | 5 | GAS |
| GM-CSF (myeloid) | − | − | + | − | 5 | GAS |
| Growth hormone family | | | | | | |
| GH | ? | − | + | − | 5 | |
| PRL | ? | +/− | + | − | 1, 3, 5 | |
| EPO | ? | − | + | − | 5 | GAS (B-CAS > IRF1 = IFP >> Ly6) |
| Receptor Tyrosine Kinases | | | | | | |
| EGF | ? | + | + | − | 1, 3 | GAS (IRF1) |
| PDGF | ? | + | + | − | 1, 3 | |
| CSF-1 | ? | + | + | − | 1, 3 | GAS (not IRF1) |

[0923] To construct a synthetic GAS containing promoter element, a PCR based strategy is employed to generate a GAS-SV40 promoter sequence. The 5′ primer contains four tandem copies of the GAS binding site found in the IRF1 promoter and previously demonstrated to bind STATs upon induction with a range of cytokines (Rothman et al., Immunity 1: 457-468 (1994).), although other GAS or ISRE elements can be used instead. The 5′ primer also contains 18 bp of sequence complementary to the SV40 early promoter sequence and is flanked with an XhoI site. The sequence of the 5′ primer is:

(SEQ ID NO: 3)

5′:GCGCCTCGAGATTTCCCCGAAATCTAGATTTCCCCGAAATGATTTCC
CCGAAATGATTTCCCCGAAATATCTGCCATCTCAATTAG:3′

[0924] The downstream primer is complementary to the SV40 promoter and is flanked with a Hind III site: 5′:GCGGCAAGCTTTTTGCAAAGCCTAGGC:3′ (SEQ ID NO: 4)

[0925] PCR amplification is performed using the SV40 promoter template present in the B-gal:promoter plasmid obtained from Clontech. The resulting PCR fragment is digested with XhoI/Hind III and subcloned into BLSK2-. (Stratagene.) Sequencing with forward and reverse primers confirms that the insert contains the following sequence:

(SEQ ID NO: 5)

5′:CTCGAGATTTCCCCGAAATCTAGATTTCCCCGAAATGATTTCCCCGA
AATGATTTCCCCGAAATATCTGCCATCTCAATTAGTCAGCAACCATAGTC
CCGCCCCTAACTCCGCCCATCCCGCCCCTAACTCCGCCCAGTTCCGCCCA
TTCTCCGCCCCATGGCTGACTAATTTTTTTTATTTATGCAGAGGCCGAGG
CCGCCTCGGCCTCTGAGCTATTCCAGAAGTAGTGAGGAGGCTTTTTTGGA
GGCCTAGGCTTTTGCAAAAAGCTT:3′

[0926] With this GAS promoter element linked to the SV40 promoter, a GAS:SEAP2 reporter construct is next engineered. Here, the reporter molecule is a secreted alkaline phosphatase, or “SEAP.” Clearly, however, any reporter molecule can be instead of SEAP, in this or in any of the other Examples. Well known reporter molecules that can be used instead of SEAP include chloramphenicol acetyltransferase (CAT), luciferase, alkaline phosphatase, B-galactosidase, green fluorescent protein (GFP), or any protein detectable by an antibody.

[0927] The above sequence confirmed synthetic GAS-SV40 promoter element is subcloned into the pSEAP-Promoter vector obtained from Clontech using HindIII and XhoI, effectively replacing the SV40 promoter with the amplified GAS:SV40 promoter element, to create the GAS-SEAP vector. However, this vector does not contain a neomycin resistance gene, and therefore, is not preferred for mammalian expression systems.

[0928] Thus, in order to generate mammalian stable cell lines expressing the GAS-SEAP reporter, the GAS-SEAP cassette is removed from the GAS-SEAP vector using Sall and Notl, and inserted into a backbone vector containing the neomycin resistance gene, such as pGFP-1 (Clontech), using these restriction sites in the multiple cloning site, to create the GAS-SEAP/Neo vector. Once this vector is transfected into mammalian cells, this vector can then be used as a reporter molecule for GAS binding.

[0929] Other constructs can be made using the above description and replacing GAS with a different promoter sequence. However, many other promoters can be substituted using the protocols described in these Examples. For instance, SRE, IL-2, NFAT, or Osteocalcin promoters can be substituted, alone or in combination (e.g., GAS/NF-KB/EGR, GAS/NF-KB, II-2/NFAT, or NF-KB/GAS). Similarly, other cell lines can be used to test reporter construct activity, such as HELA (epithelial), HUVEC (endothelial), Reh (B-cell), Saos-2 (osteoblast), HUVAC (aortic), or Cardiomyocyte.

### Example 27

### Assay for SEAP Activity

[0930] As a reporter molecule for the assays, SEAP activity is assayed using the Tropix Phospho-light Kit (Cat. BP400) according to the following general procedure. The Tropix Phospho-light Kit supplies the Dilution, Assay, and Reaction Buffers used below.

[0931] Prime a dispenser with the 2.5× Dilution Buffer and dispense 15 ul of 2.5× dilution buffer into Optiplates containing 35 ul of a supernant. Seal the plates with a plastic sealer and incubate at 65 degree C for 30 min. Separate the Optiplates to avoid uneven heating.

[0932] Cool the samples to room temperature for 15 minutes. Empty the dispenser and prime with the Assay Buffer. Add 50 ml Assay Buffer and incubate at room temperature 5 min. Empty the dispenser and prime with the Reaction Buffer (see the Table below). Add 50 ul Reaction Buffer and incubate at room temperature for 20 minutes. Since the intensity of the chemiluminescent signal is time dependent, and it takes about 10 minutes to read 5 plates on a luminometer, thus one should treat 5 plates at each time and start the second set 10 minutes later.

[0933] Read the relative light unit in the luminometer. Set H12 as blank, and print the results. An increase in chemiluminescence indicates reporter activity.

Reaction Buffer Formulation:

| # of plates | Rxn buffer diluent (ml) | CSPD (ml) |
|---|---|---|
| 10 | 60 | 3 |
| 11 | 65 | 3.25 |
| 12 | 70 | 3.5 |
| 13 | 75 | 3.75 |
| 14 | 80 | 4 |
| 15 | 85 | 4.25 |
| 16 | 90 | 4.5 |
| 17 | 95 | 4.75 |
| 18 | 100 | 5 |
| 19 | 105 | 5.25 |
| 20 | 110 | 5.5 |
| 21 | 115 | 5.75 |
| 22 | 120 | 6 |
| 23 | 125 | 6.25 |
| 24 | 130 | 6.5 |
| 25 | 135 | 6.75 |
| 26 | 140 | 7 |
| 27 | 145 | 7.25 |
| 28 | 150 | 7.5 |
| 29 | 155 | 7.75 |
| 30 | 160 | 8 |
| 31 | 165 | 8.25 |
| 32 | 170 | 8.5 |
| 33 | 175 | 8.75 |
| 34 | 180 | 9 |
| 35 | 185 | 9.25 |
| 36 | 190 | 9.5 |
| 37 | 195 | 9.75 |
| 38 | 200 | 10 |
| 39 | 205 | 10.25 |
| 40 | 210 | 10.5 |
| 41 | 215 | 10.75 |
| 42 | 220 | 11 |
| 43 | 225 | 11.25 |
| 44 | 230 | 11.5 |
| 45 | 235 | 11.75 |
| 46 | 240 | 12 |
| 47 | 245 | 12.25 |
| 48 | 250 | 12.5 |
| 49 | 255 | 12.75 |
| 50 | 260 | 13 |

### Example 28

### High-Throughput Screening Assay Identifying Changes in Small Molecule Concentration and Membrane Permeability

[0934] Binding of a ligand to a receptor is known to alter intracellular levels of small molecules, such as calcium, potassium, sodium, and pH, as well as alter membrane potential. These alterations can be measured in an assay to identify supernatants which bind to receptors of a particular cell. Although following protocol describes an assay for calcium, this protocol can easily be modified to detect changes in potassium, sodium, pH, membrane potential, or any other small molecule which is detectable by a fluorescent probe.

[0935] The following assay uses Fluorometric Imaging Plate Reader (“FLIPR”) to measure changes in fluorescent molecules (Molecular Probes) that bind small molecules. Clearly, any fluorescent molecule detecting a small molecule can be used instead of the calcium fluorescent molecule, fluo-4 (Molecular Probes, Inc.; catalog no. F-14202), used here.

[0936] For adherent cells, seed the cells at 10,000 -20,000 cells/well in a Co-star black 96-well plate with clear bottom. The plate is incubated in a CO₂ incubator for 20 hours. The adherent cells are washed two times in Biotek washer with 200 ul of HBSS (Hank's Balanced Salt Solution) leaving 100 ul of buffer after the final wash.

[0937] A stock solution of 1 mg/ml fluo-4 is made in 10% pluronic acid DMSO. To load the cells with fluo-4, 50 ul of 12 ug/ml fluo-4 is added to each well. The plate is incubated at 37 degrees C. in a CO₂ incubator for 60 min. The plate is washed four times in the Biotek washer with HBSS leaving 100 of buffer.

[0938] For non-adherent cells, the cells are spun down from culture media. Cells are re-suspended to 2-5×10⁶ cells/ml with HBSS in a 50-ml conical tube. 4 ul of 1 mg/ml fluo-4 solution in 10% pluronic acid DMSO is added to each ml of cell suspension. The tube is then placed in a 37 degrees C. water bath for 30-60 min. The cells are washed twice with HBSS, resuspended to 1×10⁶ cells/ml, and dispensed into a microplate, 100 ul/well. The plate centrifuged at 1000 rpm for 5 min. The plate is then washed once in Denley Cell Wash with 200 ul, followed by an aspiration step to 100 ul final volume.

[0939] For a non-cell based assay, each well contains a fluorescent molecule, such as fluo-4. The supernatant is added to the well, and a change in fluorescene is detected.

[0940] To measure the fluorescence of intracellular calcium, the FLIPR is set for the following parameters: (1) System gain is 300-800 mW; (2) Exposure time is 0.4 second; (3) Camera F/stop is F/2; (4) Excitation is 488 nm; (5) Emission is 530 nm; and (6) Sample addition is 50 ul. Increased emission at 530 nm indicates an extracellular signaling event caused by the a molecule, either polypeptide of the present invention or a molecule induced by polypeptide of the present invention, which has resulted in an increase in the intracellular Ca⁺⁺ concentration.

### Example 29

### High-Throughput Screening Assay Identifying Tyrosine Kinase Activity

[0941] The Protein Tyrosine Kinases (PTK) represent a diverse group of transmembrane and cytoplasmic kinases. Within the Receptor Protein Tyrosine Kinase RPTK) group are receptors for a range of mitogenic and metabolic growth factors including the PDGF, FGF, EGF, NGF, HGF and Insulin receptor subfamilies. In addition there are a large family of RPTKs for which the corresponding ligand is unknown. Ligands for RPTKs include mainly secreted small proteins, but also membrane-bound and extracellular matrix proteins.

[0942] Activation of RPTK by ligands involves ligand-mediated receptor dimerization, resulting in transphosphorylation of the receptor subunits and activation of the cytoplasmic tyrosine kinases. The cytoplasmic tyrosine kinases include receptor associated tyrosine kinases of the src-family (e.g., src, yes, lck, lyn, fyn) and non-receptor linked and cytosolic protein tyrosine kinases, such as the Jak family, members of which mediate signal transduction triggered by the cytokine superfamily of receptors (e.g., the Interleukins, Interferons, GM-CSF, and Leptin).

[0943] Because of the wide range of known factors capable of stimulating tyrosine kinase activity, identifying whether polypeptide of the present invention or a molecule induced by polypeptide of the present invention is capable of activating tyrosine kinase signal transduction pathways is of interest. Therefore, the following protocol is designed to identify such molecules capable of activating the tyrosine kinase signal transduction pathways.

[0944] Seed target cells (e.g., primary keratinocytes) at a density of approximately 25,000 cells per well in a 96 well Loprodyne Silent Screen Plates purchased from Nalge Nunc (Naperville, Ill.). The plates are sterilized with two 30 minute rinses with 100% ethanol, rinsed with water and dried overnight. Some plates are coated for 2 hr with 100 ml of cell culture grade type I collagen (50 mg/ml), gelatin (2%) or polylysine (50 mg/ml), all of which can be purchased from Sigma Chemicals (St. Louis, Mo.) or 10% Matrigel purchased from Becton Dickinson (Bedford,Mass.), or calf serum, rinsed with PBS and stored at 4 degree C. Cell growth on these plates is assayed by seeding 5,000 cells/well in growth medium and indirect quantitation of cell number through use of alamarBlue as described by the manufacturer Alamar Biosciences, Inc. (Sacramento, Calif.) after 48 hr. Falcon plate covers #3071 from Becton Dickinson (Bedford,Mass.) are used to cover the Loprodyne Silent Screen Plates. Falcon Microtest III cell culture plates can also be used in some proliferation experiments.

[0945] To prepare extracts, A431 cells are seeded onto the nylon membranes of Loprodyne plates (20,000/200ml/well) and cultured overnight in complete medium. Cells are quiesced by incubation in serum-free basal medium for 24 hr. After 5-20 minutes treatment with EGF (60 ng/ml) or 50 ul of the supernatant produced in Example 25, the medium was removed and 100 ml of extraction buffer ((20 mM HEPES pH 7.5, 0/15 M NaCl, 1% Triton X-100, 0.1% SDS, 2 mM Na3VO4, 2 mM Na4P2O7 and a cocktail of protease inhibitors (#1836170) obtained from Boeheringer Mannheim (Indianapolis, Ind.)) is added to each well and the plate is shaken on a rotating shaker for 5 minutes at 4° C. The plate is then placed in a vacuum transfer manifold and the extract filtered through the 0.45 mm membrane bottoms of each well using house vacuum. Extracts are collected in a 96-well catch/assay plate in the bottom of the vacuum manifold and immediately placed on ice. To obtain extracts clarified by centrifugation, the content of each well, after detergent solubilization for 5 minutes, is removed and centrifuged for 15 minutes at 4 degree C at 16,000×g.

[0946] Test the filtered extracts for levels of tyrosine kinase activity. Although many methods of detecting tyrosine kinase activity are known, one method is described here.

[0947] Generally, the tyrosine kinase activity of a supematant is evaluated by determining its ability to phosphorylate a tyrosine residue on a specific substrate (a biotinylated peptide). Biotinylated peptides that can be used for this purpose include PSKI (corresponding to amino acids 6-20 of the cell division kinase cdc2-p34) and PSK2 (corresponding to amino acids 1-17 of gastrin). Both peptides are substrates for a range of tyrosine kinases and are available from Boehringer Mannheim.

[0948] The tyrosine kinase reaction is set up by adding the following components in order. First, add 10 ul of 5 uM Biotinylated Peptide, then 10 ul ATP/Mg₂₊ (5 mM ATP/50 mM MgCl₂), then 10 ul of 5× Assay Buffer (40 mM imidazole hydrochloride, pH7.3, 40 mM beta-glycerophosphate, 1 mM EGTA, 100 mM MgCl₂, 5 mM MnCl₂, 0.5 mg/ml BSA), then 5 ul of Sodium Vanadate(1 mM), and then 5 ul of water. Mix the components gently and preincubate the reaction mix at 30 degree C for 2 min. Initial the reaction by adding 10 ul of the control enzyme or the filtered supernatant.

[0949] The tyrosine kinase assay reaction is then terminated by adding 10 ul of 120 mm EDTA and place the reactions on ice.

[0950] Tyrosine kinase activity is determined by transferring 50 ul aliquot of reaction mixture to a microtiter plate (MTP) module and incubating at 37 degree C for 20 min. This allows the streptavidin coated 96 well plate to associate with the biotinylated peptide. Wash the MTP module with 300 ul/well of PBS four times. Next add 75 ul of anti-phospotyrosine antibody conjugated to horse radish peroxidase(anti-P-Tyr-POD(0.5 u/ml)) to each well and incubate at 37 degree C for one hour. Wash the well as above.

[0951] Next add 100 ul of peroxidase substrate solution (Boehringer Mannheim) and incubate at room temperature for at least 5 mins (up to 30 min). Measure the absorbance of the sample at 405 nm by using ELISA reader. The level of bound peroxidase activity is quantitated using an ELISA reader and reflects the level of tyrosine kinase activity.

### Example 30

### High-Throughput Screening Assay Identifing Phosphorylation Actvity

[0952] As a potential alternative and/or complement to the assay of protein tyrosine kinase activity described in Example 29, an assay which detects activation (phosphorylation) of major intracellular signal transduction intermediates can also be used. For example, as described below one particular assay can detect tyrosine phosphorylation of the Erk-1 and Erk-2 kinases. However, phosphorylation of other molecules, such as Raf, JNK, p38 MAP, Map kinase kinase (MEK), MEK kinase, Src, Muscle specific kinase (MuSK), IRAK, Tec, and Janus, as well as any other phosphoserine, phosphotyrosine, or phosphothreonine molecule, can be detected by substituting these molecules for Erk-1 or Erk-2 in the following assay.

[0953] Specifically, assay plates are made by coating the wells of a 96-well ELISA plate with 0.1 ml of protein G (1 ug/ml) for 2 hr at room temp, (RT). The plates are then rinsed with PBS and blocked with 3% BSA/PBS for 1 hr at RT. The protein G plates are then treated with 2 commercial monoclonal antibodies (10 ng/well) against Erk-1 and Erk-2 (1 hr at RT) (Santa Cruz Biotechnology). (To detect other molecules, this step can easily be modified by substituting a monoclonal antibody detecting any of the above described molecules.) After 3-5 rinses with PBS, the plates are stored at 4 degree C until use.

[0954] A431 cells are seeded at 20,000/well in a 96-well Loprodyne filterplate and cultured overnight in growth medium. The cells are then starved for 48 hr in basal medium (DMEM) and then treated with EGF (6 ng/well) or 50 ul of the supernatants obtained in Example 25 for 5-20 minutes. The cells are then solubilized and extracts filtered directly into the assay plate.

[0955] After incubation with the extract for 1 hr at RT, the wells are again rinsed. As a positive control, a commercial preparation of MAP kinase (10 ng/well) is used in place of A431 extract. Plates are then treated with a commercial polyclonal (rabbit) antibody (1 ug/ml) which specifically recognizes the phosphorylated epitope of the Erk-1 and Erk-2 kinases (1 hr at RT). This antibody is biotinylated by standard procedures. The bound polyclonal antibody is then quantitated by successive incubations with Europium-streptavidin and Europium fluorescence enhancing reagent in the Wallac DELFIA instrument (time-resolved fluorescence). An increased fluorescent signal over background indicates a phosphorylation by polypeptide of the present invention or a molecule induced by polypeptide of the present invention.

### Example 31

### Human Dermal Fibroblast and Aortic Smooth Muscle Cell Proliferation

[0956] The polypeptide of interest is added to cultures of normal human dermal fibroblasts (NHDF) and human aortic smooth muscle cells (AOSMC) and two co-assays are performed with each sample. The first assay examines the effect of the polypeptide of interest on the proliferation of normal human dermal fibroblasts (NHDF) or aortic smooth muscle cells (AoSMC). Aberrant growth of fibroblasts or smooth muscle cells is a part of several pathological processes, including fibrosis, and restenosis. The second assay examines IL6 production by both NHDF and SMC. IL6 production is an indication of functional activation. Activated cells will have increased production of a number of cytokines and other factors, which can result in a proinflammatory or immunomodulatory outcome. Assays are run with and without co-TNFa stimulation, in order to check for costimulatory or inhibitory activity.

[0957] Briefly, on day 1, 96-well black plates are set up with 1000 cells/well (NHDF) or 2000 cells/well (AOSMC) in 100 μl culture media. NHDF culture media contains: Clonetics FB basal media, 1 mg/ml hFGF, 5 mg/ml insulin, 50 mg/ml gentamycin, 2% FBS, while AoSMC culture media contains Clonetics SM basal media, 0.5 μg/mI hEGF, 5 mg/ml insulin, 1 ηg/ml hFGF, 50 mg/ml gentamycin, 50 μg/ml Amphotericin B, 5% FBS. After incubation at 37° C. for at least 4-5 hours culture media is aspirated and replaced with growth arrest media. Growth arrest media for NHDF contains fibroblast basal media, 50 mg/ml gentamycin, 2% FBS, while growth arrest media for AoSMC contains SM basal media, 50 mg/ml gentamycin, 50 μg/ml Amphotericin B, 0.4% FBS. Incubate at 37° C. until day 2.

[0958] On day 2, serial dilutions and templates of the polypeptide of interest are designed such that they always include media controls and known-protein controls. For both stimulation and inhibition experiments, proteins are diluted in growth arrest media. For inhibition experiments, TNFa is added to a final concentration of 2 ng/ml (NHDF) or 5 ng/ml (AoSMC). Add ⅓ vol media containing controls or polypepties of the present invention and incubate at 37 degrees C./5% CO₂ until day 5.

[0959] Transfer 60 μl from each well to another labeled 96-well plate, cover with a plate-sealer, and store at 4 degrees C. until Day 6 (for IL6 ELISA). To the remaining 100 μl in the cell culture plate, aseptically add Alamar Blue in an amount equal to 10% of the culture volume (10 μl). Return plates to incubator for 3 to 4 hours. Then measure fluorescence with excitation at 530 nm and emission at 590 nm using the CytoFluor. This yields the growth stimulation/inhibition data.

[0960] On day 5, the IL6 ELISA is performed by coating a 96 well plate with 50-100 ul/well of Anti-Human IL6 Monoclonal antibody diluted in PBS, pH 7.4, incubate ON at room temperature.

[0961] On day 6, empty the plates into the sink and blot on paper towels. Prepare Assay Buffer containing PBS with 4% BSA. Block the plates with 200 μl/well of Pierce Super Block blocking buffer in PBS for 1-2 hr and then wash plates with wash buffer (PBS, 0.05% Tween-20). Blot plates on paper towels. Then add 50 μl/well of diluted Anti-Human IL-6 Monoclonal, Biotin-labeled antibody at 0.50 mg/ml. Make dilutions of IL-6 stock in media (30, 10, 3, 1, 0.3, 0 ng/ml). Add duplicate samples to top row of plate. Cover the plates and incubate for 2 hours at RT on shaker.

[0962] Plates are washed with wash buffer and blotted on paper towels. Dilute EU-iabeled Streptavidin 1:1000 in Assay buffer, and add 100 μl/well. Cover the plate and incubate 1 h at RT. Plates are again washed with wash buffer and blotted on paper towels.

[0963] Add 100 μl/well of Enhancement Solution. Shake for 5 minutes. Read the plate on the Wallac DELFIA Fluorometer. Reading triplicate samples in each assay were tabulated and averaged.

[0964] A positive result in this assay suggests AOSMC cell proliferation and that the polypeptide of the present invention may be involved in dermal fibroblast proliferation and/or smooth muscle cell proliferation. A positive result also suggests many potential uses of polypeptides, polynucleotides, agonists and/or antagonists of the polynucleotide/polypeptide of the present invention which gives a positive result. For example, inflammation and immune responses, wound healing, and angiogenesis, as detailed throughout this specification. Particularly, polypeptides of the present invention and polynucleotides of the present invention may be used in wound healing and dermal regeneration, as well as the promotion of vasculogenesis, both of the blood vessels and lymphatics. The growth of vessels can be used in the treatment of, for example, cardiovascular diseases. Additionally, antagonists of polypeptides and polynucleotides of the invention may be useful in treating diseases, disorders, and/or conditions which involve angiogenesis by acting as an anti-vascular agent (e.g., anti-angiogenesis). These diseases, disorders, and/or conditions are known in the art and/or are described herein, such as, for example, malignancies, solid tumors, benign tumors, for example hemangiomas, acoustic neuromas, neurofibromas, trachomas, and pyogenic granulomas; artheroscleric plaques; ocular angiogenic diseases, for example, diabetic retinopathy, retinopathy of prematurity, macular degeneration, comeal graft rejection, neovascular glaucoma, retrolental fibroplasia, rubeosis, retinoblastoma, uvietis and Pterygia (abnormal blood vessel growth) of the eye; rheumatoid arthritis; psoriasis; delayed wound healing; endometriosis; vasculogenesis; granulations; hypertrophic scars (keloids); nonunion fractures; scleroderma; trachoma; vascular adhesions; myocardial angiogenesis; coronary collaterals; cerebral collaterals; arteriovenous malformations; ischemic limb angiogenesis; Osler-Webber Syndrome; plaque neovascularization; telangiectasia; hemophiliac joints; angiofibroma; fibromuscular dysplasia; wound granulation; Crohn's disease; and atherosclerosis. Moreover, antagonists of polypeptides and polynucleotides of the invention may be useful in treating anti-hyperproliferative diseases and/or anti-inflammatory known in the art and/or described herein.

[0965] One skilled in the art could easily modify the exemplified studies to test the activity of polynucleotides (e.g., gene therapy), antibodies, agonists, and/or antagonists and fragments and variants thereof.

### Example 32

### Cellular Adhesion Molecule (CAM) Expression on Endothelial Cells

[0966] The recruitment of lymphocytes to areas of inflammation and angiogenesis involves specific receptor-ligand interactions between cell surface adhesion molecules (CAMs) on lymphocytes and the vascular endothelium. The adhesion process, in both normal and pathological settings, follows a multi-step cascade that involves intercellular adhesion molecule-1 (ICAM-1), vascular cell adhesion molecule-1 (VCAM-1), and endothelial leukocyte adhesion molecule-1 (E-selectin) expression on endothelial cells (EC). The expression of these molecules and others on the vascular endothelium determines the efficiency with which leukocytes may adhere to the local vasculature and extravasate into the local tissue during the development of an inflammatory response. The local concentration of cytokines and growth factor participate in the modulation of the expression of these CAMs.

[0967] Briefly, endothelial cells (e.g., Human Umbilical Vein Endothelial cells (HUVECs)) are grown in a standard 96 well plate to confluence, growth medium is removed from the cells and replaced with 100 μl of 199 Medium (10% fetal bovine serum (FBS)). Samples for testing and positive or negative controls are added to the plate in triplicate (in 10 μl volumes). Plates are then incubated at 37° C. for either 5 h (selectin and integrin expression) or 24 h (integrin expression only). Plates are aspirated to remove medium and 100 μl of 0.1% paraformaldehyde-PBS(with Ca++ and Mg++) is added to each well. Plates are held at 4° C. for 30 min. Fixative is removed from the wells and wells are washed 1× with PBS(+Ca,Mg)+0.5% BSA and drained. 10 μl of diluted primary antibody is added to the test and control wells. Anti-ICAM-1-Biotin, Anti-VCAM-1-Biotin and Anti-E-selectin-Biotin are used at a concentration of 10 μg/ml (1:10 dilution of 0.1 mg/ml stock antibody). Cells are incubated at 37° C. for 30 min. in a humidified environment. Wells are washed three times with PBS(+Ca,Mg)+0.5% BSA. 20 μl of diluted ExtrAvidin-Alkaline Phosphatase (1:5,000 dilution, referred to herein as the working dilution) are added to each well and incubated at 37° C. for 30 min. Wells are washed three times with PBS(+Ca,Mg)+0.5% BSA. Dissolve 1 tablet of p-Nitrophenol Phosphate pNPP per 5 ml of glycine buffer (pH 10.4). 100 μl of pNPP substrate in glycine buffer is added to each test well. Standard wells in triplicate are prepared from the working dilution of the ExtrAvidin-Alkaline Phosphotase in glycine buffer: 1:5,000 (10⁰)>10^{-0.5}>10⁻¹>10^{-1.5}.05 μl of each dilution is added to triplicate wells and the resulting AP content in each well is 5.50 ng, 1.74 ng, 0.55 ng, 0.18 ng. 100 μl of pNNP reagent is then added to each of the standard wells. The plate is incubated at 37° C. for 4 h. A volume of 50 μl of 3M NaOH is added to all wells. The plate is read on a plate reader at 405 nm using the background subtraction option on blank wells filled with glycine buffer only. Additionally, the template is set up to indicate the concentration of AP-conjugate in each standard well [5.50 ng; 1.74 ng; 0.55 ng; 0.18 ng]. Results are indicated as amount of bound AP-conjugate in each sample.

### Example 33

### Alamar Blue Endothelial Cells Proliferation Assay

[0968] This assay may be used to quantitatively determine protein mediated inhibition of bFGF-induced proliferation of Bovine Lymphatic Endothelial Cells (LECs), Bovine Aortic Endothelial Cells (BAECs) or Human Microvascular Uterine Myometrial Cells (UTMECs). This assay incorporates a fluorometric growth indicator based on detection of metabolic activity. A standard Alamar Blue Proliferation Assay is prepared in EGM-2MV with 10 ng /ml of bFGF added as a source of endothelial cell stimulation. This assay may be used with a variety of endothelial cells with slight changes in growth medium and cell concentration. Dilutions of the protein batches to be tested are diluted as appropriate. Serum-free medium (GIBCO SFM) without bFGF is used as a non-stimulated control and Angiostatin or TSP-1 are included as a known inhibitory controls.

[0969] Briefly, LEC, BAECs or UTMECs are seeded in growth media at a density of 5000 to 2000 cells/well in a 96 well plate and placed at 37 degrees C. overnight. After the overnight incubation of the cells, the growth media is removed and replaced with GIBCO EC-SFM. The cells are treated with the appropriate dilutions of the protein of interest or control protein sample(s) (prepared in SFM) in triplicate wells with additional bFGF to a concentration of 10 ng/ml. Once the cells have been treated with the samples, the plate(s) is/are placed back in the 37° C. incubator for three days. After three days 10 ml of stock alamar blue (Biosource Cat# DAL1100) is added to each well and the plate(s) is/are placed back in the 37° C. incubator for four hours. The plate(s) are then read at 530 nm excitation and 590 nm emission using the CytoFluor fluorescence reader. Direct output is recorded in relative fluorescence units.

[0970] Alamar blue is an oxidation-reduction indicator that both fluoresces and changes color in response to chemical reduction of growth medium resulting from cell growth. As cells grow in culture, innate metabolic activity results in a chemical reduction of the immediate surrounding environment. Reduction related to growth causes the indicator to change from oxidized (non-fluorescent blue) form to reduced (fluorescent red) form (i.e., stimulated proliferation will produce a stronger signal and inhibited proliferation will produce a weaker signal and the total signal is proportional to the total number of cells as well as their metabolic activity). The background level of activity is observed with the starvation medium alone. This is compared to the output observed from the positive control samples (bFGF in growth medium) and protein dilutions.

### Example 34

### Detection of Inhibition of a Mixed Lymphocyte Reaction

[0971] This assay can be used to detect and evaluate inhibition of a Mixed Lymphocyte Reaction (MLR) by gene products (e.g., isolated polypeptides). Inhibition of a MLR may be due to a direct effect on cell proliferation and viability, modulation of costimulatory molecules on interacting cells, modulation of adhesiveness between lymphocytes and accessory cells, or modulation of cytokine production by accessory cells. Multiple cells may be targeted by these polypeptides since the peripheral blood mononuclear fraction used in this assay includes T, B and natural killer lymphocytes, as well as monocytes and dendritic cells.

[0972] Polypeptides of interest found to inhibit the MLR may find application in diseases associated with lymphocyte and monocyte activation or proliferation. These include, but are not limited to, diseases such as asthma, arthritis, diabetes, inflammatory skin conditions, psoriasis, eczema, systemic lupus erythematosus, multiple sclerosis, glomerulonephritis, inflammatory bowel disease, crohn's disease, ulcerative colitis, arteriosclerosis, cirrhosis, graft vs. host disease, host vs. graft disease, hepatitis, leukemia and lymphoma.

[0973] Briefly, PBMCs from human donors are purified by density gradient centrifugation using Lymphocyte Separation Medium (LSM®, density 1.0770 g/ml, Organon Teknika Corporation, West Chester, Pa.). PBMCs from two donors are adjusted to 2×10⁶ cells/ml in RPMI 1640 (Life Technologies, Grand Island, N.Y.) supplemented with 10% FCS and 2 mM glutamine. PBMCs from a third donor is adjusted to 2×10⁵ cells/ml. Fifly microliters of PBMCs from each donor is added to wells of a 96-well round bottom microtiter plate. Dilutions of test materials (50 μl) is added in triplicate to microtiter wells. Test samples (of the protein of interest) are added for final dilution of 1:4; rhuL-2 (R&D Systems, Minneapolis, Minn., catalog number 202-IL) is added to a final concentration of 1 μg/ml; anti-CD4 mAb (R&D Systems, clone 34930.11, catalog number MAB379) is added to a final concentration of 10 μg/ml. Cells are cultured for 7-8 days at 37° C. in 5% CO₂, and 1 μC of [³H] thymidine is added to wells for the last 16 hrs of culture. Cells are harvested and thymidine incorporation determined using a Packard TopCount. Data is expressed as the mean and standard deviation of triplicate determinations.

[0974] Samples of the protein of interest are screened in separate experiments and compared to the negative control treatment, anti-CD4 mAb, which inhibits proliferation of lymphocytes and the positive control treatment, IL-2 (either as recombinant material or supematant), which enhances proliferation of lymphocytes.

[0975] One skilled in the art could easily modify the exemplified studies to test the activity of polynucleotides (e.g., gene therapy), antibodies agonists, and/or antagonists and fragments and variants thereof.

### Example 35

### Assays for Protease Actvity

[0976] The following assay may be used to assess protease activity of the polypeptides of the invention.

[0977] Gelatin and casein zymography are performed essentially as described (Heusen et al., Anal. Biochem., 102: 196-202 (1980); Wilson et al., Journal of Urology, 149: 653-658 (1993)). Samples are run on 10% polyacryamide/0.1% SDS gels containing 1% gelain orcasein, soaked in 2.5% triton at room temperature for 1 hour, and in 0.1M glycine, pH 8.3 at 37° C. 5 to 16 hours. After staining in amido black areas of proteolysis apear as clear areas agains the blue-black background. Trypsin (Sigma T8642) is used as a positive control.

[0978] Protease activity is also determined by monitoring the cleavage of n-a-benzoyl-L-arginine ethyl ester (BAEE) (Sigma B4500. Reactions are set up in (25 mMNaPO₄,1 mM EDTA, and 1 mM BAEE), pH 7.5. Samples are added and the change in adsorbance at 260 nm is monitored on the Beckman DU-6 spectrophotometer in the time-drive mode. Trypsin is used as a positive control.

[0979] Additional assays based upon the release of acid-soluble peptides from casein or hemoglobin measured as adsorbance at 280 nm or colorimetrically using the Folin method are performed as described in Bergmeyer, et al., Methods of Enzymatic Analysis, 5 (1984). Other assays involve the solubilization of chromogenic substrates (Ward, Applied Science, 251-317 (1983)).

### Example 36

### Identifying Serine Protease Substrate Specificity

[0980] Methods known in the art or described herein may be used to determine the substrate specificity of the polypeptides of the present invention having serine protease activity. A preferred method of determining substrate specificity is by the use of positional scanning synthetic combinatonial libraries as described in GB 2 324 529 (incorporated herein in its entirety).

### Example 37

### Ligand Binding Assays

[0981] The following assay may be used to assess ligand binding activity of the polypeptides of the invention.

[0982] Ligand binding assays provide a direct method for ascertaining receptor pharmacology and are adaptable to a high throughput format. The purified ligand for a polypeptide is radiolabeled to high specific activity (50-2000 Ci/mmol) for binding studies. A determination is then made that the process of radiolabeling does not diminish the activity of the ligand towards its polypeptide. Assay conditions for buffers, ions, pH and other modulators such as nucleotides are optimized to establish a workable signal to noise ratio for both membrane and whole cell polypeptide sources. For these assays, specific polypeptide binding is defined as total associated radioactivity minus the radioactivity measured in the presence of an excess of unlabeled competing ligand. Where possible, more than one competing ligand is used to define residual nonspecific binding.

### Example 38

### Functional Assay in Xenopus Oocytes

[0983] Capped RNA transcripts from linearized plasmid templates encoding the polypeptides of the invention are synthesized in vitro with RNA polymerases in accordance with standard procedures. In vitro transcripts are suspended in water at a final concentration of 0.2 mg/mi Ovarian lobes are removed from adult female toads, Stage V defolliculated oocytes are obtained, and RNA transcripts (10 ng/oocytc) are injected in a 50 nl bolus using a microinjection apparatus. Two electrode voltage clamps are used to measure the currents from individual Xenopus oocytes in response polypeptides and polypeptide agonist exposure. Recordings are made in Ca2+ free Barth's medium at room temperature. The Xenopus system can be used to screen known ligands and tissue/cell extracts for activating ligands.

### Example 39

### Microphysiometric Assays

[0984] Activation of a wide variety of secondary messenger systems results in extrusion of small amounts of acid from a cell. The acid formed is largely as a result of the increased metabolic activity required to fuel the intracellular signaling process. The pH changes in the media surrounding the cell are very small but are detectable by the CYTOSENSOR microphysiometer (Molecular Devices Ltd., Menlo Park, Calif.). The CYTOSENSOR is thus capable of detecting the activation of polypeptide which is coupled to an energy utilizing intracellular signaling pathway.

### Example 40

### Extract/Cell Supernatant Screening

[0985] A large number of mammalian receptors exist for which there remains, as yet, no cognate activating ligand (agonist). Thus, active ligands for these receptors may not be included within the ligands banks as identified to date. Accordingly, the polypeptides of the invention can also be functionally screened (using calcium, cAMP, microphysiometer, oocyte electrophysiology, etc., functional screens) against tissue extracts to identify its natural ligands. Extracts that produce positive functional responses can be sequentially subfractionated until an activating ligand is isolated and identified.

### Example 41

### Calcium and cAMP Functional Assays

[0986] Seven transmembrane receptors which are expressed in HEK 293 cells have been shown to be coupled functionally to activation of PLC and calcium mobilization and/or cAMP stimulation or inhibition. Basal calcium levels in the HEK 293 cells in receptor-transfected or vector control cells were observed to be in the normal, 100 nM to 200 nM, range. HEK 293 cells expressing recombinant receptors are loaded with fura 2 and in a single day >150 selected ligands or tissue/cell extracts are evaluated for agonist induced calcium mobilization. Similarly, HEK 293 cells expressing recombinant receptors are evaluated for the stimulation or inhibition of cAMP production using standard cAMP quantitation assays. Agonists presenting a calcium transient or cAMP fluctuation are tested in vector control cells to determine if the response is unique to the transfected cells expressing receptor.

### Example 42

### ATP-Binding Assay

[0987] The following assay may be used to assess ATP-binding activity of polypeptides of the invention.

[0988] ATP-binding activity of the polypeptides of the invention may be detected using the ATP-binding assay described in U.S. Pat. No. 5,858,719, which is herein incorporated by reference in its entirety. Briefly, ATP-binding to polypeptides of the invention is measured via photoaffinity labeling with 8-azido-ATP in a competition assay. Reaction mixtures containing 1 mg/ml of the ABC transport protein of the present invention are incubated with varying concentrations of ATP, or the non-hydrolyzable ATP analog adenyl-5′-imidodiphosphate for 10 minutes at 4° C. A mixture of 8-azido-ATP (Sigma Chem. Corp., St. Louis, Mo.) plus 8-azido-ATP (³²P-ATP) (5 mCi/μmol, ICN, Irvine Calif.) is added to a final concentration of 100 μM and 0.5 ml aliquots are placed in the wells of a porcelain spot plate on ice. The plate is irradiated using a short wave 254 nm UV lamp at a distance of 2.5 cm from the plate for two one-minute intervals with a one-minute cooling interval in between. The reaction is stopped by addition of dithiothreitol to a final concentration of 2 mM. The incubations are subjected to SDS-PAGE electrophoresis, dried, and autoradiographed. Protein bands corresponding to the particular polypeptides of the invention are excised, and the radioactivity quantified. A decrease in radioactivity with increasing ATP or adenly-5′-imidodiphosphate provides a measure of ATP affinity to the polypeptides.

### Example 43

### Small Molecule Screening

[0989] This invention is particularly useful for screening therapeutic compounds by using the polypeptides of the invention, or binding fragments thereof, in any of a variety of drug screening techniques. The polypeptide or fragment employed in such a test may be affixed to a solid support, expressed on a cell surface, free in solution, or located intracellularly. One method of drug screening utilizes eukaryotic or prokaryotic host cells which are stably transformed with recombinant nucleic acids expressing the polypeptide or fragment. Drugs are screened against such transformed cells in competitive binding assays. One may measure, for example, the formulation of complexes between the agent being tested and polypeptide of the invention.

[0990] Thus, the present invention provides methods of screening for drugs or any other agents which affect activities mediated by the polypeptides of the invention. These methods comprise contacting such an agent with a polypeptide of the invention or fragment thereof and assaying for the presence of a complex between the agent and the polypeptide or fragment thereof, by methods well known in the art. In such a competitive binding assay, the agents to screen are typically labeled. Following incubation, free agent is separated from that present in bound form, and the amount of free or uncomplexed label is a measure of the ability of a particular agent to bind to the polypeptides of the invention.

[0991] Another technique for drug screening provides high throughput screening for compounds having suitable binding affinity to the polypeptides of the invention, and is described in great detail in European Patent Application 84/03564, published on Sep. 13, 1984, which is herein incorporated by reference in its entirety. Briefly stated, large numbers of different small molecule test compounds are synthesized on a solid substrate, such as plastic pins or some other surface. The test compounds are reacted with polypeptides of the invention and washed. Bound polypeptides are then detected by methods well known in the art. Purified polypeptides are coated directly onto plates for use in the aforementioned drug screening techniques. In addition, non-neutralizing antibodies may be used to capture the peptide and immobilize it on the solid support.

[0992] This invention also contemplates the use of competitive drug screening assays in which neutralizing antibodies capable of binding polypeptides of the invention specifically compete with a test compound for binding to the polypeptides or fragments thereof. In this manner, the antibodies are used to detect the presence of any peptide which shares one or more antigenic epitopes with a polypeptide of the invention.

### Example 44

### Phosphorylation Assay

[0993] In order to assay for phosphorylation activity of the polypeptides of the invention, a phosphorylation assay as described in U.S. Pat. No. 5,958,405 (which is herein incorporated by reference) is utilized. Briefly, phosphorylation activity may be measured by phosphorylation of a protein substrate using gamma-labeled ³²P-ATP and quantitation of the incorporated radioactivity using a gamma radioisotope counter. The polypeptides of the invention are incubated with the protein substrate, ³²P-ATP, and a kinase buffer. The ³²P incorporated into the substrate is then separated from free ³²P-ATP by electrophoresis, and the incorporated ³²P is counted and compared to a negative control. Radioactivity counts above the negative control are indicative of phosphorylation activity of the polypeptides of the invention.

### Example 45

### Detection of Phosphorylation Actvity (Acivadon) of the Polypeptides of the Invendon in the Presence of Polypeptide Ligands

[0994] Methods known in the art or described herein may be used to determine the phosphorylation activity of the polypeptides of the invention. A preferred method of determining phosphorylation activity is by the use of the tyrosine phosphorylation assay as described in U.S. Pat. No. 5,817,471 (incorporated herein by reference).

### Example 46

### Identification of Signal Transduction Proteins that Interact with Polypeptides of the Present Invention

[0995] The purified polypeptides of the invention are research tools for the identification, characterization and purification of additional signal transduction pathway proteins or receptor proteins. Briefly, labeled polypeptides of the invention are useful as reagents for the purification of molecules with which it interacts. In one embodiment of affinity purification, polypeptides of the invention are covalently coupled to a chromatography column. Cell-free extract derived from putative target cells, such as carcinoma tissues, is passed over the column, and molecules with appropriate affinity bind to the polypeptides of the invention. The protein complex is recovered from the column, dissociated, and the recovered molecule subjected to N-terminal protein sequencing. This amino acid sequence is then used to identify the captured molecule or to design degenerate oligonucleotide probes for cloning the relevant gene from an appropriate cDNA library.

### Example 47

### Assay for Phosphatase Activity

[0996] The following assay may be used to assess serine/threonine phosphatase (PTPase) activity of the polypeptides of the invention.

[0997] In order to assay for serine/threonine phosphatase (PTPase) activity, assays can be utilized which are widely known to those skilled in the art. For example, the serine/threonine phosphatase (PSPase) activity is measured using a PSPase assay kit from New England Biolabs, Inc. Myelin basic protein (MyBP), a substrate for PSPase, is phosphorylated on serine and threonine residues with cAMP-dependent Protein Kinase in the presence of [³²P]ATP. Protein serine/threonine phosphatase activity is then determined by measuring the release of inorganic phosphate from 32P-labeled MyBP.

### Example 48

### Interaction of Serine/Threonine Phosphatases with Other Proteins

[0998] The polypeptides of the invention with serine/threonine phosphatase activity as determined in Example 47 are research tools for the identification, characterization and purification of additional interacting proteins or receptor proteins, or other signal transduction pathway proteins. Briefly, labeled polypeptide(s) of the invention is useful as a reagent for the purification of molecules with which it interacts. In one embodiment of affinity purification, polypeptide of the invention is covalently coupled to a chromatography column. Cell-free extract derived from putative target cells, such as neural or liver cells, is passed over the column, and molecules with appropriate affinity bind to the polypeptides of the invention. The polypeptides of the invention-complex is recovered from the column, dissociated, and the recovered molecule subjected to N-temninal protein sequencing. This amino acid sequence is then used to identify the captured molecule or to design degenerate oligonucleotide probes for cloning the relevant gene from an appropriate cDNA library.

### Example 49

### Assaying for Heparanase Activity

[0999] In order to assay for heparanase activity of the polypeptides of the invention, the heparanase assay described by Vlodavsky et al is utilized (Vlodavsky, I., et al., Nat. Med., 5: 793-802 (1999)). Briefly, cell lysates, conditioned media or intact cells (1×10⁶ cells per 35-mm dish) are incubated for 18 hrs at 37° C., pH 6.2-6.6, with ³⁵S-labeled ECM or soluble ECM derived peak I proteoglycans. The incubation medium is centrifuged and the supematant is analyzed by gel filtration on a Sepharose CL-6B column (0.9×30 cm). Fractions are eluted with PBS and their radioactivity is measured. Degradation fragments of heparan sulfate side chains are eluted from Sepharose 6B at 0.5<Kₐᵥ<0.8 (peak II). Each experiment is done at least three times. Degradation fragments corresponding to “peak II,” as described by Vlodavsky et al., is indicative of the activity of the polypeptides of the invention in cleaving heparan sulfate.

### Example 50

### Immobilization of Biomolecules

[1000] This example provides a method for the stabilization of polypeptides of the invention in non-host cell lipid bilayer constucts (see, e.g., Bieri et al., Nature Biotech 17: 1105-1108 (1999), hereby incorporated by reference in its entirety herein) which can be adapted for the study of polypeptides of the invention in the various functional assays described above. Briefly, carbohydrate-specific chemistry for biotinylation is used to confine a biotin tag to the extracellular domain of the polypeptides of the invention, thus allowing uniform orientation upon immobilization. A 50 uM solution of polypeptides of the invention in washed membranes is incubated with 20 mM NalO4 and 1.5 mg/ml (4 mM) BACH or 2 mg/ml (7.5 mM) biotin-hydrazide for 1 hr at room temperature (reaction volume, 150 ul). Then the sample is dialyzed (Pierce Slidealizer Cassett, 10 kDa cutoff, Pierce Chemical Co., Rockford Ill.) at 4 C. first for 5 h, exchanging the buffer after each hour, and finally for 12 h against 500 ml buffer R (0.15 M NaCl, 1 mM MgCl2, 10 mM sodium phosphate, pH7). Just before addition into a cuvette, the sample is diluted 1:5 in buffer ROG50 (Buffer R supplemented with 50 mM octylglucoside).

### Example 51

### TAQMAN

[1001] Quantitative PCR (QPCR). Total RNA from cells in culture are extracted by Trizol separation as recommended by the supplier (LifeTechnologies). (Total RNA is treated with DNase I (Life Technologies) to remove any contaminating genomic DNA before reverse transcription.) Total RNA (50 ng) is used in a one-step, 50ul, RT-PCR, consisting of Taqman Buffer A (Perkin-Elmer; 50 mM KCl/10 mM Tris, pH 8.3), 5.5 mM MgCl₂, 240 μM each dNTP, 0.4 units RNase inhibitor(Promega), 8% glycerol, 0.012% Tween-20, 0.05% gelatin, 0.3 uM primers, 0.1 uM probe, 0.025 units Amplitaq Gold (Perkin-Elmer) and 2.5 units Superscript II reverse transcriptase (Life Technologies). As a control for genomic contamination, parallel reactions are setup without reverse transcriptase. The relative abundance of (unknown) and 18S RNAs are assessed by using the Applied Biosystems Prism 7700 Sequence Detection System (Livak, K. J., Flood, S. J., Marmaro, J., Giusti, W. & Deetz, K. (1995) PCR Methods Appl. 4, 357-362). Reactions are carried out at 48° C. for 30 min, 95° C. for 10 min, followed by 40 cycles of 95° C. for 15 s, 60° C. for 1 min. Reactions are performed in triplicate.

[1002] Primers (f & r) and FRET probes sets are designed using Primer Express Software (Perkin-Elmer). Probes are labeled at the 5′-end with the reporter dye 6-FAM and on the 3′-end with the quencher dye TAMRA (Biosource Intemational, Camarillo, Calif. or Perkin-Elmer).

### Example 52

### Assays for Metalloproteinase Activity

[1003] Metalloproteinases (EC 3.4.24.—) are peptide hydrolases which use metal ions, such as Zn²+, as the catalytic mechanism. Metalloproteinase activity of polypeptides of the present invention can be assayed according to the following methods.

Proteolysis of Alpha-2-Macroglobulin

[1004] To confirm protease activity, purified polypeptides of the invention are mixed with the substrate alpha-2-macroglobulin (0.2 unit/ml; Boehringer Mannheim, Germany) in 1× assay buffer (50 mM HEPES, pH 7.5, 0.2 M NaCl, 10 mM CaCl₂, 25 μM ZnCl₂ and 0.05% Brij-35) and incubated at 37° C. for 1-5 days. Trypsin is used as positive control. Negative controls contain only alpha-2-macroglobulin in assay buffer. The samples are collected and boiled in SDS-PAGE sample buffer containing 5% 2-mercaptoethanol for 5-min, then loaded onto 8% SDS-polyacrylamide gel. After electrophoresis the proteins are visualized by silver staining. Proteolysis is evident by the appearance of lower molecular weight bands as compared to the negative control.

Inhibition of Alpha-2-Macroglobulin Proteolysis by Inhibitors of Metalloproteinases

[1005] Known metalloproteinase inhibitors (metal chelators (EDTA, EGTA, AND HgCl₂), peptide metalloproteinase inhibitors (TIMP-1 and TIMP-2), and commercial small molecule MMP inhibitors) are used to characterize the proteolytic activity of polypeptides of the invention. The three synthetic MMP inhibitors used are: MMP inhibitor I, [IC₅₀=1.0 μM against MMP-1 and MMP-8; IC₅₀=30 μM against MMP-9; IC₅₀=150 μM against MMP-3]; MMP-3 (stromelysin-1) inhibitor I [IC₅₀=5 μM against MMP-3], and MMP-3 inhibitor II [Kᵢ=130 nM against MMP-3]; inhibitors available through Calbiochem, catalog # 444250, 444218, and 444225, respectively). Briefly, different concentrations of the small molecule MMP inhibitors are mixed with purified polypeptides of the invention (50 μg/ml) in 22.9 μl of 1× HEPES buffer (50 mM HEPES, pH 7.5, 0.2 M NaCl, 10 mM CaCl₂, 25 μM ZnCl₂ and 0.05% Brij-35) and incubated at room temperature (24° C.) for 2-hr, then 7.1 μl of substrate alpha-2-macroglobulin (0.2 unit/ml) is added and incubated at 37° C. for 20-hr. The reactions are stopped by adding 4× sample buffer and boiled immediately for 5 minutes. After SDS-PAGE, the protein bands are visualized by silver stain.

Synthetic Fluorogenic Peptide Substrates Cleavage Assay

[1006] The substrate specificity for polypeptides of the invention with demonstrated metalloproteinase activity can be determined using synthetic fluorogenic peptide substrates (purchased from BACHEM Bioscience Inc). Test substrates include, M-1985, M-2225, M-2105, M-2110, and M-2255. The first four are MMP substrates and the last one is a substrate of tumor necrosis factor-α (TNF-α) converting enzyme (TACE). All the substrates are prepared in 1:1 dimethyl sulfoxide (DMSO) and water. The stock solutions are 50-500 μM. Fluorescent assays are performed by using a Perkin Elmer LS 50B luminescence spectrometer equipped with a constant temperature water bath. The excitation λ is 328 nm and the emission λ is 393 nm. Briefly, the assay is carried out by incubating 176 μl 1 HEPES buffer (0.2 M NaCl, 10 mM CaCl₂, 10 mM CaCl₂, 0.05% Brij-35 and 50 mM HEPES, pH 7.5) with 4 μl of substrate solution (50 μM) at 25 ° C. for 15 minutes, and then adding 20 μl of a purified polypeptide of the invention into the assay cuvett. The final concentration of substrate is 1 μM.Initial hydrolysis rates are monitored for 30-min.

### Example 53

### Characterization of the cDNA Contained in a Deposited Plasmid

[1007] The size of the cDNA insert contained in a deposited plasmid may be routinely determined using techniques known in the art, such a PCR amplification using synthetic primers hybridizable to the 3′ and 5′ ends of the cDNA sequence. For example, two primers of 17-30 nucleotides derived from each end of the cDNA (i.e., hybridizable to the absolute 5′ nucleotide or the 3′ nucleotide end of the sequence of SEQ ID NO:X, respectively) are synthesized and used to amplify the cDNA using the deposited cDNA plasmid as a template. The polymerase chain reaction is carried out under routine conditions, for instance, in 25 ul of reaction mixture with 0.5 ug of the above cDNA template. A convenient reaction mixture is 1.5-5 mM MgCl₂, 0.01% (w/v) gelatin, 20 uM each of dATP, dCTP, dGTP, dTTP, 25 pmol of each primer and 0.25 Unit of Taq polymerase. Thirty five cycles of PCR (denaturation at 94 degree C. for 1 min; annealing at 55 degree C. for 1 min; elongation at 72 degree C. for 1 min) are performed with a Perkin-Elmer Cetus automated thermal cycler. The amplified product is analyzed by agarose gel electrophoresis. The PCR product is verified to be the selected sequence by subcloning and sequencing the DNA product. It will be clear that the invention may be practiced otherwise than as particularly described in the foregoing description and examples. Numerous modifications and variations of the present invention are possible in light of the above teachings and, therefore, are within the scope of the appended claims.

Incorporation by Reference

[1008] The entire disclosure of each document cited (including patents, patent applications, journal articles, abstracts, laboratory manuals, books, or other disclosures) in the Background of the Invention, Detailed Description, and Examples is hereby incorporated herein by reference. In addition, the sequence listing submitted herewith is incorporated herein by reference in its entirety. The specification and sequence listing of each of the following U.S. and PCT applications are herein incorporated by reference in their entirety: U.S. appln. Ser. No. 10/664,358 filed on 20 Sep. 2003, U.S. Appln. No. 60/040,162 filed on 7 Mar. 1997, U.S. Appln. No. 60/043,576 filed on 11 Apr. 1997, U.S. Appln. No. 60/047,601 filed on 23 May 1997, U.S. Appln. No. 60/056,845 filed on 22 Aug. 1997, U.S. Appln. No. 60/043,580 filed on 11 Apr. 1997, U.S. Appln. No. 60/047,599 filed on 23 May 1997, U.S. Appln. No. 60/056,664 filed on 22 Aug. 1997, U.S. Appln. No. 60/043,314 filed on 11 Apr. 1997, U.S. Appln. No. 60/047,632 filed on 23 May 1997, U.S. Appln. No. 60/056,892 filed on 22 Aug. 1997, U.S. Appln. No. 60,043,568 filed on 11 Apr. 1997, U.S. Appln. No. 60/047,595 filed on 23 May 1997, U.S. Appln. No. 60/056,632 filed on 22 Aug. 1997, U.S. Appln. No. 60/043,578 filed on 11 Apr. 1997, U.S. Appln. No. 60/040,333 filed on 7 Mar. 1997, U.S. Appln. No. 60/043,670 filed on 11 Apr. 1997, U.S. Appln. No. 60/047,596 filed on 23 May 1997, U.S. Appln. No. 60/056,864 filed on 22 Aug. 1997, U.S. Appln. No. 60/043,674 filed on 11 Apr. 1997, U.S. Appln. No. 60/047,612 filed on 23 May 1997, U.S. Appln. No. 60/056,631 filed on 22 Aug. 1997, U.S. Appln. No. 60,043,569 filed on 11 Apr. 1997, U.S. Appln. No. 60/047,588 filed on 23 May 1997, U.S. Appln. No. 60/056,876 filed on 22 Aug. 1997, U.S. Appln. No. 60/043,671 filed on 11 Apr. 1997, U.S. Appln. No. 60/043,311 filed on 11 Apr. 1997, U.S. Appln. 60/038,621 filed on 7 Mar. 1997, U.S. Appln. No. 60/043,672 filed on 11 Apr. 1997, U.S. Appln. No. 60/047,613 filed on 23 May 1997, U.S. Appln. No. 60,056,636 filed on 22 Aug. 1997, U.S. Appln. No. 60/043,669 filed on 11 Apr. 1997, U.S. Appln. No. 60/047,582 filed on 23 May 1997, U.S. Appln. No. 60,056,910 filed on 22 Aug. 1997, U.S. Appln. No. 60/043,315 filed on 11 Apr. 1997, U.S. Appln. No. 60/047,598 filed on 23 May 1997, U.S. Appln. No. 60/056,874 filed on 22 Aug. 1997, U.S. Appln. No. 60/043,312 filed on 11 Apr. 1997, U.S. Appln. No. 60/047,585 filed on 23 May 1997, U.S. Appln. No. 60/056,881 filed on 22 Aug. 1997, U.S. Appln. No. 60/043,313 filed on 11 Apr. 1997, U.S. Appln. No. 60/047,586 filed on 23 May 1997, U.S. Appln. No. 60/056,909 filed on 22 Aug. 1997, U.S. Appln. No. 60/040,161 filed on 7 Mar. 1997, U.S. Appln. No. 60/047,587 filed on 23 May 1997, U.S. Appln. No. 60/056,879 filed on 22 Aug. 1997, U.S. Appln. No. 60/047,500 filed on 23 May 1997, U.S. Appln. No. 60/056,880 filed on 22 Aug. 1997, U.S. Appln. No. 60/047,584 filed on 23 May. 1997, U.S. Appln. No. 60/056,894 filed on 22 Aug. 1997, U.S. Appln. No. 60/047,492 filed on 23 May 1997, U.S. Appln. No. 60/056,911 filed on 22 Aug. 1997, U.S. Appln. No. 60/040,626 filed on 7 Mar. 1997, U.S. Appln. No. 60/047,503 filed on 23 May. 1997, U.S. Appln. No. 60/056,903 filed on 22 Aug. 1997, U.S. Appln. No. 60/047,501 filed on 23 May 1997, U.S. Appln. No. 60/056,637 filed on 22, Aug. 1997, U.S. Appln. No. 60/047,590 filed on 23 May 1997, U.S. Appln. No. 60/056,875 filed on 22 Aug. 1997, U.S. Appln. No. 60/047,581 filed on 23 May. 1997, U.S. Appln. No. 60/056,882 filed on 22 Aug. 1997, U.S. Appln. No. 60/047,592 filed on 23 May 1997, U.S. Appln. No. 60/056,888 filed on 22 Aug. 1997, U.S. Appln. No. 60/040,334 filed on 7, Mar. 1997, U.S. Appln. No. 60/047,618 filed on 23 May. 1997, U.S. Appln. No. 60/056,872 filed on 22 Aug. 1997, U.S. Appln. No. 60/047,617 filed on 23 May 1997, U.S. Appln. No. 60/056,662 filed on 22 Aug. 1997, U.S. Appln. No. 60/047,589 filed on 23 May. 1997, U.S. Appln. No. 60/056,862 filed on 22 Aug. 1997, U.S. Appln. No. 60/047,594 filed on 23 May 1997, U.S. Appln. No. 60/056,884 filed on 22 Aug. 1997, U.S. Appln. No. 60/047,583 filed on 23 May 1997, U.S. Appln. No. 60/056,878 filed on 22 Aug. 1997, U.S. Appln. No. 60/040,336 file on 7 Mar. 1997, U.S. Appln. No. 60/047,502 filed on 23 May 1997, U.S. Appln. No. 60/056,893 filed on 22 Aug. 1997, U.S. Appln. No. 60/047,633 filed on 23 May 1997, U.S. Appln. No. 60/056,630 filed on 22 Aug. 1997, U.S. Appln. No. 60/047,593 filed on 23 May 1997, U.S. Appln. No. 60/056,887 filed on 22 Aug. 1997, U.S. Appln. No. 60/040,163 filed on 7 Mar. 1997, U.S. Appln. No. 60/047,597 filed on 23 May 1997, U.S. Appln. No. 60/056,889 filed on 22 Aug. 1997, U.S. Appln. No. 60/047,615 filed on 23 May 1997, U.S. Appln. No. 60/056,877 filed on 22 Aug. 1997, U.S. Appln. No. 60/047,600 filed on 23 May 1997, U.S. Appln. No. 60/056,886 filed on 22 Aug. 1997, U.S. Appln. No. 60/047,614 filed on 23 May 1997, U.S. Appln. No. 60/056,908 filed on 22 Aug. 1997, U.S. Appln. No. 60/040,710 filed on 14 Mar. 1997, U.S. Appln. No. 60/050,934 filed on 30 May 1997, U.S. Appln. No. 60/048,100 filed on 30 May 1997, U.S. Appln. No. 60/040,762 filed on 14 Mar. 1997, U.S. Appln. No. 60/048,357 filed on 30 May 1997, U.S. Appln. No. 60/048,189 filed on 30 May 1997, U.S. Appln. No. 60/041,277 filed on 21 Mar. 1997, U.S. Appln. No. 60/048,188 filed on 30 May 1997, U.S. Appln. No. 60/048,094 filed on 30 May 1997, U.S. Appln. No. 60/048,350 filed on 30 May 1997, U.S. Appln. No. 60/048,135 filed on 30 May 1997, U.S. Appln. No. 60/042,344 filed on 21 Mar. 1997, U.S. Appln. No. 60/048,187 filed on 30 May 1997, U.S. Appln. No. 60/048,099 filed on 30 May 1997, U.S. Appln. No. 60/050,937 filed on 30 may, 1997, U.S. Appln. No. 60/048,352 filed on 30 May 1997, U.S. Appln. No. 60/041,276 filed on 21 Mar. 1997, U.S. Appln. No. 60/048,069, filed on 30 May 1997, U.S. Appln. No. 60/048,131 filed on 30 May 1997, U.S. Appln. No. 60/048,186 filed on 30 May 1997, U.S. Appln. No. 60/048,095 filed on 30 May 1997, U.S. Appln. No. 60/041,281 filed on 21 Mar. 1997, U.S. Appln. No. 60/048,355 filed on 30 May 1997, U.S. Appln. No. 60/048,096 filed on 30 May 1997, U.S. Appln. No. 60/048,351 filed on 30 May 1997, U.S. Appln. No. 60/048,154 filed on 30 May 1997, U.S. Appln. No. 60/048,160 filed on 30 May 1997, U.S. Appln. No. 60/042,825 filed on 8 Apr. 1997, U.S. Appln. No. 60/048,070 filed on 30 May 1997, U.S. Appln. No. 60/042,727 filed on 8 Apr. 1997, U.S. Appln. No. 60/048,068 filed on 30 May 1997, U.S. Appln. No. 60/042,726 filed on 8 Apr. 1997, U.S. Appln. No. 60/048,184 filed on 30 May 1997, U.S. Appln. No. 60/042,728 filed on 8 Apr. 1997, U.S. Appln. No. 60/042,754 filed on 8 Apr. 1997, U.S. Appln. No. 60/048,190 filed on 30 May 1997, U.S. Appln. No. 60/044,039 filed on 30 May 1997, U.S. Appln. No. 60/048,093 filed on 30 May 1997, U.S. Appln. No. 60/048,885 filed on 6 Jun. 1997, U.S. Appln. No. 60/057,645 filed on 5 Sep. 1997, U.S. Appln. No. 60/049,375 filed on 6 Jun. 1997, U.S. Appln. No. 60/057,642 filed on 5 Sep. 1997, U.S. Appln. No. 60/048,881 filed on 6 Jun. 1997, U.S. Appln. No. 60/057,668 filed on 5 Sep. 1997, U.S. Appln. No. 60/048,880 filed on 6 Jun. 1997, U.S. Appln. No. 60/057,635 filed on 5 Sep. 1997, U.S. Appln. No. 60/048,896 filed on 6 Jun. 1997, U.S. Appln. No. 60/057,627 filed on 5 Sep. 1997, U.S. Appln. No. 60/049,020 filed on 6 Jun. 1997, U.S. Appln. No. 60/057,667 filed on 5 Sep. 1997, U.S. Appln. No. 60/048,876 filed on 6 Jun. 1997, U.S. Appln. No. 60/057,666 filed on 5 Sep. 1997, U.S. Appln. No. 60/048,895 filed on 6 Jun. 1997, U.S. Appln. No. 60/057,764 filed on 5 Sep. 1997, U.S. Appln. No. 60/048,884 filed on 6 Jun. 1997, U.S. Appln. No. 60/057,643 filed on 5 Sep. 1997, U.S. Appln. No. 60/048,894 filed on 6 Jun. 1997, U.S. Appln. No. 60/057,769 filed on 5 Sep. 1997, U.S. Appln. No. 60/048,971 filed on 6 Jun. 1997, U.S. Appln. No. 60/057,763 filed on 5 Sep. 1997, U.S. Appln. No. 60/048,964 filed on 6 Jun. 1997, U.S. Appln. No. 60/057,650 filed on 5 Sep. 1997, U.S. Appln. No. 60,048,882 filed on 6 Jun. 1997, U.S. Appln. No. 60/057,584 filed on 5 Sep. 1997, U.S. Appln. No. 60/048,899 filed on 6 Jun. 1997, U.S. Appln. No. 60/057,647 filed on 5 Sep. 1997, U.S. Appln. No. 60/048,893 filed on 6 Jun. 1997, U.S. Appln. No. 60/057,661 filed on 5 Sep. 1997, U.S. Appln. No. 60/048,900 filed on 6 Jun. 1997, U.S. Appln. No. 60/057,662 filed on 5 Sep. 1997, U.S. Appln. No. 60,048,901 filed on 6 Jun. 1997, U.S. Appln. No. 60/057,646 filed on 5 Sep. 1997, U.S. Appln. No. 60/048,892 filed on 6 Jun. 1997, U.S. Appln. No. 60/057.654 filed on 5 Sep. 1997, U.S. Appln. No. 60/048,915 filed on 6 Jun. 1997, U.S. Appln. No. 60/057,651 filed on 5 Sep. 1997, U.S. Appln. No. 60/049,019 filed on 6 Jun. 1997, U.S. Appln. No. 60/057,644 filed on 5 Sep. 1997, U.S. Appln. No. 60/048,970 filed on 6 Jun. 1997, U.S. Appln. No. 60/057,765 filed on 5 Sep. 1997, U.S. Appln. No. 60/048,972 filed on 6 Jun. 1997, U.S. Appln. No. 60/057,762 filed on 5 Sep. 1997, U.S. Appln. No. 60/048,916 filed on 6 Jun. 1997, U.S. Appln. No. 60/057,775 filed on 5 Sep. 1997, U.S. Appln. No. 60/049,373 filed on 6 Jun. 1997, U.S. Appln. No. 60/057,648 filed on 5 Sep. 1997, U.S. Appln. No. 60/048,875 filed on 6 Jun. 1997, U.S. Appln. No. 60/057,774 filed on 5 Sep. 1997, U.S. Appln. No. 60/049,374 filed on 6 Jun. 1997, U.S. Appln. No. 60/057,649 filed on 5 Sep. 1997, U.S. Appln. No. 60,048,917 filed on 6 Jun. 1997, U.S. Appln. No. 60/057,770 filed on 5 Sep. 1997, U.S. Appln. No. 60/048,949 filed on 6 Jun. 1997, U.S. Appln. No. 60/057,771 filed on 5 Sep. 1997, U.S. Appln. No. 60/048,974 filed on 6 Jun. 1997, U.S. Appln. No. 60/057,761 filed on 5, Sep. 1997, U.S. Appln. No. 60/048,883 filed on 6 Jun. 1997, U.S. Appln. No. 60/057,760 filed on 5 Sep. 1997, U.S. Appln. No. 60/048,897 filed on 6 Jun. 1997, U.S. Appln. No. 60/057,776 filed on 5 Sep. 1997, U.S. Appln. No. 60/048,898 filed on 6 Jun. 1997, U.S. Appln. No. 60,057,778 filed on 5 Sep. 1997, U.S. Appln. No. 60/048,962 filed on 6 Jun. 1997, U.S. Appln. No. 60/057,629 filed on 5 Sep. 1997, U.S. Appln. No. 60/048,963 filed on 6 Jun. 1997, U.S. Appln. No. 60/057,628 filed on 5 Sep. 1997, U.S. Appln. No. 60/048,877 filed on 6 Jun. 1997, U.S. Appln. No. 60/057,777 filed on 5 Sep. 1997, U.S. Appln. No. 60/048,878 filed on 6 Jun. 1997, U.S. Appln. No. 60/057,634 filed on 5 Sep. 1997, U.S. Appln. No. 60/049,608 filed on 13 Jun. 1997, U.S. Appln. No. 60/058,669 filed on 12 Sep. 1997, U.S. Appln. No. 60/049,556 filed on 13 Jun. 1997, U.S. Appln. No. 60/058,668 filed on 12 Sep. 1997, U.S. Appln. No. 60/052,989 filed on 13 Jun. 1997, U.S. Appln. No. 60,058,750 filed on 12 Sep. 1997, U.S. Appln. No. 60/049,607 filed on 13 Jun. 1997, U.S. Appln. No. 60/058,665 filed on 12 Sep. 1997, U.S. Appln. No. 60/049,611 filed on 13 Jun. 1997, U.S. Appln. No. 60/058,971 filed on 12 Sep. 1997, U.S. Appln. No. 60/050,901 filed on 13 Jun. 1997, U.S. Appln. No. 60/058,972 filed on 12 Sep. 1997, U.S. Appln. No. 60/049,609 filed on 13 Jun. 1997, U.S. Appln. No. 60/058,975 filed on 12 Sep. 1997, U.S. Appln. No. 60/048,356 filed on 30 May 1997, U.S. Appln. No. 60/056,296 filed on 29 Aug. 1997, U.S. Appln. No. 60/048,101 filed on 30 May 1997, U.S. Appln. No. 60/056,293 filed on 29 Aug. 1997, U.S. Appln. No. 60/050,935 filed on 30 May 1997, U.S. Appln. No. 60,056,250 filed on 29 Aug. 1997, U.S. Appln. No. 60/049,610 filed on 13 Jun. 1997, U.S. Appln. No. 60/061,060 filed on 2 Oct. 1997, U.S. Appln. No. 60/049,606 filed on 13 Jun. 1997, U.S. Appln. No. 60/060,841 filed on 2 Oct. 1997, U.S. Appln. No. 60/049,550 filed on 13 Jun. 1997, U.S. Appln. No. 60/060,834 filed on 2 Oct. 1997, U.S. Appln. No. 60/049,549 filed on 13 Jun. 1997, U.S. Appln. No. 60/060,865 filed on 2 Oct. 1997, U.S. Appln. No. 60/049,548 filed on 13 Jun. 1997, U.S. Appln. No. 60/060,844 filed on 2 Oct. 1997, U.S. Appln. No. 60/049547 filed on 13 Jun. 1997, U.S. Appln. No. 60/061,059 filed on 2 Oct. 1997, U.S. Appln. No. 60/051,381 filed on 1 Jul. 1997, U.S. Appln. No. 60/058,598 filed on 12 Sep. 1997, U.S. Appln. No. 60/051,480 filed on 1 Jul. 1997, U.S. Appln. No. 60/058,663 filed on 12 Sep. 1997, U.S. Appln. No. 60/051,926 filed on 8 Jul. 1997, U.S. Appln. No. 60/058,785 filed on 12 Sep. 1997, U.S. Appln. No. 60/052,793 filed 8 Jul. 1997, U.S. Appln. No. 60/058,664 filed on 12 Sep. 1997, U.S. Appln. No. 60/051,925 filed on 8 Jul. 1997, U.S. Appln. No. 60/058,660 filed on 12 Sep. 1997, U.S. Appln. No. 60/051,929 filed on 8 Jul. 1997, U.S. Appln. No. 60/058,661 filed on 12 Sep. 1997, U.S. Appln. No. 60/055,723 filed on 8 Jul. 1997, U.S. Appln. No. 60/055,722 filed on 18 Aug. 1997, U.S. Appln. No. 60/052,732 filed on 8 Jul. 1997, U.S. Appln. No. 60/055,723 filed on 18 Aug. 1997, U.S. Appln. No. 60/051,932 filed on 8 Jul. 1997, U.S. Appln. No. 60/055,948 filed on 18 Aug. 1997, U.S. Appln. No. 60/051,931 filed on 8 Jul. 1997, U.S. Appln. No. 60/055,949 filed on 18 Aug. 1997, U.S. Appln. No. 60/051,916 filed on 8 Jul. 1997, U.S. Appln. No. 60/055,953 filed on 18 Aug. 1997, U.S. Appln. No. 60/051,930 filed on 8 Jul. 1997, U.S. Appln. No. 60/055,950 filed on 18 Aug. 1997, U.S. Appln. No. 60/051,918 filed on 8 Jul. 1997, U.S. Appln. No. 60/055,947 filed on 18 Aug. 1997, U.S. Appln. No. 60/051,920 filed on 8 Jul. 1997, U.S. Appln. No. 60/055,964 filed on 18 Aug. 1997, U.S. Appln. No. 60/052,733 filed on 8 Jul. 1997, U.S. Appln. No. 60/056,360 filed on 18 Aug. 1997, U.S. Appln. No. 60/052,795 filed on 8 Jul. 1997, U.S. Appln. No. 60/055,684 filed on 18 Aug. 1997, U.S. Appln. No. 60/051,919 filed on 8 Jul. 1997, U.S. Appln. No. 60/055,984 filed on 18 Aug. 1997, U.S. Appln. No. 60/051,928 filed on 8 Jul. 1997, U.S. Appln. No. 60/055,954 filed on 18 Aug. 1997, U.S. Appln. No. 60/052,870 filed on 16 Jul. 1997, U.S. Appln. No. 60/055,952 filed on 18 Aug. 1997, U.S. Appln. No. 60/052,871 filed on 16 Jul. 1997, U.S. Appln. No. 60/055,725 filed on 18 Aug. 1997, U.S. Appln. No. 60/052,872 filed on 16 Jul. 1997, U.S. Appln. No. 60/056,359 filed on 18 Aug. 1997, U.S. Appln. No. 60/052,661 filed on 16 Jul. 1997, U.S. Appln. No. 60/056,985 filed on 18 Aug. 1997, U.S. Appln. No. 60/052,874 filed on 16 Jul. 1997, U.S. Appln. No. 60/055,724 filed on 18 Aug. 1997, U.S. Appln. No. 60/052,873 filed on 16 Jul. 1997, U.S. Appln. No. 60/055,726 filed on 18 Aug. 1997, U.S. Appln. No. 60/052,875 filed on 16 Jul. 1997, U.S. Appln. No. 60/056,361 filed on 18 Aug. 1997, U.S. Appln. No. 60/053,440 filed on 22 Jul. 1997, U.S. Appln. No. 60/055,989 filed on 18 Aug. 1997, U.S. Appln. No. 60/053,441 filed on 22 Jul. 1997, U.S. Appln. No. 60/055,946 filed on 18 Aug. 1997, U.S. Appln. No. 60/053,442 filed on 22 Jul. 1997, U.S. Appln. No. 60/055,683 filed on 18 Aug. 1997, U.S. Appln. No. 60/054,212 filed on 30 Jul. 1997, U.S. Appln. No. 60/055,968 filed on 18 Aug. 1997, U.S. Appln. No. 60/054,209 filed on 30 Jul. 1997, U.S. Appln. No. 60/055,972 filed on 18 Aug. 1997, U.S. Appln. No. 60/054,234 filed on 30 Jul. 1997, U.S. Appln. No. 60/055,969 filed on 18 Aug. 1997, U.S. Appln. No. 60/055,386 filed on 5 Aug. 1997, U.S. Appln. No. 60/055,986 filed on 18 Aug. 1997, U.S. Appln. No. 60/054,807 filed on 5 Aug. 1997, U.S. Appln. No. 60/055,970 filed on 18 Aug. 1997, U.S. Appln. No. 60/054,215 filed on 30 Jul. 1997, U.S. Appln. No. 60/056,543 filed on 19 Aug. 1997, U.S. Appln. No. 60/054,218 filed on 30 Jul. 1997, U.S. Appln. No. 60/056,561 filed on 19 Aug. 1997, U.S. Appln. No. 60/054,214 filed on 30 Jul. 1997, U.S. Appln. No. 60/056,534 filed on 19 Aug. 1997, U.S. Appln. No. 60/054,236 filed on 30 Jul. 1997, U.S. Appln. No. 60/056,729 filed on 19 Aug. 1997, U.S. Appln. No. 60/054,213 filed on 30 Jul. 1997, U.S. Appln. No. 60/056,727 filed on 19 Aug. 1997, U.S. Appln. No. 60/054,211 filed on 30 Jul. 1997, U.S. Appln. No. 60/056,554 filed on 19 Aug. 1997, U.S. Appln. No. 60/054,217 filed on 30 Jul. 1997, U.S. Appln. No. 60/056,730 filed on 19 Aug. 1997, U.S. Appln. No. 60/055,312 filed on 5 Aug. 1997, U.S. Appln. No. 60/056,563 filed on 19 Aug. 1997, U.S. Appln. No. 60/055,309 filed on 5 Aug. 1997, U.S. Appln. No. 60/056,557 filed on 19 Aug. 1997, U.S. Appln. No. 60/055,310 filed on 5 Aug. 1997, U.S. Appln. No. 60/056,371 filed on 19 Aug. 1997, U.S. Appln. No. 60/054,798 filed on 5 Aug. 1997, U.S. Appln. No. 60/056,732 filed on 19 Aug. 1997, U.S. Appln. No. 60/056,369 filed on 19 Aug. 1997, U.S. Appln. No. 60/056,535 filed on 19 Aug. 1997, U.S. Appln. No. 60/056,556 filed on 19 Aug. 1997, U.S. Appln. No. 60/056,555 filed on 19 Aug. 1997, U.S. Appln. No. 60/054,806 filed on 5 Aug. 1997, U.S. Appln. No. 60/056,366 filed on 19, Aug. 1997, U.S. Appln. No. 60/054,809 filed on 5 Aug. 1997, U.S. Appln. No. 60/056,364 filed on 19 Aug. 1997, U.S. Appln. No. 60,054,804 filed on 5 Aug. 1997, U.S. Appln. No. 60/056,370 filed on 19 Aug. 1997, U.S. Appln. No. 60/054,803 filed on 5-Aug. 1997, U.S. Appln. No. 60/056,731 filed on 19 Aug. 1997, U.S. Appln. No. 60/055,311 filed on 5 Aug. 1997, U.S. Appln. No. 60/056,365 filed on 19 Aug. 1997, U.S. Appln. No. 60/054,808 filed on 5 Aug. 1997, U.S. Appln. No. 60/056,367 filed on 19 Aug. 1997, U.S. Appln. No. 60/056,726 filed on 19 Aug. 1997, U.S. Appln. No. 60/056,368 filed on 19 Aug. 1997, U.S. Appln. No. 60/056,728 filed on 19 Aug. 1997, U.S. Appln. No. 60/056,628 filed on 19 Aug. 1997, U.S. Appln. No. 60/056,629 filed on 19 Aug. 1997, U.S. Appln. No. 60/056,270 filed on 29 Aug. 1997, U.S. Appln. No. 60/056,271 filed on 29 Aug. 1997, U.S. Appln. No. 60/056,247 filed on 29 Aug. 1997, U.S. Appln. No. 60/056,073 filed on 29 Aug. 1997, U.S. Appln. No. 60/057,669 filed on 5 Sep. 1997, U.S. Appln. No. 60/057,663 filed on 5 Sep. 1997, U.S. Appln. No. 60/057,626 filed on 5 Sep. 1997, U.S. Appln. No. 60/058,666 filed on 12 Sep. 1997, U.S. Appln. No. 60/058,973 filed on 12 Sep. 1997, U.S. Appln. No. 60/058,974 filed on 12 Sep. 1997, U.S. Appln. No. 60/058,667 filed on 12 Sep. 1997, U.S. Appln. No. 60/060,837 filed on 2 Oct. 1997, U.S. Appln. No. 60/060,862, filed on 2 Oct. 1997, U.S. Appln. No. 60/060,839 filed on 2 Oct. 1997, U.S. Appln. No. 60/060,866 filed on 2 Oct. 1997, U.S. Appln. No. 60/060,843 filed on 2 Oct. 1997, U.S. Appln. No. 60/060,836 filed on 2 Oct. 1997, U.S. Appln. No. 60/060,838 filed on 2 Oct. 1997, U.S. Appln. No. 60/060,874 filed on 2 Oct. 1997, U.S. Appln. No. 60/060,833 filed on 2 Oct. 1997, U.S. Appln. No. 60/060,884 filed on 2 Oct. 1997, U.S. Appln. No. 60/060,880 filed on 2 Oct. 1997, U.S. Appln. No. 60/061,463 filed on 9 Oct. 1997, U.S. Appln. No. 60/061,529 filed on 9 Oct. 1997, U.S. Appln. No. 60/071,498 filed on 9 Oct. 1997, U.S. Appln. No. 60/061,527 filed on 9 Oct. 1997, U.S. Appln. No. 60/061,536 filed on 9 Oct. 1997, U.S. Appln. No. 60/061,532 filed on 9 Oct. 1997, U.S. Appln. No. 60/063,099 filed on 24 Oct. 1997, U.S. Appln. No. 60,063,088 filed on 24 Oct. 1997, U.S. Appln. No. 60/063,100 filed on 24 Oct. 1997, U.S. Appln. No. 60/063,387 filed on 24 Oct. 1997, U.S. Appln. No. 60/063,148 filed on 24 Oct. 1997, U.S. Appln. No. 60/063,386 filed on 24 Oct. 1997, U.S. Appln. No. 60/062,784 filed on 24 Oct. 1997, U.S. Appln. No. 60/063,091 filed on 24 Oct. 1997, U.S. Appln. No. 60/063,090 filed on 24 Oct. 1997, U.S. Appln. No. 60/063,089 filed on 24 Oct. 1997, U.S. Appln. No. 60/063,092 filed on 24 Oct. 1997, U.S. Appln. No. 60/063,111 filed on 24 Oct. 1997, U.S. Appln. No. 60/-63,101 filed on 24 Oct. 1997, U.S. Appln. No. 60/063,109 filed on 24 Oct. 1997, U.S. Appln. No. 60/063,110 filed on 24 Oct. 1997, U.S. Appln. No. 60/063,098 filed on 24 Oct. 1997, U.S. Appln. No. 60/063,097 filed on 24 Oct. 1997, U.S. Appln. No. 60/064,911 filed on 7 Nov. 1997, U.S. Appln. No. 60/064,912 filed on 7 Nov. 1997, U.S. Appln. No. 60/064,983 filed on 7 Nov. 1997, U.S. Appln. No. 60/064,900 filed on 7 Nov. 1997, U.S. Appln. No. 60/064,988 filed on 7 Nov. 1997, U.S. Appln. No. 60/064,987 filed on 7 Nov. 1997, U.S. Appln. No. 60/064,908 filed on 7 Nov. 1997, U.S. Appln. No. 60/064,984 filed on 7 Nov. 1997, U.S. Appln. No. 60/064,985 filed on 7 Nov. 1997, U.S. Appln. No. 60/066,094 filed on 17 Nov. 1997, U.S. Appln. No. 60/066,100 filed on 17 Nov. 1997, U.S. Appln. No. 60/066,089 filed on 17 Nov. 1997, U.S. Appln. No. 60/066,095 filed on 17 Nov. 1997, U.S. Appln. No. 60/066,090 filed on 17 Nov. 1997, U.S. Appln. No. 60/068,006 filed on 18 Dec. 1997, U.S. Appln. No. 60/068,057 filed on 18 Dec. 1997, U.S. Appln. No. 60/068,007 filed on 18 Dec. 1997, U.S. Appln. No. 60/068,008 filed on 18 Dec. 1997, U.S. Appln. No. 60/068,054 filed on 18 Dec. 1997, U.S. Appln. No. 60/068,064 filed on 18 Dec. 1997, U.S. Appln. No. 60/068,053 filed on 18 Dec. 1997, U.S. Appln. No. 60/070,923 filed on 18 Dec. 1997, U.S. Appln. No. 60/068,365 filed on 19 Dec. 1997, U.S. Appln. No. 60/068,169 filed on 19 Dec. 1997, U.S. Appln. No. 60/068,367 filed on 19 Dec. 1997, U.S. Appln. No. 60/068,369 filed on 19 Dec. 1997, U.S. Appln. No. 60/068,368 filed on 19 Dec. 1997, U.S. Appln. No. 60/070,657 filed on 7 Jan. 1998, U.S. Appln. No. 60/070,692 filed on 7 Jan. 1998, U.S. Appln. No. 60/070,704 filed on 7 Jan. 1998, U.S. Appln. No. 60/070,658 filed on 7 Jan. 1998, U.S. Appln. No. 60/073,160 filed on 30 Jan. 1998, U.S. Appln. No. 60/073,159 filed on 30 Jan. 1998, U.S. Appln. No. 60/073,165 filed on 30 Jan. 1998, U.S. Appln. No. 60/073,164 filed on 30 Jan. 1998, U.S. Appln. No. 60/073,167 filed on 30 Jan. 1998, U.S. Appln. No. 60/073,162 filed on 30 Jan. 1998, U.S. Appln. No. 60/073,161 filed on 30 Jan. 1998, U.S. Appln. No. 60/073,170 filed on 30 Jan. 1998, U.S. Appln. No. 60/074,141 filed on 9 Feb. 1998, U.S. Appln. No. 50/074,341 filed on 9 Feb. 1998, U.S. Appln. No. 60/074,037 filed on 9 Feb. 1998, U.S. Appln. No. 60/074,157 filed on 9 Feb. 1998, U.S. Appln. No. 60/074,118 filed on 9 Feb. 1998, U.S. Appln. No. 60/076,051 filed on 26 Feb. 1998, U.S. Appln. No. 60/076,053 filed on 26 Feb. 1998, U.S. Appln. No. 60/076,054 filed on 26 Feb. 1998, U.S. Appln. No. 60/076,052 filed on 26 Feb. 1998, U.S. Appln. No. 60/076,057 filed on 26 Feb. 1998, U.S. Appln. No. 60/077,714 filed on 12 Mar. 1998, U.S. Appln. No. 60/077,687 filed on 12 Mar. 1998, U.S. Appln. No. 60/077,686 filed on 12 Mar. 1998, U.S. Appln. No. 60/077,696 filed on 12 Mar. 1998, U.S. Appln. No. 60/078,566 filed on 19 Mar. 1998, U.S. Appln. No. 60/078,574 filed on 19 Mar. 1998, U.S. Appln. No. 60/078,576 filed on 19 Mar. 1998, U.S. Appln. No. 60/078,579 filed on 19 Mar. 1998, U.S. Appln. No. 60/078,563 filed on 19 Mar. 1998, U.S. Appln. No. 60/078,573 filed on 19 Mar. 1998, U.S. Appln. No. 60/078,578 filed on 19 Mar. 1998, U.S. Appln. No. 60/078,581 filed on 19 Mar. 1998, U.S. Appln. No. 60/078,577 filed on 19 Mar. 1998, U.S. Appln. No. 60/080,314 filed on 1 Apr. 1998, U.S. Appln. No. 60/080,312 filed on 1 Apr. 1998, U.S. Appln. No. 60/080,313 filed on 1 Apr. 1998, U.S. Appln. No. 60/085,180 filed on 12 May 1998, U.S. Appln. No. 60/085,105 filed on 12 May 1998, U.S. Appln. No. 60/085,094 filed on 12 May 1998, U.S. Appln. No. 60/085,093 filed on 12 May 1998, U.S. Appln. No. 60/085,924 filed on 18 May 1998, U.S. Appln. No. 60/085,906 filed on 18 May 1998, U.S. Appln. No. 60/085,927 filed on 18 May 1998, U.S. Appln. No. 60/085,920 filed on 18 May 1998, U.S. Appln. No. 60/085,928 filed on 19 May 1998, U.S. Appln. No. 60/085,925 filed on 18 May 1998, U.S. Appln. No. 60/085,921 filed on 18 May 1998, U.S. Appln. No. 60/085,923 filed on 18 May 1998, U.S. Appln. No. 60/085,922 filed on 18 May 1998, U.S. Appln. No. 60/090,112 filed on 22 Jun. 1998, U.S. Appln. No. 60/089,508 filed on 16 Jun. 1998, U.S. Appln. No. 60/089,507 filed on 16 Jun. 1998, U.S. Appln. No. 60/089,510 filed on 16 Jun. 1998, U.S. Appln. No. 60/089,509 filed on 16 Jun. 1998, U.S. Appln. No. 60/090,113 filed on 22 Jun. 1998, U.S. Appln. No. 60/092,956 filed on 15 Jul. 1998, U.S. Appln. No. 60/092,921 filed on 15 Jul. 1998, U.S. Appln. No. 60/092,922 filed on 15 Jul. 1998, U.S. Appln. No. 60/094,657 filed on 30 Jul. 1998, U.S. Appln. No. 60/095,486 filed on 5 Aug. 1998, U.S. Appln. No. 60/096,319 filed on 12 Aug. 1998, U.S. Appln. No. 60/095,455 filed on 6 Aug. 1998, U.S. Appln. No. 60/095,454 filed on 6 Aug. 1998, U.S. Appln. No. 60/097,917 filed on 25 Aug. 1998, U.S. Appln. No. 60/098,634, filed on 31 Aug. 1998, U.S. Appln. No. 60/101,546 filed on 23 Sep. 1998, U.S. Appln. No. 60/102,895 filed on 2 Oct. 1998, U.S. Appln. No. 60/108,207 filed on 12 Nov. 1998, U.S. Appln. No. 60/113,006 filed on 18 Dec. 1998, U.S. Appln. No. 60/112,809 filed on 17 Dec. 1998, U.S. Appln. No. 60/116,330 filed on 19 Jan. 1999, U.S. Appln. No. 60/119,468 filed on 10 Feb. 1999, U.S. Appln. No. 60/125,055 filed on 18 Mar. 1999, U.S. Appln. No. 60/128,693 filed on 9 Apr. 1999, U.S. Appln. No. 60/130,991 filed on 26 Apr. 1999, U.S. Appln. No. 60/137,725 filed on 7 Jun. 1999, U.S. Appln. No. 60/145,220 filed on 23 Jul. 1999, U.S. Appln. No. 60/149,182 filed on 17 Aug. 1999, U.S. Appln. No. 60/152,317 filed on 3 Sep. 1999, U.S. Appln. No. 60/152,315 filed on 3 Sep. 1999, U.S. Appln. No. 60/155,709 filed on 24 Sep. 1999, U.S. Appln. No. 60/163,085 filed on 2 Nov. 1999, U.S. Appln. No. 60/172,411 filed on 17 Dec. 1999, U.S. Appln. No. 60/162,239 filed on 29 Oct. 1990, U.S. Appln. No. 60/215,139 filed on 30 Jun. 2000, U.S. Appln. No. 60/162,211 filed on 29 Oct. 1999, U.S. Appln. No. 60/215,138 filed on 30 Jun. 2000, U.S. Appln. No. 60/162,240 filed on 29 Oct. 1999, U.S. Appln. No. 60/215,131 filed on 30 Jun. 2000, U.S. Appln. 60/162,237 filed on 29 Oct. 1999, U.S. Appln. No. 60/219,666 filed on 21 Jul. 2000, U.S. Appln. No. 60/162,238 filed on 29 Oct. 1999, U.S. Appln. No. 60/215,134 filed on 30 Jun. 2000, U.S. Appln. No. 60/163,580 filed on 5 Nov. 1999, U.S. Appln. No. 60/215,130 filed on 30 Jun. 2000, U.S. Appln. No. 60/163,577 filed on 5 Nov. 1999, U.S. Appln. No. 60/215,137 filed on 30 Jun. 2000, U.S. Appln. No. 60/163,581 filed on 5 Nov. 1999, U.S. Appln. No. 60/215,133 filed on 30 Jun. 2000, U.S. Appln. No. 60/163,576 filed on 5 Nov. 1999, U.S. Appln. No. 60/221,366 filed on 27 Jul. 2000, U.S. Appln. No. 60/164,344 filed on 9 Nov. 1999, U.S. Appln. No. 60/195,296 filed on 7 Apr. 2000, U.S. Appln. No. 60/221,367 filed on 27 Jul. 2000, U.S. Appln. No. 60/164,835 filed on 12 Nov. 1999, U.S. Appln. No. 60/221,142 filed on 27 Jul. 2000, U.S. Appln. No. 60/164,744 filed on 12 Nov. 1999, U.S. Appln. No. 60/215,140 filed on 30 Jun. 2000, U.S. Appln. No. 60/164,735 filed on 12 Nov. 1999, U.S. Appln. No. 60/221,193 filed on 27 Jul. 2000, U.S. Appln. No. 60/164,825 filed on 12 Nov. 1999, U.S. Appln. No. 60/222,904 filed on 3 Aug. 2000, U.S. Appln. No. 60/164,834 filed on 12 Nov. 1999, U.S. Appln. No. 60/224,007 filed on 4 Aug. 2000, U.S. Appln. No. 60/164,750 filed on 12 Nov. 1999, U.S. Appln. No. 60/215,128 filed on 30 Jun. 2000, U.S. Appln. No. 60/166,415 filed on 19 Nov. 1999, U.S. Appln. No. 60/215,136 filed on 30 Jun. 2000, U.S. Appln. No. 60/166,414 filed on 19 Nov. 1999, U.S. Appln. No. 60/219,665 filed on 21 Jul. 2000, U.S. Appln. No. 60/164,731 filed on 12 Nov. 1999, U.S. Appln. No. 60/215,132 filed on 30 Jun. 2000, U.S. Appln. No. 60/226,280 filed on 18 Aug. 2000, U.S. Appln. No. 60/256,968 filed on 21 Dec. 2000, U.S. Appln. No. 60/226,380 filed on 18 Aug. 2000, U.S. Appln. No. 60/259,803 filed on 5 Jan. 2001, U.S. Appl. No. 60/228,084 filed on 28 Aug. 2000, U.S. appln. Ser. No. 09/915,582 filed on 27 Jul. 2001, U.S. Appln. No. 60/231,968 filed on 12 Sep. 2000, U.S. Appln. No. 60/236,326 filed on 29 Sep. 2000, U.S. Appln. No. 60/234,211 filed on 20 Sep. 2000, U.S. Appln. No 60,226,282 filed on 18 Aug. 2000, U.S. Appln. No. 60/232,104 filed on 12 Sep. 2000, U.S. Appln. No. 60/234,210 filed on 20 Sep. 2000, U.S. Appln. No. 60/226,278 filed on 18 Aug. 2000, U.S. Appln. No. 60/259,805 filed on 5 Jan. 2001, U.S. Appln. No. 60/226,279 filed on 18 Aug. 2000, U.S. Appln. No. 60/259,678 filed on 5 Jan. 2001, U.S. Appln. No. 60/226,281 filed on 18 Aug. 2000, U.S. Appln. No. 60/231,969 filed on 12 Sep. 2000, U.S. Appln. No. 60/228,086 filed on 28 Aug. 2000, U.S. Appln. No. 60/259,516 filed on 4 Jan. 2001, U.S. Appln. No. 60/228,083 filed on 28 Aug. 2000, U.S. Appln. No. 60/259,804 filed on 5 Jan. 2001, U.S. Appln. No. 60/270,658 filed on 23 Feb. 2001, U.S. Appln. No. 60/304,444 filed on 12 Jul. 2001, U.S. Appln. No. 60/270,625 filed on 23 Feb. 2001, U.S. Appln. No. 60/304,417 filed on 12 Jul. 2001, U.S. Appln. No. 60/295,869 filed on 6 Jun. 2001, U.S. Appln. No. 60/304,121 filed on 11 Jul. 2001, U.S. Appln. No. 60/311,085 filed on 10 Aug. 2001, U.S. Appln. NO. 60/325,209 filed on 28 Sep. 2001, U.S. Appln. No. 60/330,629 filed on 26 Oct. 2001, U.S. Appln. No. 60/331,046 filed on 7 Nov. 2001, U.S. Appln. No. 60/358,554 filed on 22 Feb. 2002, U.S. Appln. No. 60/358,714 filed on 25 Feb. 2002, U.S. Appln. No. 60/277,340 filed on 21 Mar. 2001, U.S. Appln. No. 60/306,171 filed on 19 Jul. 2001, U.S. Appln. No. 60/278,650 filed on 27 Mar. 2001, U.S. Appln. No. 60.331,287 filed on 13 Nov. 2001, U.S. appln. Ser. No. 09/950,082 filed on 12 Sep. 2001, U.S. appln. SerNo. 09/950,083 filed on 12 Sep. 2001, PCT Appln. No. US00/29363 filed on 25 Oct. 2000, PCT Appln. No. US00/29360 filed on 25 Oct. 2000, PCT Appln. No. US00/29362 filed on 25 Oct. 2000, PCT Appln. No. US00/29365 filed on 25 Oct. 2000, PCT Appln. No. US00/29364 filed on 25 Oct. 2000, PCT Appln. No. US00/30040 filed on 1 Nov. 2000, PCT Appln. No. US00/30037 filed on 1 Nov. 2000, PCT Appln. No. US00/30045 filed on 1 Nov. 2000, PCT Appln. No. US00/30036 filed on 1 Nov. 2000, PCT Appln. No. US00/30039 filed on 1 Nov. 2000, PCT Appln. No. US00/30654 filed on 8 Nov. 2000, PCT Appln. No. US00/30628 filed on 8 Nov. 2000, PCT Appln. No. US00/30653 filed on 8 Nov. 2000, PCT Appln. No. US00/30629 file on 8 Nov. 2000, PCT Appln. No. US00/30679 filed on 8 Nov. 2000, PCT Appln. No. US00/30674 filed on 8 Nov. 2000, PCT Appln. No. US00/31162 filed on 15 Nov. 2000, PCT Appln. No. US00/31282 filed on 15 Nov. 2000, PCT Appln. No. US00/30657 filed on 8 Nov. 2000, PCT Appln. No. US01/01396 filed on 17 Jan. 2001, PCT Appln. No. US01/01387 filed on 17 Jan. 2001, PCT Appln. No. US01/01567 filed on 17 Jan. 2001, PCT Appln. No. US01/01431 filed on 17 Jan. 2001, PCT Appln. No. US01/01432 filed on 17 Jan. 2001, PCT Appln. No. US01/00544 filed on 9 Jan. 2001, PCT Appln. No. US01/01435 filed on 17 Jan. 2001, PCT Appln. No. US01/01386 filed on 17 Jan. 2001, PCT Appln. No. US01/01565 filed on 17 Jan. 2001, PCT Appln. No. US01/01394 filed on 17 Jan. 2001, PCT Appln. No. US01/01434 filed on 17 Jan. 2001, PCT. Appln. No. US01/01397 filed on 17 Jan. 2001, PCT Appln. No. US01/01385 filed on 17 Jan. 2001, PCT Appln. No. US01/01384 file on 17 Jan. 2001, PCT Appln. No. US01/01383 filed on 17 Jan. 2001, PCT Appln. No. US02/05064 filed on 21 Feb. 2002, PCT Appln. No. US02/05301 filed on 21 Feb. 2002, U.S. appln. Ser. No. 09/148,545 filed on 4 Sep. 1998, U.S. appln. Ser. No. 09/621,011 filed on 20 Jul. 2000, U.S. appln. Ser. No. 09/981,876 filed on 19 Oct. 2001, U.S. appln. Ser. No. 09/149,476 filed on 8 Sep. 1998, U.S. appln. Ser. No. 09/809,391 filed on 16 Mar. 2001, U.S. appln. Ser. No. 09/882,171 filed on 18 Jun. 2001, U.S. Appln. No. 60/190,068 filed on 17 Mar. 2000, U.S. appln. Ser. No. 09/152,060 filed on 11 Sep. 1998, U.S. appln. Ser. No. 09/852,797 filed on 11 May 2001, U.S. appln. Ser. No. 09/853,161 filed on 11 May 2001, U.S. appln. Ser. No. 09/852,659 filed on 11 May 2001, U.S. appln. Ser. No. 10/058,993 filed on 30 Jan. 2002, U.S. Appln. No. 60/265,583 filed on 2 Feb. 2001, U.S. appln. Ser. No. 09/154,707 filed on 17 Sep. 1998, U.S. appln. Ser. No. 09/966,262 filed on 1 Oct. 2001, U.S. appln. Ser. No. 09/983,966 filed on 26 Oct. 2001, U.S. appln. Ser. No. 10/059,395 filed on 31 Jan. 2002, U.S. appln. Ser. No. 09/984,245 filed on 29 Oct. 2001, U.S. appln. Ser. No. 09/166,780 filed on 6 Oct. 1998, U.S. appln. Ser. No. 09/577,145 filed on 24 May 2000, U.S. appln. Ser. No. 09/814,122 filed on 22 Mar. 2001, U.S. appln. Ser. No. 09/189,144 filed on 10 Nov. 1998, U.S. appln. Ser. No. 09/690,454 filed on 18 Oct. 2000, U.S. appln. Ser. No. 10/062,831 filed on 5 Feb. 2002, U.S. appln. Ser. No. 10/062,599 filed on 5 Feb. 2002, U.S. appln. Ser. No. 09/205,258 filed on 4 Dec. 1998, U.S. appln. Ser. No. 09/933,767 filed on 22 Aug. 2001, U.S. Appln. No. 60/184,836 filed on 24 Feb. 2000, U.S. Appln. No. 60/193,170 filed on 29-Mar-2000, U.S. appln. Ser. No. 10/023,282 filed on 20 Dec. 2001, U.S. appln. Ser. No. 10/004,860 filed on 7 Dec. 2001, U.S. appln. Ser. No. 09/209,462 filed on 11 Dec. 1998, U.S. appln. Ser. No. 09/213,365 filed on 17 Dec. 1998, U.S. appln. Ser. No. 09/627,081 filed on 27 Jul. 2000, U.S. appln. Ser. No. 09/227,357 filed on 8 Jan. 1999, U.S. appln. Ser. No. 09/983,802 filed on 10 Nov. 1998, U.S. appln. Ser. No. 09/973,278 filed on 10 Oct. 2001, U.S. Appln. No. 60/239,899 filed on 13 Oct. 2000, U.S. appln. Ser. No. 09/984,490 filed on 30 Oct. 2001, U.S. appln. Ser. No. 09/776,724 filed on 6 Feb. 2001, U.S. appln. Ser. No. 09/229,982 filed on 14 Jan. 1999, U.S. appln. Ser. No. 09/669,688 filed on 26 Sep. 2000, U.S. Appln. No. 60/180,909 filed on 8 Feb. 2000, U.S. appln. Ser. No. 09/236,557 filed on 26 Jan. 1999, U.S. appln. Ser. No. 09/244,112 filed on 21 Sep. 2000, U.S. appln. Ser. No. 09/820,649 filed on 30 Mar. 2001, U.S. Appln. No. 60/295,558 filed on 5 Jun. 2001, U.S. appln. Ser. No. 09/244,112 filed on 4 Feb. 1999, U.S. appln. Ser. No. 09/774,639 filed on 1 Feb. 2001, U.S. appln. Ser. No. 09/969,730 filed on 4 Oct. 2001, U.S. Appln. No. 60/238,291 filed on 6 Oct. 2000, U.S. appln. Ser. No. 09/251,329 filed on 17 Feb. 1999, U.S. appln. Ser. No. 09/716,128 filed on 17 Nov. 2000, U.S. appln. Ser. No. 09/257,179 filed on 25 Feb. 1999, U.S. appln. Ser. No. 09/729,835 filed on 6 Dec. 2000, U.S. appln. Ser. No. 09/262,109 filed on 4 Mar. 1999, U.S. appln. Ser. No. 09/722,329 filed on 28 Nov. 2000, U.S. appln. Ser. No. 09/722,329 filed on 17 Jan. 2002, U.S. Appln. No. 60/262,066 filed on 18 Jan. 2001, U.S. appln. Ser. No. 09/281,976 filed on 31 Mar. 1999, U.S. appln. Ser. No. 09/288,143 filed on 8 Apr. 1999, U.S. appln. Ser. No. 09/984,429 filed on 30 Oct. 2001, U.S. Appln. No. 60/244,591 filed on 1 Nov. 2000, U.S. appln. Ser. No. 09/296,622 filed on 23 Apr. 1999, U.S. appln. Ser. No. 09/305,736 filed on 5 May 1999, U.S. appln. Ser. No. 09/818,683 filed on 28 Mar. 2001, U.S. appln. Ser. No. 09/974,879 filed on 12 Oct. 2001, U.S. Appln. No. 60/239,893 filed on 13 Oct. 2000, U.S. appln. Ser. No. 09/334,595 filed on 17 Jun. 1999, U.S. appln. Ser. No. 09/348,457 filed on 7, Jul. 1999, U.S. appln. Ser. No. 09/739,907 filed on 20 Dec. 2000, U.S. appln. Ser. No. 09/938,671 filed on 27 Aug. 2001, U.S. appln. Ser. No. 09/363,044 filed on 29 Jul. 1999, U.S. appln. Ser. No. 09/813,153 filed on 21 Mar. 2001, U.S. appln. Ser. No. 09/949,925 filed on 12 Sep. 2001, U.S. Appln. No. 60/232,150 filed on 12 Sep. 2000, U.S. appln. Ser. No. 09/369,247 filed on 5 Aug. 1999, U.S. appln. Ser. No. 10/062,548 filed on 5 Feb. 2002, U.S. appln. Ser. No. 09/382,572 filed on 25 Aug. 1999, U.S. appln. Ser. No. 09/716,129 filed on 17 Nov. 2000, U.S. appln. Ser. No. 09/393,022 filed on 9 Sep. 1999, U.S. Ser. appln. No. 09/798,889 filed on 6 Mar. 2001, U.S. appln. Ser. No. 09/397,945 filed on 17 Sep. 1999, U.S. appln. Ser. No. 09/437,658 filed on 10 Nov. 1999, U.S. appln. Ser. No. 09/892,877 filed on 28 Jun. 2001, U.S. appln. Ser. No. 09/948,783 filed on 10 Sep. 2001, U.S. Appln. No. 60/231,846 filed on 11 Sep. 2000, U.S. appln. Ser. No. 09/461,325 filed on 14 Dec. 1999, U.S. appln. Ser. No. 10/050,873 filed on 18 Jan. 2002, U.S. Appln. No. 60/263,230 filed on 23 Jan. 2001, U.S. Appln. No. 60/263,681 filed on 24 Jan. 2001, U.S. appln. Ser. No. 10/012,542 filed on 12 Dec. 2001, U.S. appln. Ser. No. 09/482,273 filed on 13 Jan. 2000, U.S. Appln. No. 60/234,925 filed on 25 Sep. 2000, U.S. appln. Ser. No. 09/984,276 filed on 29 Oct. 2001, U.S. appln. Ser. No. 09/984,271 filed on 29 Oct. 2001, U.S. appln. Ser. No. 09/489,847 filed on 24 Jan. 2000, U.S. Appln. No. 60/350,898 filed on 25 Jan. 2002, U.S. appln. Ser. No. 09/511,554 filed on 23 Feb. 2000, U.S. appln. Ser. No. 09/739,254 filed on 19 Dec. 2000, U.S. appln. Ser. No. 09/904,615 filed on 16 Jul. 2001, U.S. appln. Ser. No. 10/054,988 filed on 25 Jan. 2002, U.S. appln. Ser. No. 09/531,119 filed on 20 Mar. 2000, U.S. appln. Ser. No. 09/820,893 filed on 30 Mar. 2001, U.S. appln. Ser. No. 09/565,391 filed on 5 May 2000, U.S. appln. Ser. No. 09/948,820 filed on 10 Sep. 2001, U.S. appln. Ser. No. 09/591,316 filed on 9 Jun. 2000, U.S. appln. Ser. No. 09/895,298 filed on 2 Jul. 2001, U.S. appln. Ser. No. 09/618,150 filed on 17 Jul. 2000, U.S. appln. Ser. No. 09/985,153 filed on 1 Nov. 2001, U.S. appln. Ser. No. 09/628,508 filed on 28 Jul. 2000, U.S. appln. Ser. No. 09/997,131 filed on 30 Nov. 2001, U.S. appln. Ser. No. 09/661,453 filed on 13 Sep. 2000, U.S. appln. Ser. No. 10/050,882 filed on 18 Jan. 2002, U.S. appln. Ser. No. 09/684,524 filed on 10 Oct. 2000, U.S. appln. Ser. No. 10/050,704 filed on 18 Jan. 2002, U.S. appln. Ser. No. 09/726,643 filed on 1 Dec. 2000, U.S. appln. Ser. No. 10/042,141 filed on 1 Jan. 2002, U.S. appln. Ser. No. 09/756,168 filed on 9 Jan. 2001, U.S. appln. Ser. No. 09/781,417 filed on 13 Feb. 2001, U.S. appln. Ser. No. 10/060,255 filed on 1 Feb. 2002, U.S. appln. Ser. No. 09/789,561 filed on 22 Feb. 2001, U.S. appln. Ser. No. 09/800,729 filed on 8 Mar. 2001, U.S. appln. Ser. No. 09/832,129 filed on 11 Apr. 2001, PCT Appln. No. US98/04482 filed on 6 Mar. 1998, PCT Appln. No. US98/04493 filed on 6 Mar. 1998, PCT Appln. No. US98/04858 filed on 12 Mar. 1998, PCT Appln. No. US98/0531 1 filed on 19 Mar. 1998, PCT Appln. No. US98/06801 filed on 7 Apr. 1998, PCT Appln. No. US98/10868 filed on 28 May 1998, PCT Appln. No. US98/11422 filed on 4 Jun. 1998, PCT Appln. No. US01/05614 filed on 21 Feb. 2001, PCT Appln. No. US98/12125 filed on 11 Jun. 1998, PCT Appln. No. US98/13608 filed on 30 Jun. 1998, PCT Appln. No. US98/13684 filed on 7 Jul. 1998, PCT Appln. No. US98/14613 filed on 15 Jul. 1998, PCT Appln. No. US98/15949 filed on 29 Jul. 1998, PCT Appln. No. US98/16235 filed on 4 Aug. 1998, PCT Appln. No. US98/17044 filed on 18 Aug. 1998, PCT Appln. No. US98/17709 filed on 27 Aug. 1998, PCT Appln. No. US98/18360 filed on 3 Sep. 1998, PCT Appln. No. US02/01109 filed on 17 Jan. 2002, PCT Appln. No. US98/20775 filed on 1 Oct. 1998, PCT Appln. No. US98/21 142 filed on 8 Oct. 1998, PCT Appln. No. US98/22376 filed on 23 Oct. 1998, PCT Appln. No. US98/23435 filed on 4 Nov. 1998, PCT Appln. No. US98/27059 filed on 17 Dec. 1998, PCT Appln. No US00/00108 filed on 6 Jan. 1999, PCT Appln. No. US99/01621 filed on 27 Jan. 1999, PCT Appln. No. US99/02293 filed on 4 Feb. 1999, PCT Appln. No. US99/03939 filed on 24 Feb. 1999, PCT Appln. No. US99/05721 filed on 11 Mar. 1999, PCT Appln. No. US99/05804 filed on 18 Mar. 1999, PCT Appln. No. US99/09847 filed on 6 May 1999, PCT Appln. No. US99/13418 filed on 15 Jun. 1999, PCT Appln. No. US99/15849 filed on 14 Jul. 1999, PCT Appln. No. US01/00911 filed on 12 Jan. 2001, PCT Appln. No. US 01/29871 filed on 24 Sep. 2001, PCT Appln. No. US 99/17130 filed on 29 Jul. 1999, PCT Appln. No. US99/19330 filed on 24 Aug. 1999, PCT Appln. No. US99/22012 filed on 22 Sep. 1999, PCT Appln. No. US99/26409 filed on 9 Nov. 1999, PCT Appln. No. US99/29950 filed on 16 Dec. 1999, PCT Appln. No. US00/00903 filed on 18 Jan. 2000, PCT Appln. No. US00/03062 filed on 8 Feb. 2000, PCT Appln. No. US00/06783 filed on 16 Mar. 2000, PCT Appln. No. US00/08979 filed on 6 Apr. 2000, PCT Appln. No. US00/15187 filed on 2 Jun. 2000, PCT Appln. No. US00/19735 filed on 20 Jul. 2000, PCT Appln. No. US00/22325 filed on 16 Aug. 2000, PCT Appln. No. US00/24008 filed on 31 Aug. 2000, PCT Appln. No. US00/26013 filed on 22 Sep. 2000, PCT Appln. No. US00/28664 filed on 17 Oct. 2000, U.S. appln. Ser. No. 09/833,245 filed on 12 Apr. 2001, and PCT Appln. No. US01/11988 filed on 12 Apr. 2001, U.S. appln. Ser. No. 10/100,683, PCT Appln. No. US02/08278 filed on 19 Mar. 2002, PCT Appln. No. US02/08279 filed on 19 Mar. 20002, PCT Appln. No. US02/08123 filed on 19 Mar. 2002, PCT Appln. No. US02/09785 filed on 19 Mar. 2002, PCT Appln. No. US02/08276 filed on 19 Mar. 2002, PCT Appln. No. US02/08277 filed on 19 Mar. 2002, and PCT Appln. No. US02/08124 filed on 19 Mar. 2002.

The application's sequence listing, which the Patent Office published only in electronic form, follows.

SEQUENCE LISTING (1136 sequences)

SEQ ID NO: 1 - DNA, 733 bp, Homo sapiens
gggatccggagcccaaatcttctgacaaaactcacacatgcccaccgtgcccagcacctgaattcgagggtgcaccgtcagtcttcctcttccccccaaaacccaaggacaccctcatgatctcccggactcctgaggtcacatgcgtggtggtggacgtaagccacgaagaccctgaggtcaagttcaactggtacgtggacggcgtggaggtgcataatgccaagacaaagccgcgggaggagcagtacaacagcacgtaccgtgtggtcagcgtcctcaccgtcctgcaccaggactggctgaatggcaaggagtacaagtgcaaggtctccaacaaagccctcccaacccccatcgagaaaaccatctccaaagccaaagggcagccccgagaaccacaggtgtacaccctgcccccatcccgggatgagctgaccaagaaccaggtcagcctgacctgcctggtcaaaggcttctatccaagcgacatcgccgtggagtgggagagcaatgggcagccggagaacaactacaagaccacgcctcccgtgctggactccgacggctccttcttcctctacagcaagctcaccgtggacaagagcaggtggcagcaggggaacgtcttctcatgctccgtgatgcatgaggctctgcacaaccactacacgcagaagagcctctccctgtctccgggtaaatgagtgcgacggccgcgactctagaggat

SEQ ID NO: 2 - protein, 5 aa, Homo sapiens
  Site (3): Xaa equals any of the twenty naturally ocurring L-amino acids
WSXWS

SEQ ID NO: 3 - DNA, 86 bp, Artificial Sequence
  Primer_Bind: Synthetic sequence with 4 tandem copies of the GAS binding site found in the IRF1 promoter (Rothman et al., Immunity 1:457-468 (1994)), 18 nucleotides complementary to the SV40 early promoter, and a Xho I restriction site.
gcgcctcgagatttccccgaaatctagatttccccgaaatgatttccccgaaatgatttccccgaaatatctgccatctcaattag

SEQ ID NO: 4 - DNA, 27 bp, Artificial Sequence
  Primer_Bind: Synthetic sequence complementary to the SV40 promoter; includes a Hind III restriction site.
gcggcaagctttttgcaaagcctaggc

SEQ ID NO: 5 - DNA, 271 bp, Artificial Sequence
  Protein_Bind: Synthetic promoter for use in biological assays; includes GAS binding sites found in the IRF1 promoter (Rothman et al., Immunity 1:457-468 (1994)).
ctcgagatttccccgaaatctagatttccccgaaatgatttccccgaaatgatttccccgaaatatctgccatctcaattagtcagcaaccatagtcccgcccctaactccgcccatcccgcccctaactccgcccagttccgcccattctccgccccatggctgactaattttttttatttatgcagaggccgaggccgcctcggcctctgagctattccagaagtagtgaggaggcttttttggaggcctaggcttttgcaaaaagctt

SEQ ID NO: 6 - DNA, 32 bp, Artificial Sequence
  Primer_Bind: Synthetic primer complementary to human genomic EGR-1 promoter sequence (Sakamoto et al., Oncogene 6:867-871 (1991)); includes a Xho I restriction site.
gcgctcgagggatgacagcgatagaaccccgg

SEQ ID NO: 7 - DNA, 31 bp, Artificial Sequence
  Primer_Bind: Synthetic primer complementary to human genomic EGR-1 promoter sequence (Sakamoto et al., Oncogene 6:867-871 (1991)); includes a Hind III restriction site.
gcgaagcttcgcgactccccggatccgcctc

SEQ ID NO: 8 - DNA, 12 bp, Homo sapiens
ggggactttccc

SEQ ID NO: 9 - DNA, 73 bp, Artificial Sequence
  Primer_Bind: Synthetic primer with 4 tandem copies of the NF-KB binding site (GGGGACTTTCCC), 18 nucleotides complementary to the 5' end of the SV40 early promoter sequence, and a XhoI restriction site.
gcggcctcgaggggactttcccggggactttccggggactttccgggactttccatcctgccatctcaattag

SEQ ID NO: 10 - DNA, 256 bp, Artificial Sequence
  Protein_Bind: Synthetic promoter for use in biological assays; includes NF-KB binding sites.
ctcgaggggactttcccggggactttccggggactttccgggactttccatctgccatctcaattagtcagcaaccatagtcccgcccctaactccgcccatcccgcccctaactccgcccagttccgcccattctccgccccatggctgactaattttttttatttatgcagaggccgaggccgcctcggcctctgagctattccagaagtagtgaggaggcttttttggaggcctaggcttttgcaaaaagctt

SEQ ID NO: 11 - DNA, 2703 bp, Homo sapiens
ggcacgagatttcctacaggtgaaacgccatcattaggattcactgtaacgttagtgctattaaactcactagcatttttattaatggccgttatctacactaagctatactgcaacttggaaaaagaggacctctcagaaaactcacaatctagcatgattaagcatgtcgcttggctaatcttcaccaattgcatctttttctgccctgtggcgtttttttcatttgcaccattgatcactgcaatctctatcagccccgaaataatgaagtctgttactctgatattttttccattgcctgcttgcctgaatccagtcctgtatgttttcttcaacccaaagtttaaagaagactggaagttactgaagcgacgtgttaccaagaaaagtggatcagtttcagtttccatcagtagccaaggtggttgtctggaacaggatttctactacgactgtggcatgtactcacatttgcagggcaacctgactgtttgcgactgctgcgaatcgtttcttttaacaaagccagtatcatgcaaacacttgataaaatcacacagctgtcctgcattggcagtggcttcttgccaaagacctgagggctactggtccgactgtggcacacagtcggcccactctgattatgcagatgaagaagattcctttgtctcagacagttctgaccaggtgcaggcctgtggacgagcctgcttctaccagagtagaggattccctttggtgcgctatgcttacaatctaccaagagttaaagactgaactactgtgtgtgtaaccgtttcccccgtcaaccaaaatcagtgtttatagagtgaaccctattctcatctttcatctgggaagcacttctgtaatcactgcctggtgtcacttagaagaaggagaggtggcagtttatttctcaaaccagtcattttcaaagaacaggtgcctaaattataaattggtgaaaaatgcaatgtccaagcaatgtatgatctgtttgaaacaaatatatgacttgaaaaggatcttaggtgtagtagagcaatataatgttagttttttctgatccataagaagcaaatttatacctatttgtgtattaagcacaagataaagaacagctgttaatattttttaaaaatctattttaaaatgtgattttctataactgaagaaaatatcttgctaattttacctaatgtttcatccttaatctcaggacaacttactgcagggccaaaaaagggactgtcccagctagaactgtgagagtatacataggcattactttattatgttttcacttgccatccttgacataagagaactataaattttgtttaagcaatttataaatctaaaacctgaagatgtttttaaaacaatattaacagctgttaggttaaaaaaatagctggacatttgttttcagtcattatacattgctttggtccaatcagtaattttttcttaagtgttttgtgattacactactagaaaaaaagtaaaaggctaattgctgtgtgggtttagtcgatttggctaaactactaactaatgtgggggtttaatagtatctgagggatttggtggcttcatgtaatgttctcattaatgaatacttcctaatatcgttggctctactaatattttccaatttgctgggatgtcacctagcaatagcttggattatatagaaagtaaactgtggtcaatacttgcatttaattagacgaaacggggagtaattatgacacgaagtacttatgtttatttcttagtgagctggattatcttgaacctgtgctattaaatggaaatttccatacatcttccccatactattttttataaaagagcctattcaatagctcagaggttgaactctggttaaacaagataatatgttattaataaaaatagaagaagaaagaataaagcttagtcctgtgtctttaaaaattaaaaattttacttgattcccatctatgggctttagacctattactgggtggagtcttaaagttataattgttcaatatgttttttgaacagtgtgctaaatcaatagcaaacccactgccatattagttattctgaatatactaaaaaaatccagctagattgcagtttaataattaaactgtacatactgtgcatataatgaatttttatcttatgtaaattatttttagaacacaagttgggaaatgtggcttctgttcatttcgtttaattaaagctacctcctaaactatagtggctgccagtagcagactgttaaattgtggtttatatactttttgcattgtaaatagtctttgttgtacattgtcagtgtaataaaaacagaatctttgtatatcaaaatcatgtagtttgtataaaatgtgggaaggatttatttacagtgtgttgtaattttgtaaggccaactatttacaagttttaaaaattgctatcatgtatatttacacatctgataaatattaaatcataacttggtaagaaactcctaattaaaaggttttttccaaaattcaggttattgaaaatttttcattttattcatttaaaaactagaataacagatatataaaagtgttaatctttgtgctatatggtatgaaatacaatattgtactcagtgttttgaattattaaagtttctagaaagcaaaaaaaaaaaaaaaaaaa

SEQ ID NO: 12 - DNA, 459 bp, Homo sapiens
ggcacgaggaagcgtgaaccccagggaacagcgggtcccttccctcctcagacacaagccacctcagcttgtggctcttggcccccagccccaccaacccacctgttcatttattcaacagacaatgacagctgatatttattggacatttgcaccatgccaagcattcggcttggattatcccatttgtttctcacagccggtatttattgtctgctcctctgtgccaggtgctgtgctctgggcaggggcactgcatgggctgcctgccctggtggagcttgtggtctgatgggtgaggctgacccaagcccaccccattgccaacagggccagggcaagagtacacacaggggcctcataccatatgtctaaatatttaaaaagttatcaatcaagctaacaactgttaaataaaatatgttctattctcctactttgaaaaaaaaaaaaaaaaaa

SEQ ID NO: 13 - DNA, 760 bp, Homo sapiens
  misc_feature (13)..(13): n equals a,t,g, or c
  misc_feature (300)..(300): n equals a,t,g, or c
  misc_feature (425)..(425): n equals a,t,g, or c
cggacgcgtgggncggacgcgtggggaaaaaataacaaaacaaaaaacaagaaaaaaaaaacacaaaaccccgtaaaatcacaaagaaaatccaacaccaaaggcgcagaagccggctggccgtggtgggggcagcgtaggcgtasatccctctcctctcacttagcctgttgactcttgttattatcatgatattcacaaaacgccgcatgtttaaaaagtcatagatgtcatcttctctctgcccccagggaggaaagccaccttctcttgccccttggcccctttgtcaggggccangggtctgccgggtgggggtgccaacaggcctggccctttcctcccctgcatccagccatgggggcctctgcgattgccggaaggttgcatggctggtcccagggccagcacaggcccgaggccgngctgcctggttttatttttatttaactttattttctgttttatgagtgtgtgtccgcccacccccacccccttcagtgttaagtggggagccctgggggagtctctcctgcctcccagcctctcccaagacctcccccctcgtcaccagccatccctctggaccaggcagagggcggaccgggtgggcaggggcctgagggtggctcgggccagcccaccagccaatggacccctcctcaggccgccagtgtcgccctgcccctttttaaaacaaaatgccctcgtttgtaaacccttagacgcttgagaataaaccccttccttttcttccaaa

SEQ ID NO: 14 - DNA, 1445 bp, Homo sapiens
ggcacgagggatttgaacaagatcattagaattcaaaaaacaccagaaatgaaagatctttcctgaagctgtttaggaatattcatgatatacccttaactgttctagagaacaaaatgcgtctgtgctccttcacaaaagtccctatgaatttgtttctcaatgtgatccttcttaagttctataactttttgttttcattaattttaggaaaatcctgccttgcttcgttgggcctatgcaagaacaataaatgtctatcctaatttcagacccactcctaaaaactcactcatgggagctctgtgtggatttgggcccctcatcttcatttattatattatcaaaactgagagggtaagtattcagaccagatgtttagtatttgagtgataggttcactttctagggaccagctgcagctccttctcttgaagattgccaccagtgcccctcccaccttggggctgtcctctgccttcccttcctctcttcttttatctttattcctttccagcaggagttaaaacagaaagttttcagtcacctttgtctatttttgttagttcatttgttttttaaaaagatgatgtttattgggttaagtattagcagaatacataaatcatttagtacgtttcctgtttgcgtgaattctatttatgttggtcacattttgcaaattaatgttaaaacctattaatactctacgggacagagaagcacaagctgcctgtgtggggaatagctgccgtcagcagcctgggtatatgattggagagaaagtcaagctgatctttggcaccaaaccattccacatctggtactaaaccctgagctgcagcccccaggcttgtgttgccactggagcccactcgtctagctttgtctttaactggcccatctgcattcccattagagttcgtgtattttgattatctggtgaatgatctacttaacagaaaggtagtccacattttcccagaaagtgtttgcattttgctttcaatatatggttttatgggataatatatttctaatgactaaaatgtgagtaagatgtttttgaataggagcattttcttactgtgtctttagttcctcggattactgtttcttcgcacactccctgggctttagacagtgggattgcaattaggtttggagtgtttcattctgtttgtcagttgtacggtgggttgtgccaaaatgcagtttttcttaccttttttatttatttatttttatctaatatagccaactggcagaatatattgtctttaatgtactttttttctgtctttacaggataggaaagaaaaacttatccaggaaggaaaattggatcgaacatttcacctctcatattaagtctggcaatgatgactatatgtattcctgcctaaataaatcatctattaatcattaaaaaaaaaaaaaaaaaa

SEQ ID NO: 15 - DNA, 1333 bp, Homo sapiens
  misc_feature (411)..(411): n equals a,t,g, or c
  misc_feature (1264)..(1264): n equals a,t,g, or c
  misc_feature (1319)..(1319): n equals a,t,g, or c
cctggaacacttcaacaaccagtatccagccgcagaggtggtgaactttggcacctggttcctcttcagcttccccatatccctcatcatgctggtggtcagctggttctggatgcactggctgttcctgggctgcaattttaaagagacctgctctctgagcaagaagaagaagaccaaaagggaacagttgtcagagaagagsmtccaagaagaatatgaaaaactgggagacattagctacccagaaatggtgactggwtttttcttcatcctgatgaccgtactgtggtttamccgggagcctggctttgtccctggctgggattctttctttgaaaagaaaggctaccgtactgatgccacagtctctgtcttccttggcttcctcctcttcctcattccagcganagaagccctgctttgggaaaaagaatgatggagagaaccaggagcactcactkgggaccgagcccatcatcacgtggaaggacttccagaagaccatgccctgggagattgtcattctggttgggggaggctatgctctggcttctggtagcaagagctctggcctctctacatggattgggaaccagatgttgtccctgagcagcctcccaccgtgggctgtcaccctgctggcatgcatcctcgtgtccattgtcactgagtttgtgagcaacccagcaaccatcaccatcttcctgcccatcctgtgcagcctgtctgaaacgctgcacattaaccccctctacaccctgatcccagtcaccatgtgcatctcctttgcagtgatgctgcctgtgggcaatccccctaatgccatcgtcttcagctatgggcactgccagatcaaagatatggtgaaagctggcctgggagtcaacgttattggactggtgatagtaatggtggccatcaacacctggggagttagcctcttccacctggacacttacccagcatgggcgagggtcagcaacatcactgatcaagcctaacgccaagtgtacaaactggcccaaccacaggagctgccagtatccagcagtatctggaccacaggcaaagaaaaccactaggaccaccaggagcacacaaccccagacccacgccggagggcatccctccaccagaagattccgccacctcaagtgaactgcaggaatcctccaacaaccacaaacacatgcttcgctgttagtgtcttcttcctgccctcagcaccacagctcaagaaaacctaaagtttcaatacaanccataggctcacaaaaaaaaaaaaaaaaaaaaaaaaaaaaaaaaaaaaaaaaaanaaaaaaaaaaaaaa

SEQ ID NO: 16 - DNA, 1382 bp, Homo sapiens
acgagtgcgggcagcagcagccccggcacgmgggagagagacaaagcatggaggacacaacaatgggaggaaaggcggactctcaggaacttcattcttcacgtggtttatggtgattgcattgctgggcgtctggacatctgtacctgtcgtttggtttgatcttgttgttgatgagcagattactagccaaagcaaaggacttccgttataacttatcagaggtgcttcaaggaaaactaggaatctatgatgctgatggtgatggagattttgatgtggatgatgccaaagttttattaggcctgaccaaagatggcagtaatgaaaatattgattctcttgaggaagtccttaatattttagcagaggaaagttcagattggttttatggtttcctctcatttctctatgatataatgactccttttgaaatgctagaagaagaagaagaagaaagcgaaaccgcagatggtgttgatggtacgtcacagaatgaaggggttcagggaaagacttgtgtcatattggatttacataaccagtaaccttgattcagggactgaagtcattggctaatgaacacctgaagcagcctcctttttcttttctttccttggcttatgcagggcttaatgtgcagtggggtggttgtgatcttaccgtgcaagtcaaccatgtgatcttgcccagtacagctactagcctagtcccttgctcgctcagctcccccaacttctattgaagaaaatggtactcctcattcttgtagtcagctacaaagtacactgaaaatgatgttcttggtggtataattggtttctgtatcgttttgtttcaactcatgtattcactgaactaaatttggacacttaacagcaaattgtgttgtggttaacccttgatgcttgtctttctaacacactattaattatgatgattctaatggatttcattataaaaatatttctggcatgatttttaagttaaatgcttctctgttctttaacatgactgatgtataaaatgatggttcttttactaagctgatattttttattgtaatttgtttaggtttgtcagataggttcatacaaaattaaaagtaaaattctgtgttaatggtgcttttaaaataatttaaaaataactccatgtttttgccttagagtaagttaacttactgttttcagatagtagcatgacatatttctgtctgtgaaagcaaaatttattttaaattttatttccaaatatacatccagagaaagtaatttgtattttttttaaagtaggcatattacacaagagggaacatgtgaatatgtatcttaatgttgtacatagggaaattattcatcctaaaaaaaaaaaaaaaaaaa

SEQ ID NO: 17 - DNA, 1734 bp, Homo sapiens
  misc_feature (1714)..(1714): n equals a,t,g, or c
  misc_feature (1719)..(1719): n equals a,t,g, or c
  misc_feature (1723)..(1723): n equals a,t,g, or c
gcgggagttcctccttgctctcgcccctactctttctggtgttagatcgagcwaccctctaaaagcagtttagagtggtaaaaaaaaaaaaaaacacaccaaacgctcgcagccacaaaagggatgaaatttcttctggacatcctcctgcttctcccgttactgatcgtctgctccctagagtccttcgtgaagctttttattcctaagaggagaaaatcagtcaccggcgaaatcgtgctgattacaggagctgggcatggaattgggagactgactgcctatgaatttgctaaacttaaaagcaagctggttctctgggatataaataagcatggactggaggaaacagctgccaaatgcaagggactgggtgccaaggttcatacctttgtggtagactgcagcaaccgagaagatatttacagctctgcaaagaaggtgaaggcagaaattggagatgttagtattttagtaaataatgctggtgtagtctatacatcagatttgtttgctacacaagatcctcagattgaaaagacttttgaagttaatgtacttgcacatttctggactacaaaggcatttcttcctgcaatgacgaagaataaccatggccatattgtcactgtggcttcggcagctggacatgtctcggtccccttcttactggcttactgttcaagcaagtttgctgctgttggatttcataaaactttgacagatgaactggctgccttacaaataactggagtcaaaacaacatgtctgtgtcctaatttcgtaaacactggcttcatcaaaaatccaagtacaagtttgggacccactctggaacctgaggaagtggtaaacaggctgatgcatgggattctgactgagcagaagatgatttttattccatcttctatagcttttttaacaacattggaaaggatccttcctgagcgtttcctggcagttttaaaacgaaaaatcagtgttaagtttgatgcagttattggatataaaatgaaagcgcaataagcacctagttttctgaaaactgatttaccaggtttaggttgatgtcatctaatagtgccagaattttaatgtttgaacttctgttttttctaattatccccatttcttcaatatcatttttgaggctttggcagtcttcatttactaccacttgttctttagccaaaagctgattacatatgatataaacagagaaatacctttagaggtgactttaaggaaaatgaagaaaaagaaccaaaatgactttattaaaataatttccaagattatttgtggctcacctgaaggctttgcaaaatttgtaccataaccgtttatttaacatatatttttatttttgattgcacttaaattttgtataatttgtgtttctttttctgttctacataaaatcagaaacttcaagctctctaaataaaatgaaggactatatctagtggtatttcacaatgaatatcatgaactctcaatgggtaggtttcatcctacccattgccactctgtttcctgagagatacctcacattccaatgccaaacatttctgcacagggaagctagaggtggatacacgtgttgcaagtataaaagcatcactgggatttaaggagaattgagagaatgtacccacaaatggcagcaataataaatggatcacacttaaaaaaaaaaaaagggggggccgcnctggngggnccaagctttcg

SEQ ID NO: 18 - DNA, 751 bp, Homo sapiens
  misc_feature (1)..(1): n equals a,t,g, or c
natcattttctgtcccctcctatcttaggctgaccggttccctgatgtgttacctgcttctgctactgatccaaactgcagaacttctcattcatccccaaggcctccaggcagtatccaatggggaatcagctctaaaaggaaccagaccaacgttttccagccccttcattctggtgactgaggggaggaaagaatgggagggggtattcttgtctagtggatggaaaggaaacacactgtcaaattactatatctccttggttttctattacagtagaattctccagccatatttttattgtctatgggggaagttggagatggtgaccttgattagaagtgtctggagggggataaatggaggggataagattcagttggttttggaaaatgttaaagtcttaaaataatgcgtccatctgaagaattttttctaaaaccagagtttataaaaatatcactgatacagcctgccccctcatttccctgccacaggagatgtcttggactagagacacttgtttaataatagcttgtctctgatattcccagtagcttccctctgtgtgaggaaaggatagaaatgttcaggacatcatcatacaggctcctcatctacaaagttccagtagcagtgacgcctacacggaagacttggaactgcaaacaggctggggtcacctcagtgacatctgacgctgtccaaccagaagttcgatttttgttctgggggtgaaggaggaaacag

SEQ ID NO: 19 - DNA, 1313 bp, Homo sapiens
ctgcaggaattcggcacgaggtcttgctgtgttgctaatgttgaactcctggccctaagtgatcctcctgccttacctgggattacaggcatgcaccttgtgtctcactaatagatttgctttctaggtctttcctgtcaggtccaccaatattttagatggatggagcacttgattagatcaggagtcaaaattctattcctgaatctattacttaccagttgtactactttgaatgaatggcttaattttttagtgactttgaattgttccagatataaaatgacaggataggtctagagagttgccttagatgaattaggaaacagtttctgagatagagatgttagtgcagtaggtttattggggagtgttctcaggaatgcctgtggggaagtgaaggatgtggaggaggaagatggactggaattcatttgccagagtcctcagcagatcctaccagcwctagagctgggatggcccttcagagttatcctgatccacaaggggtcagcccctaggcattcataagtcactttgtccagtcattggggttgaccccaggaaaaggtatggtttggggtaagaggactcttcagttgagggtagttcctaggaagctagtgagctatgagttggcatcaggcaacatttccagcaatttggtcaatgagttccccttaaggctggatctgggccacggaccatggcactcactgccatattcacagcgtcgttttcagtgtgaaattctactgtgttaaagtattgtacagtcactgaaatgagagtatttttatatttggctacccatgacatttattctcttctgattatattgtttctctcctgatctagagttttagattgttttgtttgttttgttttgttttcctgtacttttctgtctgttgaggaaaaagagttttattcttctagtatgagagtttctattagtcctcctttttagacagatgaacaccctgtgacaattccttttgtctttttgtggcgtgtaaaaaaaaagaaatccataaatagagtcgttacgcaagtcttcatgagttaatttctctctccagttttcttactactttttccagttttcattttcttcaacagaaagcttcttcttctggctggacacagcgctcacgcctgtagtcccagcactttggaaggctgagggggatgtaatcccagcactttggaaggctgaactcctgagttcaggagttccagaccagcctgggcaacatggcgawactcccaactctacaaaaaatacaaaaaaaaaaaaaaaawactcgtag

SEQ ID NO: 20 - DNA, 752 bp, Homo sapiens
actgaacagtggttaatcctgactctgtttttgactgacagttaacagttacatgaaccattcatattacagctcttacttaaatttgaccaagccaggatatatctgttaggccacattcatttagggatcatgttttccaaagcaggtttgggcaaaattaatccacaggactgaaaggtatacatctgtgagttttgttctcacttccacctctaatttgaagaacactttaattgacacagaatacatttcacatatttaacctctacaataagttctgacacattttccatgaaacaaaccatcgctatattcaagataatgaacctatctatcatactcccaaattccttctkgcatctttgtaatttctcactcttccttctccctctccccgtcccatcccaaccactgatctgctcaggcaactaccaatcttctttctgtcactatagattaatttgcatttttaaagaaatttacatacatggaaccatacatcatctatgctttgtagtatgactcctgtcactcagtacaattattttgagattcatttatgttawtgtatgtatcaatagttcatcccttttattggtaagtaacatttttttgtataggtataccatgatttgttgatgaacaaatttacctgttgatgaacatttacgttgttaccaagatttttgctattgaaaataaagtttttatgaatatttatatatataaaaaaaaaaaaaaaaactcga

SEQ ID NO: 21 - DNA, 879 bp, Homo sapiens
gctgcatgctgggcgggaactaggaagcctccccaacctctggccccgtggagccctcagcctcagctgcagtggaggcacctcgggctctggggcaaccaagtgtgacaggtggctgtgcacgggcagaggtcctgtggaagatttcatgtgacgggcagaagaggaggaggaggcaggggaggaagcacatccatgaacagggctgtctgggggcagcctgggtggtcgtgaaataggactcagtggccttgagtcctcatttaggccctgatgttctttagcctgcctggcctttggcaaatcgccagcttcacgcacaacctcatttttcacctttgggtgtgggggtcagagtcgggagagcacctgcaaagccacaatgatccagacacacggcaaggtgggcacattcccatcaggctcctcggggagagcagcgcttctgtgcccgggagcagcgaaggtcacacaggaggacccgcacctcctcgtgtcggtggctccgctggtataatcaggactcacgtggtgttcctcgtgtcgtggcccttattgcagagggagcagcacaggctttcctggaagctcccctcggtcatgtggggtgactccagagarccccaccttgcgagactggaccagtccaagtggcctkgagccacarcggcctkgcagtacctkgggagggggtgatgacaggtgcacacggaggcccatgtggtctgtctggagaatgccggagatgtgaaatatgtaatcctgagtgtggcttctagaaggaaggttcgcaaagctgaatatccactcgtgctgttcccttctcacaggagattcctgtcaacgtccgattctgcctcgaaggcaggaggagtaagg

SEQ ID NO: 22 - DNA, 2761 bp, Homo sapiens
  misc_feature (1006)..(1006): n equals a,t,g, or c
  misc_feature (1376)..(1376): n equals a,t,g, or c
  misc_feature (2211)..(2211): n equals a,t,g, or c
gattaaaatttatttaataataaggggaggaataaaataactatgcatttttttgttgaaagcacaattgtgtctgatactttaattacactatctaatttaacctttcataaatgcccagaatatgagaatatcatccaagatttaaataccaattaccaaaatttacagctatcaaatggaagactcaggtttatgctatgccacgttttctcttctttcctttttgtgatggtgttccaaattgtggagaaagaaaacattctatttgtgattgcttctgctagttacttctgcaaaacaaactactcaaattcagtggtgtgatgcaataaccatttgtcatcctcatatattctggggtcaggggtcaaaaatgcaaagtggggtgacatctcgtggtctacagtaattggggcctctgagaattcctagctatctaggaatgaattaaacgttggacaatgaagttttctgaaagcttctttacgtttggctcctgcatkggtatgacttaaaggctgcgctcaaaataatctcttaaccagagkgtctgaatattgcttcttcatgtaacttgagcttcctcacaacatggaatcatacaggtagcttgcctgagtgttgcagttaatgggtcaatgtattgcctttaataatcttgcctcagaagtcacatagaattactttaatgctgagttggtttaagcaatcacagcctgtctgacttcagggggaagaaacatgatgtctaccctttgatgtgaggacattcaaagtattcgtggctaymttttaaaaaagccacagttatcttctttttaaagagatgccatatccttattatcagcaatagaatcaggatttgaaaatagttcttatgctacatatgcattttttataatcattctttctattataatctttttcagaaagggtgaaggggtaaggattatgtttcatactttgkgaaattctgkgctctataagcatttttattttttgnccataatagattatggtacaaagtaactcaaaactagagtgtataaacataaaaaatacaagttttcatatccaagctgtggataagatattcaaatataaaaaagattgtgaatttgttttaaaaagtcttctaattttgtaaaaagamctaagataattgtccactaatcactcattaaatctcctccttagttctacttccacaaaagctattaccatctatgattaatttggatttcagaggaagaaaatacagtttgaggaaaatggattgttggagcaatctcaatgttaactacataaaatagcttattacttgaaaaatgaggatattgtatgaattttcgcaagtcaattggtagcaaaancgacatttaagtgattgtaaatatgtcatatataaaactatcttgtaaagatgttacagagatattatatgttactagcttctggattcagaaaaataactggaacagatttaagttgggtaattgtagtgtgtctaataattttaatacaaggtaaaaacattttctgttgaaaatcagttttaatattgtttggttttatttatattttgaaaatttaaggattcttgaatattcttaagtaaattgcaatttaatgcaattgtagttatactcagtaatatagttacmcttgattraagccattataaaggaaatgtaatcccatactgattatcttcacatttcttttggttaaagatcagtctatttcattgagataacagttcaggagaaaagttattgactacatgtatctatagtattgtctaagcaacaggagtttagtttgcatgttttttatttttgagagtacatcaacgtaatgaaatgtatttaaaattgtacccatatatacataatgatatatatatatatttatgttttmcagcagtgtttttccttggagatgattcaatcaaattgcaaagrggcacttctaattaattattgggaagtmcaagctaggaytattgttttcctgaacgtttgtgmcttgtagtgatctcttmcagacgtgggggtctggmcacttggaccttaaattggaaatggttaaaaaattgttatccaaagaatgacaatggtttgtttgccaagtctttttgttttgttgtgttttgttttttgagacggaatctgtcaccctgcactccagcctgggtgatagagtganactccgtctcaaaaagaaaaaaaaaaatcaacacctaaaaatttactttcttctagtcaatttatttcgatgtgcatcataaattaataacaaaaggggtagatattttattgagctatggttcctgaatcaaaaccacaatctggaggtttccgtctcttcataaaagaagttaaaactcagtgcatgttgctagacgtcatttaatgatcttcattcttctctgtccagagcatgtgtgaagtattaggccagaaagagagagataaataatcttttcccatgcacccctgctggtcacagaagctggctctttaaagtttgagtaactgtcactttgtcaggcatggttataaagtttccagaaagaactagtaaggagcattaatataagatttccccagatgccaattttgttttctgctatatctcactcctctttgaatttcctcatacaattttccatttaaaatggagaattcagctttcttgatcctataataaacacatttgtctttatttgatacaaaaaaaaaaaaaaagkgcggcc

SEQ ID NO: 23 - DNA, 2849 bp, Homo sapiens
  misc_feature (1)..(1): n equals a,t,g, or c
ngggctgcaaggacctgagctcagcttccgccccagccagggaagcggcaggggaaagcaccggctccaggccagcgtgggccgctctctcgctcggtgcccgccgccatgtgggccgtcctgaggttagccctgcggccgtgtgcccgcgcctctcccgccgggccgcgcgcctatcacggggactcggtggcctcgctgggcacccagccggacttgggctctgccctctaccaggagaactacaagcagatgaaagcactagtaaatcagctccatgaacgagtggagcatataaaactaggaggtggtgagaaagcccgagcacttcacatatcaagaggaaaactattgcccagagaaagaattgacaatctcatagacccagggtctccatttctggaattatcccagtttgcaggttaccagttatatgacaatgaggaggtgccaggaggtggcattattacaggcattggaagagtatcaggagtagaatgcatgattattgccaatgatgccaccgtcaaaggaggtgcctactacccagtgactgtgaaaaaacaattacgggcccaagaaattgccatgcaaaacaggctcccctgcatctacttagttgattcgggaggagcatacttacctcgacaagcagatgtgtttccagatcgagaccactttggccgtacattctataatcaggcaattatgtcttctaaaaatattgcacagatcgcagtggtcatgggctcctgcaccgcaggaggagcctatgtgcctgccatggctgatgaaaacatcattgtacgcaagcagggtaccattttcttggcaggaccccccttggttaaagcggcaactggggaagaagtatctgctgaggatcttggaggtgctgatcttcattgcagaaagtctggagtaagtgaccactgggctttggatgatcatcatgcccttcacttaactaggaaggttgtgaggaatctaaattatcagaagaaattggatgtcaccattgaaccttctgaagagcctttatttcctgctgatgaattgtatggaatagttggtgctaaccttaagaggagctttgatgtccgagaggtcattgctagaatcgtggatggaagcagattcactgagttcaaagccttttatggagacacattagttacaggatttgctcgaatatttgggtacccagtaggtatcgttggaaacaacggagttctcttttctgaatctgcaaaaaagggtactcactttgtccagttatgctgccaaagaaatattcctctgctgttccttcaaaacattactggatttatggttggtagagagtatgaagctgaaggaattgccaaggatggtgccaagatggtggccgctgtggcctgtgcccaagtgcctaagataaccctcatcattgggggctcctatggagccggaaactatgggatgtgtggcagagcgtatagcccaagatttctctacatttggccaaatgctcgtatctcagtgatgggaggagagcaggcagccaatgtgttggccacgataacaaaggaccaaagagcccgggaaggaaagcagttctccagtgctgatgaagcggctttaaaagagcccatcattaagaagtttgaagaggaaggaaacccttactattccagcgcaagggtatgggatgatgggatcattgatccagcagacaccagactggtcttgggtctcagttttagtgcagccctcaacgcaccaatagagaagactgacttcggtatcttcaggatgtaactggaataaaggatgttttctgttggacatgtactgaaaattaacacatgtagtagccttaaaattttagacttctcgaacatgaggctgttacagtaatttttttaacactgtgcattgtacttttctaccttaaaaaaatcagtgaggatatttatttaatgaacatcaattccttttaaattttcttagagaaatttctctgtggctcagttttaccacccataaagcggagacagtaatttatggttatcctttctgacccacaaagtatgaaaagttctgtaatctgtaaactcagttctgtaatctgtattattgagatgattaatataaagttgtattttcactgaaactgattgtcattgctgagttatgctatggtgatactttcacgcgggctataattttatgacaaggcatctgttacttcagctggccataaagtgccctcaacactgctgtgcagaccatcaccaccattcatctccagaattggtactcagtaccaaactgcaaactatagcgattcaaacaacagtgctccccaatttcaccactaccacgagcccatgacatctactatatatcatactgagtctgagaaagcgatgtaaccacaatagacacaaaccagacaatacgaaagaataaatacacgactccaccgaagcaacacaacacccagaagatcaaacaagactatgcgccaccacaccacccaaacagcaggaacaaagagaacctaagaaaaacaccacaaacaagaatctacacaacaaacgcaacatcaacaagatagccaaggatagactacacaaaaagccatagaggaacctcggactggtcaccaagagcagaacaaccgacaacacacaatacagtacaaacaagacaaacgctggacaagcgagtaaaaagatgaagaaaaaacgaagaatcaacaacaggagaagtatatgaaaacaacaccaacgcaagaacacaacagtctgaacgacagagacaaatactaaaacgacaaacgtcagctactattaaccgaaaaa

SEQ ID NO: 24 - DNA, 755 bp, Homo sapiens
  misc_feature (1)..(1): n equals a,t,g, or c
  misc_feature (733)..(734): n equals a,t,g, or c
natttcccgttcagttattccggtgacactatagaaggtacgcctgcaggtaccggtccggaattcccgggtcgacccacgcgtccgaactcctgaaacagtgaggacatctcacagaccagacaggagctggggctctgcatctcacagcggtgcctgtcagacaggaagaagtcccgcagaagtggcgtgtgggtcagggcctgcacgatgcagttcatgaagcatgtgttcccaaggttgatcagcccacgcagacctatggtgcagttcgaggtgatctttctccttttcgggttgtgcttcagcagttcaagctcccgtttggttggttcccaagttgaaaacttctctccaacgccttgcattttccaagcttttcgctgctcctccttggcgattatttccatgtctttgtcatagatgtagtcctggcacagaaaacagtagatgcctccgtacatcagatcaatggccaggttgtgccgcttcgccttcgcatgctcgtgaatatgcttctttgtgaaacagccgaagaagacacagtagaggcaggaatgcagcctgttgaggtggacgccacagacatggcagatacaggacttggccttgcgcttgcgggcctcagccgtgccgctccacacgaagcactggtagatggcccgcaggttctgcttccagttgtccaccttgaagctgcccaggtgcgagcagcccggcggcgctaccgccnnctcggcgtccatggcctcgcc

SEQ ID NO: 25 - DNA, 4129 bp, Homo sapiens
ccacgcgtccgctttttctcaggatgaatattttcctggccgactcattgatccttggtacaaataaacttctggaagacccagagagaggaaaacacaggagaaattgagcgatgtacgtacatcaaataccactactcctcagcaaccatccccaggaacctcactttcaatatcacgaagaccatccgtcaggatgagtggcatgccctacacctgcgcagaatgacggctggcttcatgggcatggcggtggccatcatcctctttggctggatcatcggcgtgctgggctgctgctgggaccgaggccttatgcagtacgtggcaggctgctcttcctcatgggagggaaaacagtggaattaaagagtgtctgccccagcccggcagggtgaagtaggatggggaaaacgttctcaccagaccctgggacttctatgctgcagcatcgtgacctgaggggtggatgcagttgccacagctctttgaggcaaaggccccgatgctctgtggacagcctcaggcttgggatggatttggcagtgaggaacttattgtaacagaagaaagtcatccaagatgcctgaggaaagaaaccttcaattgagccagccggctggaaaatgtggccaagaaaaccgcagagaccaatgttcggaggagaaaaccagaaagaggggcctgcctggcccctttgatcctttatggccgattccgtggacattgctgctcctcacgccggcagcctctcttgagtacctcaattgcagtctccagaccctcaccccgcaggcattcctgggtcggtgtcccagtcggtcacagtcatggatcctctgcagagcagtagaaagtcgggaggggcccgtgcccatggtcaggaaaggagcggcaggaggaaagaggagcatgagaactcagaagaaattgtacctactcagatgtggagtgaggatagacgttcccagattcaaaggcatcatgaagtgtcatgacaagatagaaaagactttgggctggccaagaaggaactggataaaattatgagtgaggtacagcaggtgggaacagtgtcactgaaccctatcaacagcagagcatgagaacgtgaattcctgctgctggggaggcaatgaaatgatatgggccttcagatgtctatgaatcctgacccaccgtgggtgccagttttcaagagggcttcccatcaaatattgtgcgcaaaggatggatggatgaaaggaagagtgagccaataaacgagggaacgccgggaaaggcagcctcaagccggtgggccctggcacccccaccgtccctgagcatcgagccggttcccgccccggcccgaactggcccgcgcgcgctcgcagccccgcggcggaacccgagggcggcggcagcggttccttgaacgagccggggaatctggagggagcacacaggaaaggcagagccgcgagctggaccagccgtgcaaatctctagaagatgacggtgttctttaaaacgcttcgaaatcactggaagaaaactacagctgggctctgcctgctgacctggggaggccattggctctatggaaaacactgtgataacctcctaaggagagcagcctgtcaagaagctcaggtgtttggcaatcaactcattcctcccaatgcacaagtgaagaaggccactgttttctcaatcctgcagcttgcaaaggaaaagccaggactctatttgaaaaaaatgctgcccgattttacatttatctggcatggatgtgactattgtaagacagattatgagggacaagccaagaaactcctggaactgatggaaaacacggatgtgatcattgttgcaggaggagatgggacactgcaggaggttgttactggtgttcttcgacgaacagatgaggctaccttcagtaagattcccattggatttatcccactgggagagaccagtagtttgagtcataccctctttgccgaaagtggaaacaaagtccaacatattactgatgccacacttgccattgtgaaaggagagacagttccacttgatgtcttgcagatcaagggtgaaaaggaacagcctgtatttgcaatgaccggccttcgatggggatctttcagagatgctggcgtcaaagttagcaagtactggtatcttgggcctctaaaaatcaaagcagcccactttttcagcactcttaaggagtggcctcagactcatcaagcctctatctcatacacgggacctacagagagacctcccaatgaaccagaggagacccctgtacaaaggccttctttgtacaggagaatattacgaaggcttgcgtcctactgggcacaaccacaggatgccctttcccaagaggtgagcccggaggtctggaaagatgtgcagctgtccaccattgaactgtccatcacaacacggaataatcagcttgacccgacaagcaaagaagattttctgaatatctgcattgaacctgacaccatcagcaaaggagactttataactataggaagtcgaaaggtgagaaaccccaagctgcacgtggagggcacggagtgtctccaagccagccagtgcactttgcttatcccggagggagcagggggctcttttagcattgacagtgaggagtatgaagcgatgcctgtggaggtgaaactgctccccaggaagctgcagttcttctgtgatcctaggaagagagaacagatgctcacaagccccacccagtgagcagcagaagacaagcactctgagaccacactttaggccaccggtgggaccaaaagggaacaggtgcctcagccatcccaacagtgtcgtcagagggtccccagggcattttcatggcaagtacccctctgcccccactccagcagtgcttcccaaagtgtgctctgtcacctgctttgcaatcggcttccattagcgcatgttttattttggtgtgacggttggccctcctaaacacggactttcctcaggctggttcaagacggaaaaggactttcttctgttttcttccaaagtgcaaccacagtggagagcccacggtgggcttagcctgcctaggcccttccatttctcttctttgaccgtgctaggaattccaggaaagtgcattcctgccctggtgaccttttcctatgtctaggctcctccacaggtgctgctattttgtgagctccggctcctgtttagcttttatttcagttctaacctcagtccagaaacatatgtgaggttgtttccctcttcagccacggctacaataccggaaaatgctagtttttatttatttttttaagtagtgcttcctaaatggtttgcatgagagccacctggggtacatgttgaaaacttatttggggtctaccccaaacctaataacccaaatttggggatggggcccaggaatatgcatttttaaaaagtcatctgcccttcccaggtgattctgtaagttgtccctcaactgtacttggagaaatcgtgttttaaagcagtagtccacaaagtattctgctcatgtgcccccaaaagtattttgaaaaatcatgtataccctcacccatctaagttgatatctaaaattttatctaagttggtatctaaaatttttcatgggaagttaaatagttgacaaagtatgtatttgctggtgtcgtgtaaatattggtattttaaaataaaaactgttacatcactattttaaacatatccagtacaatttaaatatcacaacaatttgacacccttcattcatttataaaaataaatgagctagttctttagtagttaaacatttcaaattggcttttctccttctgtatttccataccacttttcagccaagaatcctatcataatgtaatctattatgcccgacatctttttaatcaattcaccccattacttcttgtcaacaaaaaatataaatggaaattttttttttagctcttgctttaagtgtttgtttgttatctcagtccagaaccaatattatcgtaattaattattggtatataatgaaaacggtattaattcttggatgattaaaagtttttttattagaatgttaaaaaaaaaaaaaaaaaaaaaa

SEQ ID NO: 26 - DNA, 1458 bp, Homo sapiens
ccacgcgtccgggaattttcaaaagatccaaacagagacttcctgcatcttctgcctttccaacagaagcggtgatcgtctaagtatgagcctgtggcttcctttgtgcatttgagcatgctgtaattaagatgagatcagtttcttagaaaaagctttcctgaatccctctgacgttgcctgggatctttctgttgattcgtcttttctggagattgggacagagcatctgtggtccagggaagttagtcctctggcctcaattctgttgtggatgtgcagtgataagcgggcattgcgtgcctcgggggatgcctagttcgtggcttcctggctgttttgtccttctgtgtcttgtagctgtagggtgccagctcagggagtggggtgttggcggcgtttccgcggttggcctccttgctttgccgcacctccaggttctgggcatgagaggccgtggcctcatttctggtggataacctttttagtttaatagcatctttaattagatcacagcattgaattcaaaatttcttctgcaaagaaagttgtggggcataagacaccgggaatgagggaggaggaagacagttgtgttttctctttaaaccttgagctctagccgatgcatttgtcaggaaatacagcactttgtcttaagaaaacaaggaaggaggccgggcgcagtggctcacgcctgtaatcccagcactttgggaggccgaggcgggcggatcacctgaggtggggagtatgagaccaccctgactaacatggagagaccctgtctctactaaaagtacagaattagccgggcgtggttgcgcatgcccataatcccagctactgaggagacttgaggtaggagaatcacttgaacctcagcggcggaggttgcagtgagtcgagatcgcgccagtgcactccagcctgggcaagaagagcgaaactgggtctcaagttaaaaaaagaaagcaaggaaagagtaatttacaacgaaggaaaaaaacccacagcacacccttcgcggctgtcagcgctctcctgatgtcacagtggctgcgtgtccttggggtgggtgaggtgtggggagcccagcccctggccctgcctcccgcgccccgctccccttctctctcttactcggttaagccatagcgaggcctccgctcgtttcagatatgaatttgttttatagattataaatatgcatatacagtgtatgtataaagcagaatgcctgcctttcctggttattttttgtaccatattgtaaattatattatttattctttaccaattttgggaataaaaggtgttttggttatttaatataataagagctgttaaacttctgtttaaatttccagttcaacttgtaaatgtttttattgtgcataaatacatactaatgttgatctaaaaaaaaaaaaaaaaaaaaaaaaaaaaaaaaaaaaa

SEQ ID NO: 27 - DNA, 1674 bp, Homo sapiens
  misc_feature (1649)..(1649): n equals a,t,g, or c
  misc_feature (1663)..(1663): n equals a,t,g, or c
  misc_feature (1665)..(1665): n equals a,t,g, or c
caagttggtacgcctgcaggtaccggtccggaattcccgggtcgacccacgcgtccggtcgaagataggttcgagacggtggatgttgcagctgatcatgcagttgggttcggtgctgctcacacgctgccccttttggggctgcttcagccagctcatgctgtacgctgagagggctgaggcacgccggaagcccgacatcccagtgccttacctgtatttcgacatgggggcagccgtgctgtgcgctagtttcatgtcctttggcgtgaagcggcgctggttcgcgctgggggccgcactccaattggccattagcacctacgccgcctacatcgggggctacgtccactacggggactggctgaaggtccgtatgtactcgcgcacagttgccatcatcggcggctttcttgtgttggccagcggtgctggggagctgtaccgccggaaacctcgcagccgctccctgcagtccaccggccaggtgttcctgggtatctacctcatctgtgtggcctactcactgcagcacagcaaggaggaccggctggcgtatctgaaccatctcccaggaggggagctgatgatccagctgttcttcgtgctgtatggcatcctggccctggcctttctgtcaggctactacgtgaccctcgctgcccagatcctggctgtactgctgccccctgtcatgctgctcattgatggcaatgttgcttactggcacaacacgcggcgtgttgagttctggaaccagatgaagctccttggagagagtgtgggcatcttcggaactgctgtcatcctggccactgatggctgagttttatggcaagaggctgagatgggcacagggagccactgagggtcaccctgccttcctccttgctggcccagctgctgtttatttatgctttttggtctgtttgtttgatcttttgcttttttaaaattgttttttgcagttaagaggcagctcatttgtccaaatttctgggctcagcgcttgggagggcaggagccctggcactaatgctgtacaggtttttttcctgttaggagagctgaggccagctgcccactgagtctcctgtccctgagaagggagtatggcagggctgggatgcggctactgagagtgggagagtgggagacagaggaaggaagatggagattggaagtgagcaaatgtgaaaaattcctctttgaacctggcagatgcagctaggctctgcagtgctgtttggagactgtgagagggagtgtgtgtgttgacacatgtggatcaggcccaggaagggcacaggggctgagcactacagaagtcacatgggttctcagggtatgccaggggcagaaacagtaccggctctctgtcactcaccttgagagtagagcagaccctgttctgctctgggctgtgaaggggtggagcaggcagtggccagctttgcccttcctgctgtctctgtttctagctccatggttggcctggtgggggtggagttccctcccaaacaccagaccacacagtcctccaaaaataaacattttatatagamaaaaaaaaaaaaaaaaagggcggccgctctagaggatccctcgaggggcccaagcttacgcgtgcatgcgacgtcatagctctntccctatagaagtngnaaagggttc

SEQ ID NO: 28 - DNA, 2005 bp, Homo sapiens
ggttgctggcccaggtgagcgggcgcgctggtccaggtgagcgggcgcgtccccgcgacggcgctgcctgcccgaggcggttcacgtaaagacagcgagatcctgagggccagccgggaaggaggcgtggatatggagctggctgctgccaagtccggggcccgcgccgctgcctagcgcgtcctggggactctgtggggacgcgccccgcgccgcggctcggggacccgtagagcccggcgctgcgcgcatggccctgctctcgcgccccgcgctcaccctcctgctcctcctcatggccgctgttgtcaggtgccaggagcaggcccagaccaccgactggagagccaccctgaagaccatccggaacggcgttcataagatagacacgtacctgaacgccgccttggacctcctgggaggcgaggacggtctctgccagtataaatgcagtgacggatctaagcctttcccacgttatggttataaaccctccccaccgaatggatgtggctctccactgtttggtgktcatcttaacattggtatcccttccctgacaaagtgttgcaaccaacacgacaggtgctatgaracctgtggcaaaagcaagaatgactgtgatgaagaattccagtattgcctctccaagatctgccgagatgtacagaaaacactaggactaactcagcatgttcaggcatgtgaaacaacagtggagctcttgtttgacagtgttatacatttaggttgtaaaccatatctggacagccaacgagccgcatgcaggtgtcattatgaagaaaaaactgatctttaaaggagatgccgacagctagtgacagatgaagatggaagaacataacctttgacaaataactaatgtttttacaacataaaactgtcttatttttgtgaaaggattattttgagaccttaaaataatttatatcttgatgttaaaacctcaaagcaaaaaaagtgagggagatagtgaggggagggcacgcttgtcttctcaggtatcttccccagcattgctcccttacttagtatgccaaatgtcttgaccaatatcaaaaacaagtgcttgtttagcggagaattttgaaaagaggaatatataactcaattttcacaaccacatttaccaaaaaaagagatcaaatataaaattcatcataatgtctgttcaacattatcttatttggaaaatggggaaattatcacttacaagtatttgtttactatgaaattttaaatacacatttatgcctagaaggaacggactttttttttctattttaattacacataatatgtaattaaagtmcaacataatatgttgtttctctgtagcccgttgagcatatgagtaagtcacatttctattaggactacttmcaaggacaaggtttccatttttccagttgtaaaattggaaccatcagctgataacctcgtagggagcaaccccaggatagctaagtgttatgtaatatgcctagaaggtgatgtgaatgcgattcagaagcatagccactcccattttatgagctactcacatgacaaatgtcatcttttgctataacctttgccaagttagagaaaagatggatttaatgagataaatgaaaagatatttamcctaatatatcaaggcactatttgctgttatgctttgttatttatttcccagcacttgttccttattgtagattttttaaagactgtaaccttttactaactgtggtcttactaaaatttgtgcttgatactgcttttcaaaaagcctttaattagagccaaaaggatggaaaaggcaagatataaatgccttttatagatctcttatttacattgaaaattattaccatatgtttagagcaaatccaagaaaacttcaacagcttctgaagatgtctatgaatgttgaaaacttttcaatstcttggratgctcakttaattcgcagaccggcttaacggattaaacgccccccccc

SEQ ID NO: 29 - DNA, 1472 bp, Homo sapiens
  misc_feature (1)..(1): n equals a,t,g, or c
ncttagctgtagatagaggcggcaacctcggaagtgcggagcgggtgggcctatatagatgttgaggtgcggaggccgtgggcttttgttgggcctggctgtagccgcagcagcggtaatggcagcacggcttatgggctggtggggtccccgcgctggctttcgccttttcataccggaggagctgtctcgctaccgcggcggcccaggggacccgggcctgtacttggcgttgctcggccgtgtctacgatgtgtcctccggccggaggcactacgagcctgggtcccactatagcggcttcgcaggccgagacgcatccagagctttcgtgaccggggactgttctgaagcaggcctcgtggatgacgtatccgacctgtcagccgctgagatgctgacacttcacaattggctttcattctatgagaagaattatgtgtgtgttgggagggtgacaggacggttctacggagaggatgggctgcccaccccggcactgacccaggtagaagctgcgatcaccagaggcttggaggccaacaaactacagctgcaagagaagcagacattcccgccgtgcaacgcggagtggagctcagccaggggcagccggctctggtgctcccagaagagtggaggtgtgagcagagactggattggcgtccccaggaagctgtataagccaggtgctaaggagccccgctgcgtgtgtgtgagaaccaccggcccccctagtggccagatgccggacaaccctccacacagaaatcgtggggacctggaccacccaaacttggcagagtacacaggctgcccaccgctagccatcacatgctcctttccactctaagccgtagcctcttctgttaataacacacagagagctctgccaagcacctgagtaggcccttgacacttgtgtgccctgggatgcctcctggcgcgaatcaggaggttctggaaggactctggctatattctgcaaatgtggctcatgccccttaccgtggctcggcgttgtggtgcctgagggacagccggccacctgcccagtactggtcagcttttcaacactattccctttgacctactggccatcttcctcacagccctcagatatcaacgggcacaaataagaccaactcaatttccacttgaatttacaaccaaaagcctgctgagttgattacagctgggccaatacagtacgaggcaataacaaattagtgtgggttgattctggaattggaaaagcttttgcttgtatggatacagcaaatccagatgtctctgaacaaagcaacaatttaaagcaacgacattttctgtcctttaagcacttaaaatcaggtgtggtgtgttttcaaaggcagaagtctgcattttgagcaaaaggtggcttcccagctctaacaaggtaactggttagcatgacattaaagcttgggcaaggcttcaaacttaaaaaa

SEQ ID NO: 30 - DNA, 812 bp, Homo sapiens
  misc_feature (17)..(17): n equals a,t,g, or c
  misc_feature (108)..(108): n equals a,t,g, or c
gaccatttttagccaancttggaattaaccctcacttaagggaacaaaagctggagcttccaccgcgttggcggccgctctagaactagtggatcccccgggctgcangaattcggccacgagaggacttccccacctcatgcagctatttgggccgtggcgtctgaaatttattatttcagagtcacccctttratgaccttggcagtgractgcagtcatctgtttaggcctttccatggcccacgtcaatgccgttatttctgtttgttgcacatttgatttccttgttgttggcatttagaaggccccctgcttcccagatcacaccacgggcatggaccacagagattgcatcttgtgagtctgtagaaatggtcaaggccttgtcctctcttaggtccagagctcaggtgaatgcagattttcccggccatctgtgctgaagtccctgtggggaggctcctggctggtttcctgtaggtagacagctacacgtcctgcccttcattggcttcttttcatgaagctcctgccatctacaaaacatgtctcccttcttgaatcacatctctgttattgaagctctggaagtcaaccgggcgtggtggctatgcctataatcccagcattttgggatgccggggcgggtggatcacctgaggtcaggagttcgggaccagcctggccaacatggcgaaaccccgtctctaatacaagtgcaaaaattggccaggcgtggtggtcactgtgctccagcctgggtgacagagcgagctccgtctcaaaaaaaaaaaaaaaaaaaactcgag

SEQ ID NO: 31 - DNA, 1756 bp, Homo sapiens
ggcacgagttttcctctcacatatatattgttttgtgtccctggctaaagtacaagctttttgaaggcagaaaccatgtctttggtttcttttgtatttcccatagcaccttttactgtgagagtgggcacacagtatatgttgtggaatgacatcctgagtgatccctccctggctgggcctcagattaaattccctgaaatggaacagtcctaaccaacacaggacaggtattctccatctggcatgttggttgctcctttcaacctgctatttgaaatggctcccttcaacatctttctgttcccacagtggggcttgctatggctaatgctgtacttgctgtatgtgttccaggcgagtctgcggacaccagaactgacctgggagcgagtgagatctcaagttgaccagtgatatggcctgatggcaagaggatagtactgctggcagaggtaagctgagactggcaaaaatactcccccacaacaggagagactgcaatacccaggtcccctcctcctcatgttctcgaatactttcaactcctctgttaagcacaagtttgactactttcccaatggattttacttctaattgtgaaagatcttttcattcagcaattaagaaactattttggttccccacttttcaccaattatcctgtctctccacgtcaatccacaggttgagttagataattattactatagaaggaattcacagatagaaccagtgccactttgagtgatgcatacaaagagataatgtcacttgtgggatgttttaatcactaagcacaaagtagatatgcccgactgtaaccaggactatcttaggcaagttctgggaatgtatgtttttactgatagattccctgtttttgaagtccattcccttgaattgagccagatgagtataggtacctacctagatatcaattgctcaattgatatttccccatcctagctcctagctcacattgacactattgactttcattttattggcttccatgtcagtgtttgaccacttttcctttcttaaaagctcctcttccctagtcctggattcctgacagctataatattagatgccttctattcttaccttgaagctttctcttcttcagagaaagataccaaaatatcaaggaggataataatacttttctcaattttgattttcagttggttttttttctttttttatattaaagaacctgaatatgaaaatgtaaaatatacattgtctttatctaggggcccataagttaggagtttttagtgtccttactgtttcttcacattttcctcactttatctcatcttctcagatacttcagggcatttgtaaagggactgaactatttcttcacaaggaaggagtatatatgaggaggagatgggcagattgccaaatatgcattaatagctttgatgtcagtctgctgactgatgacttgtttctagctgccctaggaggtcccacctggtaattttggtgacaaaagcaagtaccatgggtgtttttggctagatggttgagcaaaaaggtggtcaggcttcataggaaacaaaataggaaagggtggcattgggggcaatttctagttcttctactgtctgaatcaccaactcaaaatacaaggctgacaatgctgtctttgaattcaggagaagcaaactgaaggagaagcacaaaaatcatcacagctatggtgaaaccctgtctctacaaaaaaaaaaaaaaaaaa

SEQ ID NO: 32 - DNA, 1675 bp, Homo sapiens
cttaaagacgccaggtagagacacacagaacgtatgtattaagaatatcctctctgggctctgaaattttaggagtgattcttatccactccaagttgtaagtatttgtagaaatttgtgcaaacaaacaaaaactatcaaatgaaaagaaaatgtactcaacctaacttatagttagcagctggaattctcaactcttccctgccagcactataccacagtgtggaagaaattagtcaaatgcttgttttcctgcttctcttttcaactgttactgtgctttgtttgaaagtagttttctctctcaaagccgttgcttatatcgttaagaatgaaggtttgtgtttaaaatttattgcattgcaaagggtagtttcactgaagtcatgcaccattaaataagatgaaatatttgtatttattgtcctacttcctaagccgtaacttcttttcctctgtgaatttgcattgagtcactcatgctacactacatcgctttagtatttgagatggcatttatgtttcctctcgtttatcatgaaatggggtcagattccatcagattccacctctgtcaggtggactcttgtctgccttccatgatgagattttttttctccttcccctttctttaagagaggctgacagatctaggtgtcaatcaattggaaaccagtctctgattttttttcattagttattttctatcattagtttcactgtgtaaattagatatcaactgcacttctttaaaaaaaaatacatctccctattacctccttgaaagatttacttctgtaggcctttttcaataggctcatgactgcagacaaggaaaaaaaaagtaaaaacaaaaacagtatgtgcctgaaaatgacaaaaaaaaaatttgtaacatttaaaaaagaaacctgaatagcctttaattctttaataatacacttaaattttatgtaaatcggttttcgccacgtgtgtttgttcacattctaaatgacttaatgggattctcacggtctgtgtctttgtgtcacgtgtataaaatgggcttgtgatgtaagcgtttcatctggtcagtggttcctttgatattgtactgctgctgggagtgggctgtggaacctgccttcgggtaactgggttcctcttgggtagattggagagatgggggtgggcgtgggcaaattctcacacatgttttcttaacctatttgcagaaactttcaaaaggcatttgattaaacctcttggcagtacagtattcttgtatttgttaacgtctgtgtttaggtactggtacctttttgttttaaaatgttctaagtgttggctttaaagtgaatttatctttagtatgatagttatatgaaaattataggatttgtgtgcagagaatttttttataaagtgctttgtaaaaaaaaaaaaatgtattctagcttttgcggtacatatgtgtgataactttaatacccatgacagttaagtgcaattatttcatcactctaaaaatgctatttttgtgtcagttcctgcaggtgttttcatgtctttgcaaagtgacacattttgatgccttcttgataaagtggtagacattttgtagctttctagaaactttgtattcatacggtatcaatgaaaaataaagaaaatgaaagtgtgggtcaaaact

SEQ ID NO: 33 - DNA, 910 bp, Homo sapiens
ggcagagctggccttcgactcgctatgtccactaacaatatgtcggacccacggaggccgaacaaagtgctgaggtgaggaccccagcgtcgtgggcacgggttcgggttgtgggtgtggatcggggccctgggaagcgcctgtctatcccgggggcaggacctgagcgcccctgaccctcgagcctgtcgcaggtacaagcccccgccgagcgaatgtaacccggccttggacgacccgacgccggactacatgaacctgctgggcatgatcttcagcatgtgcggcctcatgcttaagctgaagtggtgtgcttgggtcgctgtctactgctccttcatcagctttgccaactctcggagctcggaggacacgaagcaaatgatgagtagcttcatgtgagacttgccctacagaacaagtgactcttgagtaaggggtggggggaccccagcctggccatcctagactgacacctctctcctgtcttcatgctgtccatctctgccgtggtgatgtcctatctgcagaatcctcagcccatgacgcccccatggtgataccagcctagaagggtcacattttggaccctgtctatccactaggcctgggctttggctgctaaacctgctgccttcagctgccatcctggacttccctgaatgaggccgtctcggtgcccccagctggatagagggaacctggccctttcctagggaacaccctaggcttacccctcctgcctcccttcccctgcctgctgctgggggagatgctgtccatgtttctaggggtattcatttgctttctcgttgaaacctgttgttaataaagtttttcactctgaaaaaaaaaaaaaaaaaaaaaaactygrgggggggcccggaacccaattcsccggatagtgagt

SEQ ID NO: 34 - DNA, 821 bp, Homo sapiens
gttttgagtgtgtgaattacatatatgaacatctgaraaaatcctataagcagtttaatcaactgttccactccactccaagtgagtccataggcagaattgagttatggggagagcggcctagtaataattggtttgcgtaatacaaagttctactgggtagtgatgttgtagaagttcatatagaatcagctgagctttcagaaatggtgaaagggtggtaatagtcataacttagattgtaatttttttcccataggcttttaaaaaatattcatgaggttctttttttatttcaatagtttttggggaacaggtggtttttggttacatgataagttcttcagtggtgatttctgagattttggtgcacctgtcatgtgagcagtatgaactctactttatgtgtagtcttatccctcatgtgtatgaactccaccttatgtgtagtcttatccctcacccactcctgcccttccccacaagtccccaaagtccattatatgatctttatgcctttacatcttcacagtttagctctcacacaacttattataatttataagtaagccagcattggatatagttgtattccattattaatttaagaaaccttatgcaagtaattattagtcatcatcccaaaaaaaagggagaacagggttagattcagaatactttgataagagctaaatactatcatgagtgctgtcagtctgtagtaactttccattggtattctatgtcttttaggcttacagatactttttacactcttacaaaatgtgcacaagaagaagctgcagctcagagctcgtgcc

SEQ ID NO: 35 - DNA, 981 bp, Homo sapiens
acggaagcgcagagcacggaccccgccccctcgcggccccgctcgtgacgtcgcggggggcgccggcctccgcccggccccgagggcaggctctccccggaggctcagccccctctgctccccatgggcaactgccaggcagggcacaacctgcacctgtgtctggcccaccacccacctctggtctgtgccactttgatcctgctgctccttggcctctctggcctgggccttggcagcttcctcctcacccacaggactggcctgcgcagccctgacatcccccaggactgggtctcttttttgagatcttttggccagctgaccctgtgtcccaggaatgggacagtcacagggaagtggcgagggtctcacgtcgtgggcttgctgaccaccttgaacttcggagacggtccagacaggaacaagacccggacattccaggccacagtcctgggaagtcagatgggattgaaaggatcttctgcaggacaactggtccttatcacagccagggtgaccacagaaaggactgcaggaacctgcctatattttagtgctgttccaggaatcctaccctccagccagccacccatatcctgctcagaggagggggctggaaatgccaccctgagccctagaatgggtgaggaatgtgttagtgtctggagccatgaaggccttgtgctgaccaagctgctcacctcggaggagctggctctgtgtggctccaggctgctggtcttgggctccttcctgcttctcttctgtggccttctctgctgtgtcactgctatgtgcttccacccgcgccgggagtcccactggtctagaacccggctctgagggcactggcctagttcccgacttgtttctcaggtgtgaatcaacttcttgggccttggctctgagttggaaaaggttttagaaaaagtgaagagctggaatgtgggggaaaataaaaagcttttttgcccaaaa

SEQ ID NO: 36 - DNA, 1038 bp, Homo sapiens
  misc_feature (2)..(2): n equals a,t,g, or c
gnaattcggcacgagttaatgtataaaatatttctataatgaattttaatgggaattagagcatcatagaaaaaatgctcttactgttgaaaacattatttgttacattttggtcaactaatctttcaataacttttagtaactataatgttaagttgtaccagtggcagtcttatatagtaaatggcagctgacagcatgaaaataacatatctaatattttgtgactatcttattaggaaaatcagagaatttcaaaaccttgttagtttttagggtatagtcacattttataaatgtgcggtatatttatacatgatttgacgtttgtgwaaatattttccctggacttttattttagatgagatctacagtgtaggcaaacttatataatctgtcaactccattagtgtcatagtcagactcatccccatgctaaaattatagttgtkaaaatacgcttttgtaaatagttgtgttaggtcattatcaccaagtcttcaaggkattacattataaaaaccttggkttttattcttgtgaatamccgttttttccatgcaaagttaaaattcttcagcctttaatttttttattaatatataaggatgtgatgagtatgactacaaaacaggaaaaaataaacagatttcgtttgtggcttttgctaaattgttacctgacaaaatcttagccagttcttcattttcgttttgagatgaagatacttagttttagtccaggggctgggcgcgatagctgatgcctgtggtcccagtgctttgcggggccgaggcaggtggatcacttaaggtcaggagtttgagaccagcctgcccaacatggtgaaacgttgtctctactaaaaatacaaaaattagacaggcgtggtggcacacatctgtaattccagctactcaggaggctaacacaggaaaattccttgaacctgggaggcagaggttgcagtgagccattgcactccagcctgggcaacacagtgagactcttgtctcaaaaaaaaaaaaaaaaactcga

SEQ ID NO: 37 - DNA, 843 bp, Homo sapiens
ggcagctgtccaccgatcccggccaccgcccccggccacccccaccccgcgagcccatggaggctccgggaccccgcgccttgcggactgcgctctgtggcggctgttgctgcctcctcctatgtgcccagctggctgtggctggtaaaggagctcgaggctttgggaggggagccctgatccgcctgaatatctggccggcggtccaaggggcctgcaaacagctggaggtctgtgagcactgcgtggagggagacagagcgcgcaatctctccagctgcatgtgggagcagtgccggccagaggagccaggacactgtgtggcccaatctgaggtggtcaaggaaggttgctccatctacaaccgctcagaggcatgtccagctgctcaccaccaccccacctatgaaccgaagacagtcacaacagggagccccccagtccctgaggcccacagccctggatttgacggggccagctttatcggaggtgtcgtgctggtgttgagcctacaggcggtggctttctttgtgctgcacttcctcaaggccaaggacagcacctaccagacgctaatctgacccctttgggcctggactccatcctgaggggaaaggaggatgcagagggtggcctctgggcacccttgtgggtaagcggggggcgggggcgggaaaaactctggccgccagtttttggctcctgcgggcaccaagcaggccaagtgtttaatgcctgacatctcctcctgtcctgggcctggaacctgcagctgagaaaatccctcaaccacctcgtctcctccatcgcccctgctgggccccccagcctgacagtgggttg

SEQ ID NO: 38 - DNA, 1061 bp, Homo sapiens
ggcacgaggattctaggacagggatgggggtgcagcactgatccaggacccagaatggaggcatcatggagggtccccggggatggctggtgctctgtgtgctggccatatcgctggcctctatggtgaccgaggacttgtgccgagcaccagacgggaagaaaggggaggcaggaagacctggcagacgggggcggccaggcctcaagggggagcaaggggagccgggggcccctggcatccggacaggcatccaaggccttaaaggagaccagggggaacctgggccctctggaaaccccggcaaggtgggctacccagggcccagcggccccctcggagcccgtggcatcccgggaattaaaggcaccaagggcagcccaggaaacatcaaggaccagccgaggccagccttctccgccattcggcggaaccccccaatggggggcaacgtggtcatcttcgacacggtcatcaccaaccaggaagaaccgtaccagaaccactccggccgattcgtctgcactgtacccggctactactacttcaccttccaggtgctgtcccagtgggaaatctgcctgtccatcgtctcctcctcaaggggccaggtccgacgctccctgggcttctgtgacaccaccaacaaggggctcttccaggtggtgtcagggggcatggtgcttcagctgcagcagggtgaccaggtctgggttgaaaaagaccccaaaaagggtcacatttaccagggctctgaggccgacagcgtcttcagcggcttcctcatcttcccatctgcctgagccagggaaggaccccctcccccacccacctctctggcttccatgctccgcctgtaaaatgggggcgctattgcttcagctgctgaagggagggggctggctctgagagccccaggactggctgccccgtgacacatgctctaagaagctcgtttcttagacctcttcctggaataaacatctgtgtctgtgtctgctgaaaaaaaaaaaaaaaaaaaaaaaaaaaaaaaaaaaaaaaaaaaaaaaaaaaaaaaaaaa

SEQ ID NO: 39 - DNA, 601 bp, Homo sapiens
gctgccaggaattccggcacggggaacagtgtaatattgaagcaaatgctgtataacaaccacctggaagcccctcatgtatctctttttgaaaacactcctctctttctccactctaatgatgaccaccgccttgtcttttatggtaatcactgttctttgggttttattactgcatttattggctaatatatgcatccctagaaaatgtagttttgcctgcttttatataaatggaatattactgcatgcagtcttttgatttgtgattgttttgctctaaggcttgtaagggtcatccatgttttgcatatagtttgtttattgtcattgccatagagtaaatcattgtatgaatatactgcagtttatttactgttgacatatgtttcagttgtttttaactactaggaaatgctactctgtacattcttgtatatgtaccttggtgcacatatgtatgtttttctagagtatatacagtggcatgggattgctgaattaaaaggtttgtatatcttatactagaagataataaaaacttttcctgatggattctgccaattcaaaaaaaaaaaaaaaaaaaaaaaaaaaaactcga

SEQ ID NO: 40 - DNA, 1411 bp, Homo sapiens
  misc_feature (1395)..(1395): n equals a,t,g, or c
  misc_feature (1397)..(1397): n equals a,t,g, or c
  misc_feature (1401)..(1401): n equals a,t,g, or c
  misc_feature (1408)..(1408): n equals a,t,g, or c
ccggtccggaattcccgggtcgacccacgcgtccggcgtgaaccaccgtgcctggccggaagtctttaaaaaataaagtgattctactcttctaagcttacagagaccagaccaggtgaatgtaactggggaaaatcaagatggtacctctctgcattatcccgccagacactgtattttatgcattcatgtctaggatacagtgtgaaaattaaaaagtttagagggcagatgcaattgtggcaagtgacctgccaataaagcaggtgcagctatagaagctggcataggtatatccttaatggtgctttctccctgggcttgtctttttgttgtttttttcccctatattcagagctccttgagaagtgataaacacctccagctttctaacatcctccccacaccatctcaccatatccatctcccagcatccatctgcattcagctaagggcgggaaactgacctagtgcctgtgttgcagaccatttctgaggtctccaccatccaaggaggcacagccgtcattactgtcctccatgccttcagcagcccccctcacagctaaggtacataccaccccttctgccgcgcctccacccctggcaccaaggtcttctgctgcttatgtctaaagggatcacctatatttaactgcctcagtgacctaacctctttcttctcatgtgccagatgttaagatgaaggaggaatacmacacatactcaagcctcagcctgtttagttgttttcactggggctcgcttttctgggacggtatttattatcagactggcaagcctaactccataggtttacaggaagtagggatatttttataaaacaattgtgtcctccccacattttgctatgttaatatttgcttctaacaatttgcagctgtttcactttttcctcatttgtctctaagttgaaggctttgttggaggggacagagcacaggaacagccttgacagtctgtaattattgtacagatattttaatagcatataaataagtatattccttttattttgaaacaaaaatgatcagacactgccttttgtgtgtttgctgcctgtggcatccttttttaaaaagactgttacatattaaaatagtgtacatatataaatattacctcttttgctgtacagttgtgatagagactgaagattttattttttgtgtgctttttataagaaaaaaattaatacactaaagaatcttgctgatgtgattgtaatgtacctatgtaacttatttacttttgaatgttcttctgtatctttaaaccttttattaaataaggttttaaaaattcaaaaaaaaaaaaaaaaaaaaaaagggsggccsctytaraggatccaascttgcgtacgcgtgcaacganancagngtcgagnggt

SEQ ID NO: 41 - DNA, 1554 bp, Homo sapiens
  misc_feature (695)..(695): n equals a,t,g, or c
  misc_feature (874)..(874): n equals a,t,g, or c
  misc_feature (1190)..(1190): n equals a,t,g, or c
gctttaatagtgtacacttacacatctggaaggaagagagttccatatggcagggatgattgggacaggagggatcttttgataactttgtgtgagcatgaaaatcgaatggggaagggagagctgtgaaaaaaaaatgttatctctttttttttgcttctggaaacccagctttttggtcagccgtcttgtgatttggctgggcctggtttgtgggggtcgctctctgagttgggtagctcttggagaagattatctgggaactcccatccttatcccaaacatacaccaaacctgcccccatccaccattatgggaattagtaccagagcatccttgcagattagttctcattttctctctttgtgagcacacacacatcaggtagagttccagaaacccagctttaggacactgttcacatatcacaggaggagcaaggacatgaatacaagagagctctttcctgaccagcagtgggargtggttgtactatctatttawttgtttattwatttatttattttttgagatggartctccttctgtcacccaggctggagtgcagtggcatgatctcggctcactgcaatctctgcctcctgggttcaagcagtcctcctgcctcagccccccaagtagctgsgattacaggctgcaccaccatgccccgctaatttttgtatttttagtanagatggggtttcaccatgttggccaggctggtctgtaactcctgamctcaggtgatccacctgccttagcctcccaaggtgctgggattacaggtgtgagccaccgtgcccggsctggttccactatttattaaaatgtatatatgtgttttycacttttttggtaggcattttattgntaataatttggaaattaaaaaaatttctccacaagcttattttttgtggagacaaggtctccctgtgttgcctaggctggtcttgaattcctgggctaagtgattggtctgccttggcctctcaaagtgctggggattacaggcataagtcaccatgccctgtttgscagcaagktttawackgctctttttggtagggawwtkctmaggtwcagtgatagagaacatgkagttgtggtgggawacagtggctyatgactgtatccgcactttgggaggctgaggcaggaggattgcttgaggctgagagttgagnacaggcctgggcaacatagcaagacaccttctctaaaatgaaaaaaattagctggatgtggtgtcatgtacctgtagtcccagttgcttgggaggctgaggcaggaggatcacttgagcctgggtgttcaagataggcctggtcaacacagcaagaccccttctctaaaaatgaaaataaaaaaattagctggttgtggtggcatgtacctgtagtcccagttacttgggaggctgagacaggaggattgcttgagccaggggtttgaggctgcagtgagctatgactgctcccctgcaccccaggctgggtgacagagtgagacccagtctctaaaataaaaaaaaaaaaaaaaaaactcgta

SEQ ID NO: 42 - DNA, 1276 bp, Homo sapiens
gtgagtgtgtggcactggtggcctggagccaaatttagcttgggtgagagttgacaatggtagttttccttcctcaagcccctctgtgcccctagagcaccctggctgtggctgcctccttcatccaagagcagagtccatgttgggccaggagacttcagatccatgtcctggtgctgcctctggctttgtctttcctcagtgggcaggactgggtctgctggtccatctttacccttctctgagctatgcagccttggcctgctgcgtctccggcctgtattctctccccttcactcaggccctgggaaaccagcccagtttctkgcaggagaggcagaggaggtcaatgcctttgctctgggcttcctgagcaccagcagtggtgtctctggagaagatgaagtagagcccttacacgatggagttgaagaggcagagaaaaagatggaagaagaaggtgtgagtgtgagtgaaatggaggcaacaggagcacaaggacccagcagggtagaagaggctgagggacacacagaggtgacagaagcagagggatcccaggggactgctgaggctgacgggccaggagcatcttcaggggatgaggatgcctctggcagggcagcaagtccagagtcggcctccagcacccctgagtctctccaggccaggcgacatcatcagtttcttgagccagccccagcgcctggtgctgcagtcttatcttcagagcctgcagagcctctgttggtcaggcatccccctaggccccggaccaccggccccaggccccggcaagatccccacaaggctggactgagccactatgtgaaactctttagcttctatgccaagatgcccatggagaggaaggctcttgagatggtggagaagtgcctagataaatatttccagcatctttgtgatgatctggaggtatttgctgctcatgctggccgcaagactgtgaagccagaggacctggagctgctgatgcggcggcagggcctggtcactgaccaagtctcactgcacgtgctagtggagcggcacctgcccctggagtaccggcagctgctcatcccctgtgcatacagtggcaactctgtcttccctgcccagtagtggccaggcttcaacactttccctgtcccacctggggactcttgcccccacatatttctccaggtctcctccccacccccccagcatcaataaagtgtcataaacagaaaaaaaaaaaaaaaaaaaaaaaaaaaaattgggggggggcccc

SEQ ID NO: 43 - DNA, 2084 bp, Homo sapiens
  misc_feature (2075)..(2075): n equals a,t,g, or c
  misc_feature (2083)..(2083): n equals a,t,g, or c
ggcacgaggagttgtgcagatacctggctgagagctggctcaccttccagattcacctgcaggagctgctgcagtacaagaggcagaatccagctcagttctgcgttcgagtctgctctggctgtgctgtgttggctgtgttgggacactatgttccagggattatgatttcctacattgtcttgttgagtatcctgctgtggcccctggtggtttatcatgagctgatccagaggatgtacactcgcctggagcccctgctcatgcagctggactacagcatgaaggcagaagccaatgccctgcatcacaaacacgacaagaggaagcgtcaggggaagaatgcacccccaggaggtgatgagccactggcagagacagagagtgaaagcgaggcagagctggctggcttctccccagtggtggatgtgaagaaaacagcattggccttggccattacagactcagagctgtcagatgaggaggcttctatcttggagagtggtggcttctccgtatcccgggccacaactccgcagctgactgatgtctccgaggatttggaccagcagagcctgccaagtgaaccagaggagaccctaagccgggacctaggggagggagaggagggagagctggcccctcccgaagacctactaggccgtcctcaagctctgtcaaggcaagccctggactcggaggaagaggaagaggatgtggcagctaaggaaaccttgttgcggctctcatcccccctccactttgtgaacacgcacttcaatggggcagggtccccccaagatggagtgaaatgctcccctggaggaccagtggagacactgagccccgagacagtgagtggtggcctcactgctctgcccggcaccctgtcacctccactttgccttgttggaagtgacccagccccctccccttccattctcccacctgttccccaggactcaccccagcccctgcctgcccctgaggaagaagaggcactcaccactgaggactttgagttgctggatcagggggagctggagcagctgaatgcagagctgggcttggagccagagacaccgccaaaaccccctgatgctccacccctggggcccgacatccattctctggtacagtcagaccaagaagctcaggccgtggcagagccatgagccagccgttgaggaaggagctgcaggcacagtagggcttcttggctaggagtgttgctgtttcctcctttgcctaccactctggggtggggcagtgtgtggggaagctggctgtcggatggtagctattccaccctctgcctgcctgcctgcctgctgtcctgggcatggtgcagtacctgtgcctaggattggttttaaatttgtaaataattttccatttgggttagtggatgtgaacagggctagggaagtccttcccacagcctgcgcttgcctccctgcctcatctctattctcattccactatgccccaagccctggtggtctggccctttctttttcctcctatcctcagggacctgtgctgctctgccctcatgtcccacttggttgtttagttgaggcactttataatttttctcttgtcttgtgttcctttctgctttatttccctgctgtgtcctgtccttagcagctcaaccccatcctttgccagctcctcctatcccgtgggcactggccaagctttagggaggctcctggtctgggaagtaaagagtaaacctggggcagtgggtcaggccagtagttacactcttaggtcactgtagtctgtgtaaccttcactgcatccttgccccattcagcccggcctttcatgatgcaggagagcagggatcccgcagtacatggcgccagcactggagttggtgagcatgtgctctctcttgagattaggagcttccttactgctcctctgggtgatccaagtgtagtgggaccccctactagggtyaggaagtggacactaacatctgtgcaggtgttgacttgaaaaataaagtgttgattggctagaaaaaaaaaaaaaaaaaaaaaaaaactcgagggggggcnccggtacnc

SEQ ID NO: 44 - DNA, 1765 bp, Homo sapiens
ggcacgagatttctgggagtcctgcagagtctagttgccaagtggaacattcttaaaaagatcgttcagaagtttaccagaattaaaagatgctgtcttggaccagtattcaatgtggggaaataaatttggagtattgctttttctgtattctgtattactgacaaagggcattgaaaacataaaaaacgaaattgaagatgcaagtgaacccttgatagatcctgtatatggacatggcagccaaagtttaattaatctcctgctgacgggacatgctgtttctaatgtatgggatggtgatagagagtgctcaggaatgaaacttcttggtatacatgaacaagcagcagtaggatttttaacactaatggaagctttaagatactgtaaggttggttcttacttgaaatctccaaaattccctatttggattgttggcagtgagactcacctcaccgtattttttgccaaggatatggctttagttgcccctgaagctccttcagaacaagccagaagagtttttcaaacctacgacccagaagataatggattcatacccgattcacttctggaagatgtgatgaaagcattggaccttgtttcagatcctgaatatataaatctcatgaagaataaattagatccagaaggattaggaatcatattattgggcccatttcttcaagaattttttcctgatcagggctccagtggtccagaatcttttactgtctaccactacaatggattgaagcagtcaaattataatgaaaaggtcatgtacgtagaagggactgcagttgtgatgggttttgaagatcccatgctacagacagatgacactcctattaaacgctgtctgcaaaccaaatggccatacattgagttactctggaccacagatcgctctccttcactaaattaatttgtctaagtatttataaggaagatcttaataacagatgttgaaagaaggagtcaagactggcaattggctggattaagctaaacactggtatcactgattaactgtaaataacaattaaaaacacattttcagtgtttatgatatgtttaaattatttgtcctaaagctttatgttaaagattatcctattttaccccttcgtgtgaaatttactagcaaaattaagctttcatcaaagttcatcacttttgcattcagatacttggtcatttacttaccaaattacaaacgcaatactacagcatttgtatattaagtatcacagttactattgataaactacttttgggttttatttcattgaggcactttttttattgtttgaatgattccggcttgtaatatatcagcctctacaatgaaatgcagaagagttcatttttctaagatctgtttttcattagaaatattgacaaataacacattgtcaacctggatcctttgacaatttacttaactctggcatgttcacaaaaagtagaaactctaagagaccattaccatttattcacagatgtataggggatgtattctaaaaactgacagaaaagagaatctgatagtcaacactgttaacttttactgtgtaattgccaaatacacttttccaaatttgtcccaacagccctgtaagccagctttcttctatatttataaacacgataaatgcatgagaagatctgttattacattagtatattacgttatttattatgatcctagttgatggcctaaataaacacctttttctttaaaaaaaaaaaaaaaaaa

SEQ ID NO: 45 - DNA, 2494 bp, Homo sapiens
ggcacgaggagatgtttaaggattacccgccagccataaaaccatcctacgatgtgctgctgctgctgctgctgctagtgctcctgctgcaggccggcctcaacacgggcaccgccatccagtgcgtgcgcttcaaggtcagtgcaaggctgcagggtgcatcctgggacacccagaacggcccgcaggagcgcctggctggggaggtggccaggagccccctgaaggagttcgacaaggagaaagcctggagagccgtcgtggtgcaaatggcccagtgacccccagacgcggaaaccgggtggcagcgcccagcctggccccaagcatggaaacgcacaacccctaatcgccctgagctactgcttctaacacctcttttcccttgtgtgagggcaaaccaggctgcaggtggggttttcacttcctagggtagtttaattttaaaataggccaatgttggctagtctgtgcctcagtgagatcagtcagctccgagtggctcccgtgtcgtaacagcaggagcatggccgcaacttcccaggccgaggaagggcccccggctcggcctcttgagagccccacccctgaactggccccagctcctcttcctgcctctctcatggcttgggctggagtgggctctctggacctgaccagactgtgggtccctgcgtctcctgcccactctgaccgggcttcctccctccacgcttagggtctgtcccgggtactcagtcagcccagtgggatcttacccacttccctgcaaggtgcacctgccccaggctcaggctgcccagcggctcttcctggacagtgagagcagggctgggcgcctctgtcctggcccgggagccgcaggggcccctcctccagagcctgggcgcaagcgacacaggctgccgctgctctcccaggtgaaatccacaccagtccacgccgggtcgcctgccctgtctccctacttagacccagtcattctagagggatccaccgccacactggccggcccacgtcctgggtgctgtcatgcccagcttggagtgccacgtggccgctgcccacgtcccgggcactgtcatgcccagcttggagtgccacatggccgctgcccacgtcccgggcactgtcacgcccagcttggagtgccacgtggccgctgctgtgacaggcagtgttcttgggggtggggctgcatccaaggctttgtaaaccggctggaccacgtctccctggccccagtgaccgggggaagctgagcccctccctcctgtgtttgctcccattactcaaaatgcaggacagatcaggtcagagcccaggaattctcacaggttcacccagcgccctctacctcctagcaagtactttgtcttgatcctcactgagaaggccccagggcagcggtcttctccatctccgctgttttggggtcttagggtacagcccaggcggtcactgcccacctgccaggctgcagggacagttgggtgtgagaataacactggctttgggtagtgccatggccaggagtgggtttccctgcgtctcctcgtcccgagggcgcctgggtcctcccagctgacggcagtaaatccacagtgagttggggcgactgtgaaactggaatgctgttactttgataattactttccagcaggtgttttccttcacaatggttttgtttctttccttctgatctgagaagacatgaacgttttctcttcaccgccgtggggtgtattgactggtcccccatgggctgctggaaaggcccggagatgcatctgtggcctggggccatcaagatcaaagaaccaggaggcctgggagatgcagctggatggggcggcctgcagaccctgccagggggtttgaggaccctcccaggtttcccactgcggaacaggagtgactctggctgccaagataccttcatggtgttcatgacaagtggaatcattattttcaaccattgaagggggatgcaggcaagacaccttcccagctgctcctagaggggacaagccaggccctctctgcagtcctcggcagctccggaaggacacagtcaggggccgggcaaacactttggccacagccccaaacaagcgccaccgtgggagaggagaggctgctgtcactggtaccggatgcagaccccaccctgtctgcaggccacccccacctccctgcagctttgaggctggcggggtctgctcctgggaatggggtgggagccacagggacgacccggggcgggctgatgtcttcttgggggcagaccagagagctcaagtttcagagtcagaattaggcacttggagcgtttttgctggcttgcactttcttattttcttattttagagcgcttaaaaaaatccggaaaaatggggtttaaaagaactgtctctttcagtctacatttttgtttaatacgcttgagcaataaacgcttacttgcaaaaaaaaaaaaaaaaaaaaaaaaaaa

SEQ ID NO: 46 - DNA, 1509 bp, Homo sapiens
ggcacgaggatgtacctaatgagcttctccattcactttgtaaaaataatttgtatgtgtaccatcttggtcctctcccctcccgttttgttaaaatatcaggatagcactcccaggccactttggtctcagtgtaagatccctattaactatctgaaaggaaaatagagccaagacctctggtctcaaatatataggaattgcctttctttagtcttcaggactattgtgtgaaaacaagtaggggtctaatctcctagaaggtaggggctttatccttaaagagaatatgtccccagattattagcacttttagaggagaagccaaggtatgtaggggtgtgtggctggcccatcagtggagcacgaagagagaatgggataccattgtgggaagagaagaaaagttcctcaggggcctcccactgctaaagttttttgtgagatgttgatctgtgcttcctggatttgacttttaaaggaattattctggcagcacatgtagtattcttggatgatcttgctgctcttatttctccttttgtgtgtgtgtgtgtgtgtgtgtggctatgggttttcatttgtaactccatctgcttaggagagtgggctctctataagggaacctgctgtaaacttcattgcagcaaggatgtagagagaaataggacttaattccactaggggctctcatctcacaccttaaggaggagatttctagaaaaactgggccagattttctttgttctccatcattttaatgtggcaggctgttcagttttcttactcttacctatgtgatatttcttcgtaacgtgtccaaaaagaaaaaagacccaatcagtgtctcttgactttgttctttgatccctcagtttcttcttgatttcagcatgtgtcgggttcctaattttgggtatgagttagcaaatttaaccattgtgtttgtgccctacccaggggactccccagtttctgacttgaagtagactgagaagaatccacgaggtgctatctggccagatttaagtagattctatttccttggttctccctctccctgaggacctcttattttattgtcccctcttctaggttaattctcctttgatttgactttgttgagaaggaggttggacagtagattagcaaagttccaagtgcaaaattacagtgtgttagagtgtggggggaaaattagtcttatttttccctacatgggatacaacactgtgaattcaatcttcaactgaaggccctgcagttctcctaaaacatagttgtttgtttttctttaacaaagtttaagctagtgttaataaattaaaaaaaattgcttgtctgtctacttcagctttgttttatgcccatttcatattgttgtctgtgttgtaattcataacttttgataccatttctgatgtgtaaaattggttgtcttgtaaatatcttataaagagttcaattgtaaataaactattgtggctgttaaaaaaaaaaaaaaaaaaa

SEQ ID NO: 47 - DNA, 885 bp, Homo sapiens
  misc_feature (233)..(233): n equals a,t,g, or c
aattcggcacgagagggctgcatccttgcgttctgtgagctctgcccgttgggagcatccatgctgatgtgcaggggccgtgcagcactgcattcttcttgccttctctgttctgtttagtacaaccaccccagcaggtctccagttcctgccaggttagtgtggatggcccagcaccatctcctctccatcttgttggctatcctctcttgttcctcacaaccccgccaggntcgcggctcaggagctctgccgtgtgaagtgtgctcagcagttctcctcacatgtctacgcaaaatctctggctccctgtgtgtctgagcccaacagacacactgagcacaggagttggctctcagctcctcccagcttgccgtgactgagccytgccgtcctgtggcamcgccasggagaccacagtgtccaactgtccaacctttacgtaattggcatcccaggaggagaagcaagagtgaatggggcaggaaaagatcattaaagaaatcgtggctgacataaaaaaggatgagttcatgtcctttgtagggacgcgtggatgaagctggaaaccatcattctgagcaaactatcgcaaggacagaaaaccaaacaccatgtgttctcactcataggtgggaattgaacaatgagatcacttggacacagggtggggaacatcacacaccggggcctgtcgtggggtgagggggatggggcagggatagcattaggagatatacctaatgtaaatgacgagttaatgggtgtcagcacaccaacatggcacatgtatacatatgtaacaaacctgcatgttgtgcacatgtaccccagaacttaaagtataataaattaaaattaaaaaaaaaaaaaaaaaactcgtag

SEQ ID NO: 48 - DNA, 1261 bp, Homo sapiens
  misc_feature (481)..(481): n equals a,t,g, or c
gttttcaaactcatttctaagccaaatagtttagataaatatttacccttatatttggggggaattcaggctcaccatttgccgaggcaagcccatcaacagtctagaggcatattctgtgtcattccttcccgtctccttcatagaatactactttttccttttgtctcctggccattctccatcatctgctgattattgctaaccacaggatgctggcaaagcttacagtgataggcacatgtgttcagtgatgtccaatacactcttatcacagtggttattgcttcttactcttttcaaatgcattattctacccctcaacctayatccaatcattagaactatacctgactggagcccagaacttgggaccaatacttaattcaaatagcaggggcttgctcacaaacattaagcccaamaagaagcacagcactttkgaaaagtcaaataggsctttggtagctctgtacatttngcaatttacattgttattaagtttatagcactaataacacttcagtcgtgaatctacagtctcaatatgataagtcttagaacatgttctagaaatagtggtaccttgctgctattatacttagtaacttataccccaatataataataagtattaaatacagattgtgtatgcattctttgtgtgtatatgccaactgtactacttaacctcactgatgagcaattagaaaaatacacaaattgtcatagtgaaaataagtcttggtcaattcagatgatacgtgaacctgataaatgctctaatagatatgctattttgtcctgtattgcttgttttacagtatggtgcatgttgtttgctaagtaaaatgataataataataaagtatacccaattttaaggttagaattaaaattttgcacatatgcttcttgatattctgaaatgtattctgtggsttmattatcttattcatacacattkmgctwggctttttacccctaggaaataactgtccaagtatatatctcgtcttctttcttgtaactttgattaaactgcttacttcaacttacaacattgtaaagccagaatacctcattttaacagtgaaaaaaaatattatgacctgatgtgttctcttgtatttgatttgaactacctaaataggcttaactgtaataataaatatacaattttggcaaaaaaaaaaaaaaaaaaaaaaaaaaaaaaaaaaaaaaaaaaaaaaaaaaaaaaaaaaaaaaaaaaagggcggcc

SEQ ID NO: 49 - DNA, 790 bp, Homo sapiens
  misc_feature (37)..(37): n equals a,t,g, or c
  misc_feature (55)..(55): n equals a,t,g, or c
  misc_feature (76)..(76): n equals a,t,g, or c
  misc_feature (112)..(112): n equals a,t,g, or c
  misc_feature (120)..(120): n equals a,t,g, or c
  misc_feature (137)..(137): n equals a,t,g, or c
tcaactgggtgaaaaggaaaacccacccttggcgccnaatacgcaaaccgccttntccccggcgcgttggccgatncattaatgcagctggcacgacagttttcccgactgnaaagcggncagtgagcgcaacgcanttaaatgtgagttagctcactcattagcaccccaggctttacactttatgcttccggctcgtatgttgtgtggaattgtgagcggataacaatttcacacaggaaacagctatgaccatgattacgccaagctctaatacgactcactatagggaaagctggtacgcctgcaggtaccggtccggaattcccgggtcgacccacgcgtccggttgaatgcactgagtcccttggtgtagtagcaataaggaaaaatgaaattactttcctgtgcacacagtccagcctaattggtatgtgatgttgcacttagcagccatgtggtgggcatgtgtgactactctggttttcactttagtttctaaactttttatccctctcaagtccagcatggatggggaaatgtctctggatccccacagctgtgtacttgtttgcatttgtttccctttgagatttgtgtttgtgtcctgctttgagctgtaccttgtccagtccattgtgaaattatcccagcagctgtaatgtacagttccttctgaagcaagcaacatcagcagcagcagcagcagcagcacaattctgtgttttataaagacaacagtggcttctawwaaaaaaaaaaaaaaaaaaaaaaaaaaaaaaaaaaaaaa

SEQ ID NO: 50 - DNA, 3576 bp, Homo sapiens
ttcatctgcctctcgcaagaaaaagtcctggtaaatacacattagcatttccgttttacacagaacactgacagatactttcctaagatcatggagttaatacccaccagaacctagactcaatacttatggaacttcaaatctcatgcttttctcattgcacttatgattactccattatgtaggagcaagggagagttgagagcatttgaagaggttatgcaaaggaccagctctgaggagtaggcttagcaaagtaacatgagggaaggtaacaccgttcatctgtgtagcggagtgggagccaagagacaaggagaaagtttcatgttcgtcatgtgtctcggatattccggtttctgcagggacgagaacgcgcagtttcgcctccatcccttgacctccaacacagcttctccactggatcatcggtggcgatgaaggggcggctggggaaggatgtcagagaaaccagaagcttgacggtgaatcctcgggttttaaggagagagcaaagtcctgagagggcgacgtattgtccctgctcacctagcccagaatgaacaaacacgcgccagccagggagcagcgagccgagaattcggacgagcctctgcaaccgccatttgccgttctcgcaaagactaccaagaccacaatgcaacggggcgccgagctaattcccagtgagcagcaggcgaggcgccaccgacgcggaagactataagccccagcgggcgacgaccgaacgcccccgggaacaccgggccccgagctcggtcccgcgcccgaggatcctccacggggctagatggctgcgtcgggggcgggagcggaggtgagcgggcgctagggccgcgagcccccgccggcccttcctccagcgccctgcggaccccgcagaaggcgctcgcctccctagcccgcaaaaacatatcgatttttctcgctgtggcaacggggacgtcctgatagatcctctgctccaataggcaactccggccttccctgccctgacctggaacctctgggagggctgcagagtaagtgccgcctctgcgctccgacggaggcacgaggcctgtggagtaggtccctctgttccgacaggtgcgacacttggcgctccatgcttgcgggtgccgggaggcctggcctcccccagggccgccacctctgctggttgctctgtgctttcaccttaaagctctgccaagcagaggctcccgtgcaggaagagaagctgtcagcaagcacctcaaatttgccatgctggctggtggaagagtttgtggtagcagaagagtgctctccatgctctaatttccgggctaaaactacccctgagtgtggtcccacaggatatgtagagaaaatcacatgcagctcatctaagagaaatgagttcaaaagcttgccgctcagctttgatggaacaacgcttattttggaagttcgaaggggctgtcgtgtgtgtggccctgatcttcgcttgtcttgtcatcattcgtcagcgacaattggacagaaaggctctggaaaaggtccggaagcaaatcgagtccatatagctacattccacccttgtatcctgggtcttagagaccctatctcagacagtgaaagtgaaatggactgatttgcactcttggttctttggagccttgtggtggaatccccttttccccatcttcttctttcagatcattaatgagcagaataaaaagagtaaaatggtttccttcccttctgtaacttggagcaggaagtcatgggggcagagagggaaaggaggtggttacttaaggccccaatctaccaagtcttccccaccacttctcccttgttttccccctcttctactacttatttcaaacttctgggatacaatttcagctaaaacgtttatttctcactcaaaacttatttcccctcaaccctatacccaaagaagaaataaaatcacagatacataacagaagtatttgaggtaccctctcatatatgcaaacaaatgcagactaggcctcaggcagagactaaaggacatctcttggggtgtcctgaagtgatttggacccctgagggcagacacctaagtaggaatcccagtgggaagcaaagccataaggaagcccaggattccttgtgatcaggaagtgggccaggaaggtctgttccagctcacatctcatctgcatgcagcacggaccggatgcgcccactgggtcttggcttccctcccatcttctcaagcagtgtccttgttgagccatttgcatccttggctccaggtggctccctcagtctggactctaccacttgggtctccagattttctgttacgtccttgtgggtcaggatatttctggaagtcactccgtgaggctggtaatcctcagacccagcttctggtcgactctggaatggactgaagctgggcaggatgatgagagccagggaaaaaagaagaatcaaaacacaagtgctggtctgggcagctttgttggaagtttgagcaattagcgtctgcagctggcggagctgagctaccaaggagatgttgtgcctctccagctcctggacttttttctgtaattcttggttctgtgcagaacaggctgccaccctgctctccagcccatcaatgtactccttcttccgccgccgactgtcctgagctgactgcttgttacggattttcctcctgaccttcttgaggaccctctcctctgccttggtgaggggcaggtgagagggcagggaaaccccttcctgccccagcagacgcttctcctcatcggtcaggaacagggtttgacagggcagcagggttgtacagggcactggggctacggtgcctgctctgggcaggatgtgggcatgagcatcaaagggcagctcactgaccatgcaggaatcaggcaccataaatgctgggctccactgatctagctggatggagataaggcctacatttggcccagtttccccctgcatcctctccagggcccctgcctcatagacaacctcatagagcataggagaactggttgcctgggggcagggggactgtctggatggcaggagtcctcagagatgccactgtcactgccaggagatgcttctgagcagtacacctcattgggatcaatgaaaagcttcaagaaatcttcaggctcactctcttgaaggccacagccacggtccccaccggacttccagccttgcagtccctgttcctgtagcctagttaccggaacctctggaggggggcagtggagtcccagctccaggacggatcctgtcgagaagatatcctctgggggctccagccacgcgtccagcaggtcagggattccgagatccatgcttactacaaaagtggatgccaccttgccaggagccacggtagggccgctgtatctgggagtaggggactaagagtctgagggtccacaaacggaatttaagaagtaggtagccgcgccctttctgctgcagttttctcttagctatagtaaatcttcctgagggtttggtgtctcctagctgaagaacagaaaaggctgtgac

SEQ ID NO: 51 - DNA, 1343 bp, Homo sapiens
ggcacgaggtcaaggcaaaaatgggtcaggtttggagagttcccccactccttttgagtgttcaggttttccttaccatggctcatgctttccatcaagcaccagagttgcagtggcttggcctctggttctgggtgaggttatttgcaggtggagacggggggctgcacctgaacatttctagtgtcaccctccctctccttcatgggaaacagctctccagggaagtaccttcctgccaggggaagccaaggctgggccggccgccctacaaggagccacaggattgcagccatgggtgccacctttcatggaaggggagatttatgggctttcctggaacccccaggctgtcctggccaagaggaaagaggtggttacttcaggagtttgaccttagttagataactaaaagaatacatttcccctcccttttctttatttcctcaataaaaatgtacaaagtatcacccttctccatgccccaatctgtgttaaagtcacaatctatgggtgtagttctgggattctgtcaaattctccttcctgctctccaaaatggacaattgtcgtagggaccacatgcccccagaatacaatggcctctgtgttctactggggtcaagcctgctagaactcagcattcatgacaggggctaagtgtgcatgaagtgacactgactacagctagaaagccaggcgcacaaatgccccttccccccagggccgctctttccagcgcagtcatccagaaaggcccacgtgcagagcccctgtgtctcagatgctgcttcagttgcccgtcctgtcctcagaggccactgtgctggccctctatcatttgacctgactttagaacctgacctcaaggatatggcagcgctagcctttagctcccacagcacggatgggggtgatgccagttagaagtgggtagtgaacgtttgctgagctgttcactgtttctctcttctctttggaagcacctctccgagccatgtgagccccctgatgccaccgagcaggggcagcttcatgaccgatgtctggctgaggctgtggcggacactctcggggttgtctgcaggagagcaagccaggaggacatgggcctggacgacacggcctcgcagcaaagtgtgtcagacgagcagtgacgggcgtgcggccgggcggggaggctggctcccccacacctcccacctgcattgctctccctcgtgctccccaaatcaccacaaccaaccaataccgcaatccatgagggactcctcctgtggaaaaggagagctgttccagaacacagaactgatctcaggtttttgaaaaaaaaaaaaaaaaaa

SEQ ID NO: 52 - DNA, 712 bp, Homo sapiens
  misc_feature (20)..(20): n equals a,t,g, or c
  misc_feature (44)..(44): n equals a,t,g, or c
  misc_feature (56)..(56): n equals a,t,g, or c
  misc_feature (128)..(128): n equals a,t,g, or c
  misc_feature (625)..(625): n equals a,t,g, or c
  misc_feature (692)..(692): n equals a,t,g, or c
  misc_feature (699)..(699): n equals a,t,g, or c
tgttgtttggaattgtggancggattaacaatttcaccacgggnaaccggctttgncccatggattccgccaaggcccgaatttaccccttcactaaaggggaaccaaaagctggagctccaccgcgntggcggccgctctagaactagtggatcccccgggctgcaggattcggcacgaggtttcctgtcagtgctattgagattttattttattaatgtctgcacttagttttacttcctactttctacttttattgagagttaaacctgttgaagtctcaggttcaattcctcaccctgagcaacctaatgttttatgtcttgttcttcctacatttggttattgaaactgaagttttaggttaccagatttgatagaagcacataagactacttactgctttagtctcaattattaattgagaaattatcaattaacaataaggatttctcttatttttccccaagataagttatatatttaaagtgtgttttatagtagaaaggttttagaatatttgggttgctacattaattgaaatggcagctgaagatgtgatttccagccagggatttattaaaaaaaaaaaaaaaaaactcgagggggggccgtacccaatcgncctatagtgagtcgtatacaatcacgggcgtcgttacacgtcggactggaaacctgcgtaccactancgctgcncacaccccttcgc

SEQ ID NO: 53 - DNA, 1089 bp, Homo sapiens
  misc_feature (353)..(353): n equals a,t,g, or c
  misc_feature (528)..(528): n equals a,t,g, or c
cggcacgagaaacgcggtgcttgctcctcccggagtggccttggcagggtgttggagccctcggtctgccccgtccggtctctggggccaaggctgggtttccctcatgtatggcaagagctctactcgtgcggtgcttcttctccttggcatacagctcacagctctttggcctatagcagctgtggaaatttatacctcccgggtgctggaggctgttaatgggacagatgctcggttaaaatgcactttctccagctttgcccctgtgggtgatgctctaacagtgacctggaattttcgtcctctagacgggggacctgagcagtttgtattctactaccacatagatnccttccaacccatgagtgggcggtttaaagaccgggtgtcttgggatgggaatcctgagcggtacgatgcctccatccttctctggaaactgcagttcgacgacaatgggacatacacctgccaggtgaagaacccacctgatgttgatggggtgataggggacatccggctcancgtcgtgcacactgtacgcttctctgagatccacttcctggctctggccattggctctgcctgtgcactgatgatcataatagtaattgtagtggtcctcttccagcattaccggaaaaagcgatgggccgaaagagctcataaagtggtggagataaaatcaaaagaagaggaaaggctcaaccaagagaaaaaggtctctgtttatttagaagacacagactaacaattttagatggtaaggttcacaaataggttgatttctttcttcagctttctgacatgtccagcccatctctaatgaggactcccagatcatcactttatggctgttaggtgtttcccatatgaaattagaggagctgggtcagggagacaaaagtcttctattagtcttatggatagctcctccttgagtgtattttgtgcaaaagattaagaagctggactctactgccattaaagctgagagaatcctaaggttaaaaaaaaaaaaaaaaaaaaaaaaaaaaaaaaaaaaaaaaaaaaaaaaaaaaaaaaaaaaaaaaaaaaaaaaaaaaa

SEQ ID NO: 54 - DNA, 1139 bp, Homo sapiens
acgcgtgggtccggacgcgtgggcggacgcgtgggagcaagcccaggcggcggtggaaaggctggaggacacacctaaacatgtggaatcccaatgccgggcagccagggccaaatccatatccccccaatattgggtgccctggaggttccaatcctgcccacccaccacctattaatccaccctttcccccaggcccctgtcctcctcccccaggagctccccatggcaatccagctttccccccaggtgggccccctcatcctgtgccacagccagggtatccaggatgccaaccgttgggtccctaccctcctccatacccaccgcctgcccctggaatccctcctgtgaatcccttggctcctggcatggttggaccagcagtgatagtagacaagaagatgcagaagaaaatgaagaaagctcataaaaagatgcacaagcaccaaaagcaccacaagtaccacaagcatggcaagcattcctcctcttcctcctcctcttccagcagtgattctgactgaatacaggccctggacccttccctcaagtctcaccagttctgctctcccatcaagcttcagatgccatgttgtactgggggaatgtagcccttgtgctccccaccccctacctscacctgagcctcaccctgctgttgagccctgagtggctaggggaaatgggaagaggattgccatggcctggccatcttgttgctgcttggttagatcatatagctaatgaattaggcaggggagctattttttgaagatgatgaactaaatgttgaagacaagtttgagatctgtaaaatgtgattttttacttccacttataatacttgtgattggggaggtttgtggaaattcaattatgatgaaaaacctatcttttttgtaatgttggcatacttggggaatttagtggcaaatacattccccagcaggccttttgttggttgcactaactgcaaggttgctgggaagtagagtccatttggttgatgagctttgactgcggttttggaaccttacctctcctccttagcccaatatgctgtcttgggtcctattcaaataaagttatttctcctggtcwmaaaaaaacggcacgagcggcacgagctacgtggg

SEQ ID NO: 55 - DNA, 1222 bp, Homo sapiens
  misc_feature (772)..(772): n equals a,t,g, or c
  misc_feature (796)..(796): n equals a,t,g, or c
  misc_feature (823)..(823): n equals a,t,g, or c
  misc_feature (855)..(855): n equals a,t,g, or c
gaattcggcacgagcacatgwktatatatatattactgttttgcctccattgaacatgccttctacttcctaatttgtgccagaattgactagtagacgctatgaatgcatcatgctctttggcccatttcgaacactcaggtatgtctgtactcttagttcatctattcatcattgtttctacagttccctcatgctttaaaaaatatatggcttttataatttatccagctttttcttgtcattttaataagagtatgtgtcttatacaactactacattcatcccagaagtagaagcaaactattataatcccattatttttattcctactattctcttttcagaatttcttttagatattccttggatagttttattcaatcctccatggctttcagcttatcttatgttctatcttttggttcatattctgcattctggataattcttcatcttcactttctagtttgttgatattccttttggtgactataagctgctctttaaaatggtcaataatgcctaagatgtttattatcttgccctttgcagaaaaaaattttcagcttttgctctggaatgattttgcatctcttccaccaaacttccagtgtatcaatggccagaaaataatctatatgttaatttgttaatttgatggttcatggttcaaggctgtataatttaaaagtttgaagtcaaacaacacatgatgggataatcctgatgttacagattctcaagggaaaatatgtttttgttttttctnccaattgttctartatttacaganaaacttcttaattatactgggttggtnaataartatttttcttwactctttcaatctangtccarctatgcatcaccccttcgctgatgagcattaagaaaatccaaatttggcccgggcgcggtggctcacgcttgtaatcccagcactttgggaggccgaggcgggtggatcacgaggtcaggagatcgagaccatcctggctaacacggtgaaaccccgtctctactaaaaatacaaaaaaaaattagctgggcgtgatggcgggcgcctgtagtcccagctactcgggaggctgcggcaggagaatggcgtgaacccgggaggcggagcttgcagtgagccaagattgcgccactgcactcccgcctgggccacagagcgagactccgtctcaaaaaaaaaaaaaaaaaaaaaaaaactcga

SEQ ID NO: 56 - DNA, 367 bp, Homo sapiens
cggcacgagtgtaaatgtcaccaccaaaggtttgcaccctgatcaaaaagagtatgaaaagaataataccacaacacttatggcctgtcttggaggccttctggggattattggtgtgatatgtcttatcagctgcctctctccagaaatgaactgtgatggtggacacagctatgtgaggaattacttacagaaaccaacctttgcattaggtgagctttatcctcctctgataaatctctgggaagcaggaaaagaaaaaagtacatcactgaaagtaaaagcaactgttataggtttaccaacaaatatgtcctaaaaaccaccaaggaaacctactccaaaaatgaaaaaaaaaaaaaaaaaa

SEQ ID NO: 57 - DNA, 875 bp, Homo sapiens
  misc_feature (66)..(66): n equals a,t,g, or c
  misc_feature (872)..(872): n equals a,t,g, or c
ggcacagcgcgaggctgggtcccggcccaggagaaggaagtcgctgaaggcagtggccatgctggncgtggaaatgggaggcggttgcagrgggtctatggggcccggtcctggatactcggcaggaagccgtgtctgcagaggctcctccctgcctcaggtggccccgttcaaccccagccgtgcccatctcctgccaccgcctgtcggtgggggtttaaattcggtgtggctttctggggtgcagctcagcacccccccttatgcagactgggagggggtcgggcagtcccctcagccacgaggaccctggatgggttctagttcacttgggaccgtggggcctggctgcgtactgagtgggtgccccacagtcaaggccaacgggggctccccctgctctgagatgttgggagaaaggcggcttctggaaccttccgtgggacccgtaagtggctgtccagaaaggcgggagggtgggcacggggcacggggggcagctggggtcgtcgttaagggtcacgcatccgtacagttgaatttcctttctcttatcatgttttacccaccttgtcccttttttccccaattgtgcttttgcatttttttccttggcaaatgtaaactcagcctttcattcatgacgtgtgaaatttcagtttctctggagtttgtcagacggcgtgggaaccacgcctgaaactcaggtaataggaggaaaaaaaaaaaacttaaaaaaatttttaaaaaacataaaactactctctacctctgctggsccagcctgtctcgccctggccgcggcagggtggcctgtaacaatttcagttttcgcagaacattcaggtattaaaaggaaaaaaaaaaaaaanggg

SEQ ID NO: 58 - DNA, 320 bp, Homo sapiens
agggcgcacggccaattgatgggcatgatccttgtgctggcgagcttcctggcgcacccggtcgaggcgctcgcgcaagctgtcgcgctgggccagcagcaactcgcgctgctcggtgtscarrgccatgctgtcgagggcttcctgcaattgcagrcgtgcttcgccgrcttgttcgtgttcgarggcgcgttgctcgcccatctcggccacttcttcgtcgagccgggtgcggcgcagggtcagttgctcgaccttggccttgytcgccgagagctgggctttcaattcgccctgctggcgcgcttcgtcctgcaaca

SEQ ID NO: 59 - DNA, 2777 bp, Homo sapiens
ggcacgaggggacatgtctgggcacaaggaaaggcaagcaatggaggcagcaagagcccttggcagcaagtttccatcacctttgcctgccagtgtgtgagaggcgcagaggggcagtgagcaggtgacatgcagcttccagatacccacacactgcttttctcccgcccagctcccaccccagttaattgagatgggattgtttctctttctggtttcttcctaagcccctctctcatattcctggtgtgcttatggcctggcacaccttgtgaaacagaaacccaagctcctcatttcggagctgggatttcgattggctatctgcctccctaaccaagctgtcccttccacctcatccctagagtcaccctctggtctcatcaacatccagtgggcatttcagtggcccaggatccttcaaattgcagatataaagcatcaggaccccacacctgggatggaagcttctaggaattaatgaagccccagtagaggtgagggtaaacctaaaacgggctggatagggcctctcccaaggccctatggaaaggtgatgggaaactgggggctgaggcctcatcctaggagacccctggagggacccacttaccctagataggcagcggaggccagaaactggaaaacagccactcattgtcggtgcattaccgtgagcaccacctgtagggactctgttggcctccagccgtcgtcacacgttcctgacaaccacaaaagttcatttgagggtgcccagtcagctgactttgcttccaccaggaatacccacctggccctggtccttctgctgagctacaggaggcattcccagggtcttagcaaaaacaacccctcaaataggcccagtgcctacaactctagagaggtttcagatggtattggagacccagagaagttaactgactttcccaaaagtcacccactgtaaatggcagacagatctcaaacccacatctgagcctgagtccagtgttttttctctagtatcatcattgtcccttaaatgtgtttgacacatcatagtttacaaatcaccttcactcatattctctcactactcatcagtcatgaattcagccaatgagaagggctcagagaggttaactaaccagccacgctgtttacatggggcatagactgcttcatgaacgcttgactgcagctttgccttcctcatgccctcaaaaaggaaggagctgaccaaagcttactataccatagctggggtctgggacccccagccaggtctcacagatgatctgggaatggcctccctgttgctctcaggggtccggcagtcacacagaagagtcaggttgaaatcttggcaagactttggtgtggctttgggaactgggtttaacctcttggggacttcaccaagacagtggcaaaggacaccacctacagcttccagtgcctctctactctcccacctgtgctcctggggttgaatgagaccagaagcagctgggacaagatttggaaagataaagagagccaggagacaagaccttgagagaagcagaggtctggctggctgctgccctctggtggtgacaatggtgacactgtaaacccctctgtcaaggtgacactctcccctgactattcaggagggagaagcaatcgccccaggacagagacggggacatcccaggagcagggtacaggctctagcaatatccatcttgcggtactccctccctcacaacaaccagaccacacatgtgttaaatccttctgcagggatggaatgcggctctcagttttttccaagaacttctaatctaggaattaggagaggtggtcaaagctgaatgaagcagtgggcaaagagagggtgagggatgggagagaagacaggtcaaggaggaggtgggagagaaggggagggttgcatgagggacaaggaaatggcatgggttggagctgtccccagtccctatctggagggacttccaaccttccagattcccagctgatatcacatgtccaacctcagccaggcgatttataagagaaaggtcagggatgccactccccttgtaaaagcaaacatgcagcatctggagaagcaaggggtagatacaaagattccaaggggtcaccaacagctacccagagaccagctttcatcctatagagaagggtctcattactttgcccttccttccttccttcctctctccttccttccttccttccttccttccttccttccttcctccttccttccttccttccttccttttttctattctattgatcattaattatggtcaaaacttctcattttttcagccaggcagggtggcttaagcctgtaatcccaacactttgggaggcgaggcaggcagatcacttaagtctaggagtttgagaccagactgggtgacatggcaaaaccctgtctctttaaaaacaaaaattaaggccgggcgtggtggctcatgcctgtaatcccagcactttgggaggccgaggcaggcgaatcacgaggtcagaagatcgagaccatcctggctaacatggtgaaaccctgtctctactaaaaatacaaaaaattagctgggtgtggtggcgggcgcctgtagtcccagctactcgggaggctgaggcaggagaatggcgtgaacccgggaggcggaacttgcagtgagccgagattgcgccattgcattccagcctgggcgacagcgagactccgtctcaaaaaaaaaaaaaaaaaaaaaaaaaaaaaaaaaaaaaaa

SEQ ID NO: 60 - DNA, 710 bp, Homo sapiens
ggcacgagctgggcctccaggttcttcacctgtcacatgatcattttacatattgtggtctgtttatttaccatcagcatcatagaagagcaaaaagaagaaatactgtgctccactaaaagccaggctgagaaaacagttactcacattgagcagtgagtgaccactaggtgggcatttgttcatagctgcatggagaacaagtgcccatatacatctttctgctgatgcagcctctaaattttgaatgcatcagttttttaaactgcattgagcaatattccgtgggtgtgatccataatagcgtaactatttacgcctgtgacagagaggaaaactgtatggatatcagatatctttaagagctttttaatctttaatcaagttagtacttcttaaggatgattaaggccaggcagtggctcacacctgtaatcccagcattttgggaggccaagatgggtggatcccttaaggtcaagagttcaaggccatcctggccaacatggtgaaaccccatctctactaaaaatacaaaaattagctggggtgtggtggcaggcgcctgtaaccccagctactcaagaggctgagacaagagaatcgcttgaagccaggagttggagattgcagtgagccaagatcatgccacttcactccagcctggacagcagagtgggacttcttcttaaaaaaaaaaaaaaaaaaaa

SEQ ID NO: 61 - DNA, 1540 bp, Homo sapiens
  misc_feature (651)..(651): n equals a,t,g, or c
  misc_feature (1124)..(1124): n equals a,t,g, or c
agaattcggcacgagggcatattactttcctaggactgccacaacaaactattaccaactagcggcttaaaacaacaagagcttattcctcacagttctggaggccagaagtccaaaaccaaggtgtcaggaaggtcatgctctctccaaagtctccaaggatgctccttccttgcctcctccagcctctggtcgtggccaacatcccgagggttccttggcttgcagatgaatcacttaatcccacccccatcatcacatggcagtccccctgtgtagctcagctctgtccaaatttcccctttcctacaaggacattagtcactggattatgacacagctcatcttaactggattatatctgcaaagaccctgttatatctgcaaagacgagttaacattcacatgttccaggggagatatgaattttaaggggacagtattggacccagtataggagggcaggcagcagcgagggagccagggagggctggcctgacttgagcctgtttgaaaagcatcatcctcctaccaagactgggggctgctggttctgacaaggtttgcaggatcagctgggatgatgggttscamccaytccttcgagytacgttggacccctgggcccacttacagcaaggagcttgcccntycgtgtagctctycgtcagtgtgggaaaatctgartgagccagagaagggtgagattccccctgcagagcaggcagtactgagcaaatccaggatccagaactccagttctaatcctggctcttgcctgctttcctgtgtgaccctggggaagtggttttccctctctgagactctccttccccatgtgagtcacaagggctgggcctagctgacccccaaggcccttacatgagtggatagttgcattttaaacctggtgctccccaggataagggagtcaaccccaaggagactggggtttctcctgagcctggcccctggggatgagcactcactgtggaaaaagctggccacttcttagcccttgtcatgggcagaaaacatgcccctccagccccaccagcaccaacacacagccaagctcactgtttcatttttagagagaaatcagggctttcggtgcagctgantgacacagacaaggggcggggggacatgaaagggagcgggcaaggacggaaattacacttctcctagcaacctggttctgcagctcctaggcctggggccgcgtgatacatgccattcccaattaacgggatgttaaatataccccggctcagcctgccccatgctgagccccgcctggggcagtgcagggagccatgtgatggtgtagagcactctgcaacaccccatattcatgttcccactcctagggccccgctcggtccccaggaggccagagcggtcctgccctctgcctgagcatggctcagctccagcctccacttgccctcccctatgctggccagctcgggggtctgcaggcagcctgtggggcagggccagttggccaaactctccaagccagaagcccctcgag

SEQ ID NO: 62 - DNA, 1421 bp, Homo sapiens
ggcagagggagcggagagcgtgctaaccaatgacttgagggagtagggggccgggtttgggccctcagttgctaagggctacccgagtgggaagcggttcaagagatggggtgaagggtggttcaccggttcttcaagtcctcagccttctggcccgmggaagttaagcaaccaagaggcgggcctaagaccggaagcaggaaggagggcgcaggaagcagggcgccgcagcctgtcgtacggtccttctgtgggtctgtcggtgccgagggcaggatggagaagctgcggctcctgggcctccgctaccaggagtacgtgactcgtcacccggccgccacggcccagctggagacagcagtgcggggcttcagttacctgctggcaggtcgattcgccgattcgcacgagctgtcagagctggtgtactctgcctctaacctgcttgtgctgctcaatgacgggatcctacggaaggagcttcggaaaaagttgcctgtgtcgctgtcccagcagaagctgctgacatggctgagcgtgctggagtgcgtggaggtgttcatggagatgggagctgccaaggtgtggggtgaagtgggccgctggcttgtcatcgccctcatccagctggccaaggctgtactgcggatgctcctgctgctctggttcaaggctggcctccagacttcaccccctatcgttccactggacagagagaccaggcacagcccccggatggtgaccacagccywggyaaccatgagcagtcctacgtggggaagcggtcaaaccgggtggtgcgaaccctccagaacacgccgtccctgcactccaggcactggggagctccccagcagcgggagggacggcagcagcagcatcacgaggagctgagtgcgacccccacccccctggggcttgcaggagaccatcgcagagtttttgtacattgcccggccgctgctgcacttgctcagcctgggcctktggggtcarargtcgtggaaaccctggctcttggctggtgttgtggacgtgaccagcctgagcctcctgagtgacagaaagggcctgacccggarggagcggcgggagctgcggcgccggamcatcctgctgctctactacctgctgcgctctcctttctacgaccgcttctccgaggccaggatcctcttcctgctccagttgctggccgaccacgtccctggcgttggcctggtcacaaggccgctcatggattacttgcccacctggcagaaaatctacttctacagttggggctgacagactcccggaaggagggtgtggggaggggtgggcagggagcccctcttccctaataaaactgactccggcagcaaaaaaaaaaaaaaaaaaaaaaaaaaaaaaaaaaaaaaaaaaaaaaaaaaagggcggcc

SEQ ID NO: 63 - DNA, 1477 bp, Homo sapiens
  misc_feature (7)..(7): n equals a,t,g, or c
tgcaggnaccggtccggaattcccgggatcaaacagtactgttgcacgtcgaattaaggatctagctgctgacattgaagaagagcttgtttgtagactgaaaatttgcgatgggttttcactgcaactagatgaatcagctgatgtttcaggacttgctgtgctgcttgtgtttgttcgttataggtttaataagtctattgaggaagacctactcctgtgtgaatctttgcaaagtaatgctaccggtgaagaaatattcaactgtatcaacagttttatgcagaaacatgaaattgaatgggaaaaatgtgttgatgtttgtagtgatgcttctagggcagtggatgggaaaattgccgaagctgtcaccttaataaaatatgtggctcccgaaagcaccagtagtcactgcctattatacagacatgcactggcagttaaaataatgcctacatctctaaaaaatgtgctagaccaggcagtacaaatcatcaattatattaaagctcgaccacatcaatccagactattaaaaattttatgtgaggaaatgggtgctcagcacacagcacttcttctaaatacagaggtgaggtggctttctcgaggtaaagttcttgtaagactttttgaacttcgtcgtgaacttttggttttcatggattctgcttttcgactatctgattgtttaacaaattcatcttggctgctaagacttgcatatcttgcagatatttttactaaattaaatgaagttaatttgtcaatgcaaggaaaaaatgtgaccgtttttacagtatttgataaaatgtcgtcattgttaagaaaattggaattttgggcctcatctgtagaagaagaaaactttgattgttttcctacactcagtgattttttgactgaaattaattctacagttgataaagatatttgcagtgccattgtgcagcacctaaggggtttgcgcgctactctgttaaaatactttcctgtaacaaatgacaataatgcttgggttagaaatccatttacagttactgttaaaccagcttcattagtagcacgggactatgagagcctgattgatttaacatctgattctcaagtgaagcaaaattttagtgaactttcactaaatgatttttggagtagcctaattcaggaatacccaagcattgcaaggcgtgcagtgcgtgtacttcttccttttgctacaatgcacctgtgtgaaacggggttttcatattacgctgcaacaaaaacaaaatataggaaaagacttgatgctgcacctcatatgcgaatccgacttagcaatattacacctaatattaagcggatatgtgataaaaagacacaaaaacactgttctcattaaaattggaggagtttgcatgtctcatgataaccaaatgtaagatgaaaataaaagatgatttacttcaaaaaaaaaaaaaaaaaaaagggcggccgc

SEQ ID NO: 64 - DNA, 3447 bp, Homo sapiens
accaattcccttcctgggagttgcggcttccctcgctcggccccactcccgtttaccctttccccagctcccgccttagccaggggcttccccgcctgccgctagggctcgggccgaagcgccgctcagcgccagcctgccgctccccgggctccactttcactttcggtcctgggggaactaagccggaggcagtggtggtggcggcggcgcaagggtgagggcggccccagaaccccaggtaggtagagcaagaagatggtgtttctgcccctcaaatggtcccttgcaaccatgtcatttctactttcctcactgttggctctcttaactgtgtccactccttcatggtgtcagagcactgaagcatctccaaaacgtagtgatgggacaccatttccttggaataaaatacgacttcctgagtacgtcatcccagttcattatgatctcttgatccatgcaaaccttaccacgctgaccttctggggaaccacgaaagtagaaatcacagccagtcagcccaccagcaccatcatcctgcatagtcaccacctgcagatatctagggccaccctcaggaagggagctggagagaggctatcggaagaacccctgcaggtcctggaacacccccctcaggagcaaattgcactgctggctcccgagcccctccttgtcgggctcccgtacacagttgtcattcactatgctggcaatctttcggagactttccacggattttacaaaagcacctacagaaccaaggaaggggaactgaggatactagcatcaacacaatttgaacccactgcagctagaatggcctttccctgctttgatgaacctgccttcaaagcaagtttctcaatcaaaattagaagagagccaaggcacctagccatctccaatatgccattggtgaaatctgtgactgttgctgaaggactcatagaagaccattttgatgtcactgtgaagatgagcacctatctggtggccttcatcatttcagattttgagtctgtcagcaagataaccaagagtggagtcaaggtttctgtttatgctgtgccagacaagatgaatcaagcagattatgcactggatgctgcggtgactcttctagaattttatgaggattatttcagcataccgtatcccctacccaaacaagatcttgctgctattcccgactttcagtctggtgctatggaaaactggggactgacaacatatagagaatctgctctgttgtttgatgcagaaaagtcttctgcatcaagtaagcttggcatcacaatgactgtggcccatgaactggcccaccagtggtttgggaacctggtcactatggaatggtggaatgatctttggctaaatgaaggatttgccaaatttatggagtttgtgtctgtcagtgtgacccatcctgaactgaaagttggagattatttctttggcaaatgttttgacgcaatggaggtagatgctttaaattcctcacaccctgtgtctacacctgtggaaaatcctgctcagatccgggagatgtttgatgatgtttcttatgataagggagcttgtattctgaatatgctaagggagtatcttagcgctgacgcatttaaaagtggtattgtacagtatctccagaagcatagctataaaaatacaaaaaacgaggacctgtgggatagtatggcaagtatttgccctacagatggtgtaaaagggatggatggcttttgctctagaagtcaacattcatcttcatcctcacattggcatcaggaaggggtggatgtgaaaaccatgatgaacacttggacactgcagaggggttttcccctaataaccatcacagtgagggggaggaatgtacacatgaagcaagagcactacatgaagggctctgacggcgccccggacactgggtacctgtggcatgttccattgacattcatcaccagcaaatccgacatggtccatcgatttttgctaaaaacaaaaacagatgtgctcatcctcccagaagaggtggaatggatcaaatttaatgtgggcatgaatggctattacattgtgcattacgaggatgatggatgggactctttgactggccttttaaaaggaacacacacagcagtcagcagtaatgatcgggcaagtctcattaacaatgcatttcagctcgtcagcattgggaagctgtccattgaaaaggccttggatttatccctgtacttgaaacatgaaactgaaattatgcccgtgtttcaaggtttgaatgagctgattcctatgtataagttaatggagaaaagagatatgaatgaagtggaaactcaattcaaggccttcctcatcaggctgctaagggacctcattgataagcagacatggacagacgagggctcagtctcagagcgaatgctgcggagtgaactactactcctcgcctgtgtgcacaactatcagccgtgcgtacagagggcagaaggctatttcagaaagtggaaggaatccaatggaaacttgagcctgcctgtcgacgtgaccttggcagtgtttgctgtgggggcccagagcacagaaggctgggattttctttatagtaaatatcagttttctttgtccagtactgagaaaagccaaattgaatttgccctctgcagaacccaaaataaggaaaagcttcaatggctactagatgaaagctttaagggagataaaataaaaactcaggagtttccacaaattcttacactcattggcaggaacccagtaggatacccactggcctggcaatttctgaggaaaaactggaacaaacttgtacaaaagtttgaacttggctcatcttccatagcccacatggtaatgggtacaacaaatcaattctccacaagaacacggcttgaagaggtaaaaggattcttcagctctttgaaagaaaatggttctcagctccgttgtgtccaacagacaattgaaaccattgaagaaaacatcggttggatggataagaattttgataaaatcagagtgtggctgcaaagtgaaaagcttgaacgtatgtaaaaattcctcccttgccaggttcctgttatctctaatcaccaacattttgttgagtgtattttcaaactagagatggctgttttggctccaactggagatacttttttcccttcaactcattttttgactatccctgtgaaaagaatagctgttagtttttcatgaatgggctatcgctaccatgtgttttgttcatcacaggtgttgccctgcaacgtaaacccaagtgttgggttccctgccacagaagaataaagtaccttattcttctcattttatagtttatgcttaagcacccgtgtccaaaaccctgtaccccatgtttatcattcataaactgtttcatcagtctcaaaaaaaaaa

SEQ ID NO: 65 - DNA, 2312 bp, Homo sapiens
  misc_feature (2312)..(2312): n equals a,t,g, or c
gcccttgtaggtgacactatagaaggtacgcctgcaggtaccggtccggaattcccgggtcgacccacgcgkscgggggctgaggggctgccatggcggcggcgggccggctcccgagctcctgggccctcttctcgccgctcctcgcagggcttgcactactgggagtcgggccggtcccagcgcgggcgctgcacaacgtcacggccgagctctttggggccgaggcctggggcacccttgcggctttcggggacctcaactccgacaagcagacggatctcttcgtgctgcgggaaagaaatgacttaatcgtctttttggcagaccagaatgcaccctattttaaacccaaagtaaaggtatctttcaagaatcacagtgcattgataacaagtgtagtccctggggattatgatggagattctcaaatggatgtccttctgacatatcttcccaaaaattatgccaagagtgaattaggagctgttatcttctggggacaaaatcaaacattagatcctaacaatatgaccatactcaataggacttttcaagatgagccactaattatggatttcaatggtgatctaattcctgatatttttggtatcacaaatgaatccaaccagccacagatactattaggagggaatttatcatggcatccagcattgaccactacaagtaaaatgcgaattccacattctcatgcatttattgatctgactgaagattttacagcagatttattcctgacgacattgaatgccaccactagtaccttccagtttgaaatatgggaaaatttggatggaaacttctctgtcagtactatattggaaaaacctcaaaatatgatggtggttggacagtcagcatttgcagactttgatggagatggacacatggatcatttactgccaggctgtgaagataaaaattgccaaaagagtaccatctacttagtgagatctgggatgaagcagtgggttccagtcctacaagatttcagcaataagggcacactctggggctttgtgccatttgtggatgaacagcaaccaactgaaataccaattccaattacccttcatattggagactacaatatggatggctatccagacgctctggtcatactaaagaacacatctggaagcaaccagcaggcctttttactggagaacgtcccttgtaataatgcaagctgtgaagaggcgcgtcgaatgtttaaagtctactgggagctgacagacctaaatcaaattaaggatgccatggttgccaccttctttgacatttacgaagatggaatcttggacattgtagtgctaagtaaaggatatacaaagaatgattttgccattcatacactaaaaaataactttgaagcagatgcttattttgttaaagttattgttcttagtggtctgtgttctaatgactgtcctcgtaagataacaccctttggagtgaatcaacctggaccttatatcatgtatacaactgtagatgcaaatgggtatctgaaaaatggatcagctggccaactcagccaatccgcacatttagctctccaactaccatacaacgtgcttggtttaggtcggagcgcaaattttcttgaccatctctacgttggtattccccgtccatctggagaaaaatctatacgaaaacaagagtggactgcaatcattccaaattcccagctaattgtcattccataccctcacaatgtccctcgaagttggagtgccaaactgtatcttacaccaagtaatattgttctgcttactgctatagctctcatcggtgtctgtgttttcatcttggcaataattggcattttacattggcaggaaaagaaagcagatgatagagaaaaacgacaagaagcccaccggtttcattttgatgctatgtgacttgcctttaatattacataatggaatggctgttcacttgattagttgaaacacaaattctggcttgaaaaaataggggagattaaatattatttataaatgatgtatcccatggtaattattggaaagtattcaaataaatatggtttgaatatgtcacaaggtctttttttttaaagcactttgtatataaaaatttgggttctctattctgtagtgctgtacatttttgttcctttgtggaatgtgttgcatgtactccagtgtttgtgtatttataatcttatttgcatcatgatgatggaaaaagttgtgtaaataaaaataattaaatgagcaggaaaaaaaaaaaaaaaaaaaaaaaaaaaaaaaacaaaaaan

SEQ ID NO: 66 - DNA, 3037 bp, Homo sapiens
aattcggcagagcctaggaggagaaagttccatcatgtcggagatcagaggaaaacccattgagtccagctgtatgtatggcacctgctgcctctggggaaagacttattccatcggatttctgaggttctgcaaacaggccaccctgcagttctgtgtggtgaagccactcatggcggtcagcactgtggtcctccaggccttcggcaagtaccgggatggggactttgacgtcaccagtggctacctctacgtgaccatcatctacaacatctccgtcagcctggccctctacgccctcttcctcttctacttcgccacccgggagctgctcagcccctacagccccgtcctcaagttcttcatggtcaagtccgtcatctttctttccttctggcaaggcatgctcctggccatcctggagaagtgtggggccatccccaaaatccactcggcccgcgtgtcggtgggcgagggcaccgtggctgccggctaccaggacttcatcatctgtgtggagatgttctttgcagccctggccctgcggcamgccttcamctacaaggtctatgctgacaagaggctggacgcacaaggccgctgtgcccccatgaagagcatctccagcagcctcaaggagaccatgaacccgcacgacatcgtgcaggacgccatccacaacttctcacctgcctaccagcagtacacgcagcagtccaccctggagcctgggcccacctggcgtggtggcgcccacggcctctcccgctcccacagcctcagtggcgcccgcgacaacgagaagactctcctgctcagctctgatgatgaattctaggtgcgggctgcagtggcggaagtgctggcgccatagccacggtcaggctgtgccccacctccagcctcaccaccaggccaggaggcagctggcacagtgctcacgccgcctttatttattggaccagaaacactcacatgtcgcttccagaggaacgggggacagccaggctcgcccatgggccttcaggaatatttatacatggcccagcctgcactgcccgggcgagggcagaggacactgggagcaaggcttatgcccctgctgcccgtcctgtgctgggggcatgctgggaccagccgcacccaggccccaatgcttgtgtgtggaccagcggctgcagccttctagcccctcctccccgcgagactctcaggctgaggtcggcaagccgtggctcccccacacaccgtgcaataccctgtctgacctgggctcttcccgcctgcatccctyccctgtccacctttgtccagtgctagattcacctcaccccgggcaggagtggggatgtgggcgctctgtggtcctcccctcctgacccaggcctctgtggcatgctgcaaggatcagagccagacaccaggagtcacaggccccacccaggaagggcattcagggcccctgggcaccgcttctgttgaagcaggggcttctgggcccctgggtatccccacctgtcgtggccacacctctgcctgcctcatgccccttccccctggcctaccaaggacagcccacagcccgcactgccggctcacttgggtccttcctcgatagctttgggcagagcccttgcttcctggctgcttcagggctcaggggctcccagccctccttcccaggctgatgctgggtcctctctctctttggggcttctccctcccgtttcaggggaaaggtctgagtctccacgtttcagaccagcttctgggggaaggcagtccggcagggagaccgggaggggtggccacacagtggggagctgggaggtggggggaatggtcccagactcctctcggggcccctatccacacagggcctggtgttctaccccatctggcccctggcccatctcttctgtgccttagtcacatatgaaagcgcccctccctggctccccatctgtcccacacgctccctggggctcttagttcagctgctggcactcgcaggatcctgcagtgctgggcccagagcccttggacaggcctcaggagtggtcaggaccaccaagcccctcctctccccctccacacctctagacctggggcctccggaacccccagcaggctgggcttatactagctcctgacttaggaagagcctcgtgtcacaacacgtgtccctacaggcaaagtgtcctggcatttaaaacccagattatccctgggtttgggctgcagtcacctggagaagctggtagggtaagggagagggaccctgccggtgttcactggggattctttcttttggtccttcctggaatgaacaggttccctccctgccacctgtgaggagagttggggcccagccgtcttcctggcctccttcctttcctcgtggcagaggcctgcatgtgggtgccagaggccagctctccccctccatcttgggggggcggagcagttgggcccaagctgcccgggagggtgggtgcagacacaggctgaggaccagccctggccctgccccgccatctgctttcaccaagctgtctctccaccgtggcttcccttctccctccaggccaaagtgctgctgattcccactcccttggttttcgcctgcccagcgttgctgtttgcgtggagggtggggggagctcagtggcagggaatcagcggtccgtggggtcgtggggacgggaacatgtgcccgaccgctccatcccctcctcctccttaggatgcataacctaccttgtctttttttttttaaattttctttccaggtagagtagctctttgtacataaagaatacttgaaaaattaattgtatgatgtatgagaagacagagtctcctagttttgtatcttgttgtatgactgccatgagttccaccagaaagccactctattttggtctctgtgacattttaaatgcgtgacagaagtgagcaaataaagtgaggaagaaatctaaaaaaaaaaaaaaaaaaaaaaaaaaaaaaaaaaaaaaaaaaaaagggcggccgc

SEQ ID NO: 67 - DNA, 767 bp, Homo sapiens
catgaaaacacattctcttatagtttttaaattcatcatccaagagttcctgctctttgatgatgagacatacctggtagactccaaaacagagagcagacgcctagtatctttgttctggggtgtgcattaagagtacattgacctgtctgtctccagtcttgactcttttggaagagagatgctagtactgatgacaacctgcattctggctgcggtgtgygtccacactgcacagtgtgcaccagactctcgtatggacaatgactgtccctcacatcaggcgcagatccattttagagcctcagaagtcaggagagggtggactttcaaccacgactgaaaacactgtctttcttaggacatgctgtgtgtatgacacacttacagatgtctgtgctcactgatgcttgttgatgtgtcatcgcacatcagtgacaaacatttgtcatgtttttgcctttggtggaacttctttattatactcactttcctcccaaaccatttttctcaacttcatcatgaagcaaatgtcatgtggtcattctgtgatggggctcagggctaggttaggtgatgatttctgaaagctcagagacgtgaaggaaaaaggacatcagtgcttggatcttagctcttataagcctcacgtgcaacaataaacccgagttcaagaatcagattcttagatagattggtttggtagcaaatgacaaaaaaccaacgtaaatatgcttcggcaaaaaaaaaaaaaaaaaagggcggcc

SEQ ID NO: 68 - DNA, 1256 bp, Homo sapiens
  misc_feature (1079)..(1079): n equals a,t,g, or c
gggacaagtccacgtatatcgagtcctcgaaggataggcgggggaagattcctgccaccctgtgctctcggtccagccggacgtccatgaccttgggtggcaggaatcttcccccgcctatccttcaaggacaagtccacgtatatcgagtcctcgaccaaagtgtatgatgatatggcattccggtacctgtcctggatcctcttcccgctcctgggctgctatgccgtctacagtcttctgtacctggagcacaagggctggtactcctgggtgctcagcatgctctacggcttcctgctgaccttcggcttcatcaccatgacgccccagctcttcatcaactacaagctcaagtctgtggcccaccttccctggcgcatgctcacctacaaggccctcaacacattcatcgacgacctgttcgcctttgtcatcaagatgcccgttatgtaccggatcggctgcctgcgggacgatgtggttttcttcatctacctctaccaacggtggatctaccgcgtcgaccccacccgagtcaacgagtttggcatgagtggagaagaccccacagctgccgcccccgtggccgaggttcccacagcagcaggggccctcacgcccacacctgcacccaccacgaccaccgccaccagggaggaggcctccacgtccctgcccaccaagcccacccagggggccagctctgccagcgagccccaggaagcccctccaaagccagcagaggacaagaaaaaggattagtcgagactggtcctcacctgctccggctcctggcgaccactacccctgcgtcccggccccctcgcctcccctccctgtcgccctttccctggacagatcaggccggggcggtgggaggcccgcctcaggtcagggcccagcgtgtgacgtaggggccggggcaggccagggtttgtttgtggaggcgctgtctgtccctctgtccctctgtgtttccagccatctcgccctgccagcccagcaccactgggaatcatggtgaagctgatgcagcgttgccgagggggtgggttgggcgggggtggggccgggcncccctacgggatgcccacggccgttcatcatcttgtccctcgtccccctaccacactccccctcctagaccgccgccctttaacacagtctggatttaataaattcatatgggtgtttaacttaaamwmaaaaaaaaaaaaaaaaaaaaaaaaaaaaaaaaaaaaaagggcggccgc

SEQ ID NO: 69 - DNA, 1057 bp, Homo sapiens
tcgacccacgcgtccgctgagattacaggtgtgagccaccaggctcagccccctaagatttgaaacactttaaatggcccatggtagggttcctgctaggataaaacattaagcggctgttaaaagaaataaaaggaggacacgtctctgtgcactggtgtggacaaatctccaagtcactgcaaaatggaaaaagtataagatgctctttccctgaacctcaagggtcccgcccctctcactttcaggtctctggacctctgactgacactgtgcctgcccaggtccctgtatgcactgccacagtgccctgggccccatgtccacccctgtcctgcccttctctgggatagggctggccttcctctgcctctgcctggctgcatccatggtcgatctcaagtgccttggcatgaactccactctcctgcagccttcaatcaaggaatgatggggatgtgtacataccccaccccaccccttggcagggtgatgctgaggtgtggatttttaacagttcccagactttcccaggaggcttgggtttgggtgcccacagtgggagctggtgtgatatcataccttcgccggccgcctttccttcctgttctctgtgcccctactcccactctagagctgccccgtttctctgttttcgtgaaagagctgaccctgtgctgcctcccactctcccaatgcccctgccactcctgtgagcctgctgctggtgaggtcggtgctgacctctgtgttgctggataatgagtcatctatctctggaggagaagaaaggcaggtcctccacagccctgataaaatctccaagtctcccagtttcgggtccctctcctgggatgcagacccactgcctgcccagctggtacgatccacatgccctcttcttgggaataggggcatgggaaagtgactaaagatactgttctggctgctgtgttcactgtgagtaataaactgtccatttctccgaaaaaaaaaaaaaaaaaaaaaaaaaaaaaaaaaaaaaaaaaaaaaaaaaaaaaaaaaaaagggcggccgc

SEQ ID NO: 70 - DNA, 2683 bp, Homo sapiens
  misc_feature (2640)..(2640): n equals a,t,g, or c
  misc_feature (2676)..(2676): n equals a,t,g, or c
acaasgtmacgcctgacaggtmaccggatccgggaattcccgggtcgacccacggcgtccgcatttgcaataacagaaaaggaattgcatgtatgaagttttcaatcgtgggcttttctttgttgtggggagggggtcgggggatagtttgatttccattttctgaaaacgacagacttggattctgtttgtgtgtgcatattttatccagccttaagttataaagctcatctgtcccgctgcattccctgtgtattttcaggacatggctcgtgggtgtgtgtgttcattgtgtgcgtctgtatgtatttttctgtcatcactgttccctctcctcccgagtgtgcattcagttaatataatcagttgcttgcttctttcaaagtgctttgaaggtcttgaactcatgtgtgagcatctttatcaactatcccaattgcatgttctccatcacatattctcttatttgctctgtaccccctgagaatatgttttagagatattggaataaagctgtctgggtaaggagtaggcttagccgacctatgaataatacactttagtctagttctttattctaaatctggattgccagtattgtgtatttaaaccaagtctgtgaatacctgctttttttggccacagagtaacaagttttcatgtaagatcttcataccaaagtaggaagtaaaaatagcttagaaagctctgtcaggtgttttgtgcagctgacagargtaatgttacatcacctaaaaaagaaagatacacggtcagttatcctaaaaataaattgtttggaaagtacaatgcaccacatttttgtagaagtctactatttgataaacagttgaaattcaagatgtgtttgacccttagtcatttttactctttggttctgagtatacctattttcttagcgtatctgccttgtttatctttttcttcaccttttaacaagtatgacataggaaagtcatttttttttagaattcatggatcagtctgatctactcttattcataatggaacatgtaaatatactgaaaactgtttttcaggagagaaatatgagttggagggaaggaaaagtggttctactaatgttccaaaatcctcatcagagaaggtatgatgttctcaggtgtggaaaatattttttagttgattgagaatgcaggtttaacagaagagataaggggcataatgactgctggttttccagactggattttcctaccgcaactattaatgttctcagagttgatgaggaccacctttgtgtatacacttgtagttttaaaccttgcattggtaacaaaatgatcaactttaatccaggtagaattcaagatggctgtacttcagttgtatgataaaattaatggttctcatgacttgtgtggcatctaaaaataatgtttttatagcatctctctgccactaaattgttgacttgaattttgggaaaaaaaaaagttggtgttgatatgtatatgtgtgtgtgtatatatgtatttataaacaagtgtgtttgagtaacaagtgagtttcatagtcttcccctacgcatgtgtattccacacacaaatggctgagttatagtcataaaacaatttgcaataaaaaaaaaaccaaaacagattgtcagttaaccaggaaacagttaatgttttttaatgaatctggcattatagtgagcaaatgtcgtattaatttaggctaatttctaatactaccataatttgtgtctaaatttctgttggggtagaaattactaaaattgtggggagttttttctgatttttacattgctttaggaaacatttttactaattcagctgtcttaggtaaaatgaatagttttcttcctgtttttttatgtgtcattgttagtggtctcagaattctgatcagtaactttgtgtatgatgctgaattacaaaccgtttgaatgatccagttgaaaacgtatccctctactttcttcagttgtagaaaaggttaatttccctcagtgtcccacattataccaacctaagagaagaacaggtaatagggagaaataaacatacggtggtttcagtggttttggtcatgtgtccacaggagaaactaaccattcagttgtcttaattttagttcgttctaccctgtgaggagtttgtttccatcagttgttgactttccaaaatgttgcattaagtaatagttgtcactctgttggtctcatggtcaatatcaatcagactttcatgatctctactaattattagtagagtcctgtactatgtctgtaactactaagtttaaagaaaagcacatagtcacttcatctctttttttcttagcctacgctcactccccaacccatcccaacattgacatgctatctgtggacaaatagcagttctcagaatctagtcaagttgccatcatcccccttgccttggccgttcatagtaggtatgcatatgtttgtttctgtacagtactgtgtgtgtgtgtgtatatatatatacatctgtatgcacacatctttgataaaatagctatttgactagcagggttaaagtggcttttaattacttcgtgagtgttattggatacatcttaaaaaaaaaaaatctggacccaganccatgccatacttggttggactattttggggcattnaaaattg

SEQ ID NO: 71 - DNA, 2687 bp, Homo sapiens
  misc_feature (1614)..(1614): n equals a,t,g, or c
gtacaccatgggcctccacctccgcccctaccgtgtggggctgctcccggatggcctcctgttcctcttgctgctgctaatgctgctcgcggacccagcgctcccggccggacgtcaccccccagtggtgctggtccctggtgatttgggtaaccaactggaagccaagctggacaagccgacagtggtgcactacctctgctccaagaagaccgaaagctacttcacaatctggctgaacctggaactgctgctgcctgtgcatcattgactgctggattgacaatatcaggctggtttacaacaaaacatccagggccacccagtttcctgatggtgtggatgtacgtgtccctggctttgggaagaccttctcactggagttcctggaccccagcaaaagcagcgtgggttcctatttccacaccatggtggagagccttgtgggctggggctacacacggggtgaggatgtccgaggggctccctatgactggcgccgagccccaaatgaaaacgggccctacttcctggccctccgcgagatgatcgaggagatgtaccagctgtatgggggccccgtggtgctggttgcccacagtatgggcaacatgtacacgctctactttctgcagcggcagccgcaggcctggaargacaagtatatccgggccttcgtgtcactgggtgcgccctgggggggcgtggccaagaccctgcgcgtcctggcttcaggagacaacaaccggatcccagtcatcgggcccctgaagatccgggagcagcagcggtcagctgtctccaccagctggctgctgccctacaactacacatggtcacctgagaaggtgttcgtgcagacacccacaatcaactacacactgcgggactaccgcaagttcttccaggacatcggctttgaagatggctggctcatgcggcaggacacagaagggctggtggaagccacgatgccacctggcgtgcagctgcactgcctctatggtactggcgtccccacaccagactccttctactatgagagcttccctgaccgtgaccctaaaatctgctttggtgacggcgatggtactgtgaacttgaagagtgccctgcagtgccaggcctggcagagccgccaggagcaccaagtgttgctgcaggagctgccaggcagcgagcacatcgagatgctggccaacgccaccaccctggcctatctgaaacgtgtgctccttgggccctgactcctgtgccacaggactcctgtggctcggccgtggacctgctgttggcctctggggctgtcatggcccacgcgttttgcaaagtttgtgactcaccattcaaggccccgagtcttggactgtgaagcatctgccatggggaagtgctgtttgttatcctttctctgtggcagtgaagaaggaagaaatgagagtctagactcaagggacactggatggcaagaatgctgctgatggtggaactgctgtraccttaggactggctccacagggtggactggctgggccctggtcccagtccctgcctggggccatgtgtcccccctattcctgtgggcttttcatacttgcctactgggccctggcncsgcagccttcctatgagggatgttactgggctgtggtcctgtacccagaggtcccagggatcggctcctggcccctcgggtgacccttcccacacaccagccacagataggcctgccactggtcatgggtagctagagctgctggcttccctgtggcttagctggtggccagcctgactggcttcctgggcgagcctagtagctcctgcaggcaggggcagtttgttgcgttcttcgtggttcccaggccctgggacatctcactccactcctacctcccttaccaccaggagcattcaagctctggattgggcagcagatgtgcccccagtcccgcagctgtgttccaggggccctgatttcctcggatgtgctattggccccaggactgaagctgcctcccttcaccctgggactgtggttccaaggatgagagcaggggttggagccatggccttctgggaacctatggagaaagggaatccaaggaagcagccaaggctgctcgcagcttccctgagctgcacctcttgctaaccccaccatcacactgccaccctgccctagggtctcactagtaccaagtgggtcagcacagggctgaggatggggctcctatccaccctggccagcacccagcttagtgctgggactagcccagaaacttgaatgggaccctgagagagccaggggtcccctgaggcccccctaggggctttctgtctgccccagggtgctccatggatctccctgtggcagcaggcatggagagtcagggctgccttcatggcagtaggctctaagtgggtgactggccacaggccgagaaaagggtacagcctctaggtggggttcccaaagacgccttcasgctggactgagctgctctcccacagggtttctgtgcagctggattttctctgttgcatacatgcctggcatctgtctccccttgttcctgagtggccccacatggggctctgagcaggctgtatctggattctggcaataaaagtactctggatgctgtaaaaaaaaaaaaaaaaaaaaaaaaaaaaaaaaaagggcggcc

SEQ ID NO: 72 - DNA, 728 bp, Homo sapiens
aaatgatttagtgacctatacaagtagcctgcagtaccggatccgaattcccggtcgacccacgcgtccggtgaaaacagcagagtgctactccataccactgggatcttgtccagtaaacatccagagagtgaggttaggaaataaaaagtatataaatattagatgcctagaaatgcaagtcactttaaagattttatgtgaaatagaaaaaaaagagaggagagggactcattgtcttgtaatgggtccttcccagagagaggtgactgtccagtggcaccgggcccttttcctccttccccttttactcttatcaactaggacagaaactaagaattttggcttcaagtggctaaaagactgatgggggaaaaaagaaaatagaaaaaaataacagagagactgacgctctaggcagttacaagtccaagaaaaaagacagaaacttttaagtattgagccaaaaccaggtctagcaamcataatgctggccctagattatttattaatttatgaagaaacttctagatatgggggtgacaaaaggaaattaaatccattatatatgcatatattttaatgtaaatatataatagataaattatgtatacataatatataaccaaattgaaacagttttacaatttggtttgactggaaattcaaaatccatatattaatttttgtagtaaaagtttatgtaaaaaaaaaaaaaaagggcggcc

SEQ ID NO: 73 - DNA, 1635 bp, Homo sapiens
  misc_feature (85)..(85): n equals a,t,g, or c
tcgacccacgcgtccgcagctctccgtggacaatgggctgtggcgtgtgaccctgtgcatgctggccttcccgctgctcctcacnggcctcatctccttcagggagaagaggctgcaggatgtgggcacccccgcggcccgcgcccgtgccttcttcaccgcacccgtggtggtcttccacctgaacatcctctcctacttcgccttcctctgcctgttcgcctacgtgctcatggtggacttccagcctgtgccctcctggtgcgagtgtgccatctacctctggctcttctccttggtgtgcgaggagatgcggcagctcttctatgaccctgacgagtgcgggctgatgaagaaggcagccttgtacttcagtgacttctggaataagctggacgtcggcgcaatcttgctcttcgtggcagggctgacctgcaggctcatcccggcgacgctgtaccccgggcgcgtcatcctctctctggacttcatcctgttctgcctccggctcatgcacatttttaccatcagtaagacgctggggcccaagatcatcattgtgaagcggatgatgaaggacgtcttcttcttcctcttcctgctggctgtgtgggtggtgtccttcggggtggccaagcaggccatcctcatccacaacgagcgccgggtggactggctgttccgargggccgtctaccactcctacctcaccatcttcgggcagatcccgggctacatcgacggtgtgaacttcaacccggagcactgcagccccaatggcaccgacccctacaagcctaagtgccccgagagcgacgcgacgcagcagaggccggccttccctgagtggctgacggtcctcctactctgcctctacctgctcttcaccaacatcctgctgctcaacctcctcatcgccatgttcaactacaccttccagcaggtgcaggagcacacggaccagatttggaagttccagcgccatgacctgatcgaggartaccacggccgccccgccgcgccgccccccttcatcctcctcagccacctgcagctcttcatcaagagggtggtcctgaagactccggccaagaggcacaagcagctcaagaacaagctggagaagaacgaggaggcggccctgctatcctgggagatctacctgaaggagaactacctccagaaccgacagttccagcaaaagcagcggcccgagcagaagatcgaggacatcagcaataaggttgacgccatggtggacctgctggacctggacccactgaagaggtcgggctccatggagcagaggttggcctccctggaggagcaggtggcccagacagcccgagccctgcactggatcgtgaggacgctgcgggccagcggcttcagctcggaggcggacgtccccactctggcctcccagaaggccgcggaggagccggatgctgagccgggaggcaggaagaagacggaggagccgggcgacagctaccacgtgaatgcccggcacctcctctaccccaactgccctgtcacgcgcttccccgtgcccaacgagaaggtgccctgggagacggagttcctgatctatgacccacccttttacacggcagagaggaaggacgcggccgc

SEQ ID NO: 74 - DNA, 4893 bp, Homo sapiens
ccacgcgtccgtgagaagataatcctgagaggctgcatcctgagaaataccagctggtgttttggaatggttatttttgcaggtcctgacactaaactaatgcagaatagtggtaagacaaagtttaaaaggacaagcattgatagattgatgaatactctagtactatggatttttgggtttctgatatgcttgggaattattcttgcaataggaaattcaatctgggagagtcaaactggggaccaattcagaactttcctcttttggaatgaaggagagaagagctctgtgttctccggattcttaacattctggtcatatattattattctcaatacagttgtacccatttccttatatgtgagtgtggaagtaattcgtctaggacacagttattttataaactgggaccggaagatgtattattctcgaaaagcaatacctgcagtggctcgaacgaccacgctcaatgaggaactggggcagattgagtacattttctccgacaaaacgggtaccctcactcaaaacatcatgacctttaaaagatgttccattaatgggagaatctatggtgaagtacatgatgacctggatcagaagacagaaataactcaggaaaaagagcctgtggatttctcagtcaaatctcaagcggatagagaatttcagttctttgaccacaatctgatggaatccattaaaatgggtgatcccaaagttcatgaattccttaggttacttgctctctgccacactgtaatgtcagaagagaatagcgcaggagagctgatttaccaagttcagtcacctgatgaaggggctctagtgactgccgctagaaattttgggttcatttttaaatcccggaccccagagaccataacaatagaagaattgggaacactagttacttatcaattacttgcctttttggatttcaacaacaccagaaaaaggatgtctgtcatagttcgaaacccagaaggacagataaagctttattccaaaggagcagatactattctgtttgagaaacttcatccttccaatgaagtccttttgtctttgacgtcagaccacctcagtgaatttgcaggggaaggccttcggaccttggccatcgcatacagagacctggatgacaagtactttaaagagtggcataagatgcttgaagatgcgaatgttgccacagaagagagggatgaacgaatagctgggctatatgaagaaattgaaagagatttgatgctactaggtgccactgctgtagaagataagttacaggagggtgttattgaaacagttacaagtttatcactagccaatattaagatctgggtcctaacaggagacaaacaagaaactgccatcaacatcggttatgcctgcaacatgctgactgacgacatgaatgatgtgtttgtgatagcagggaataatgctgtggaagtgagagaagaactcaggaaagcaaaacaaaatttgtttggacaaaacagaaatttttccaatggccatgtagtttgtgaaaaaaagcagcagctggagttggattctattgtagaagaaaccataacaggagattatgccttaatcataaatggccacagtttggctcatgccctagaaagtgatgtcaagaatgatctcctagaacttgcttgcatgtgtaagactgtaatttgctgcagggtcactccactccagaaagcccaagtggtagagctggtgaagaagtacagaaatgctgttactttggccattggtgatggagccaatgatgtcagcatgattaaaagtgctcacattggtgttggcatcagcggccaggaaggattgcaagcagtcttagccagcgactattcatttgcacagtttagatatctccaaaggcttctccttgttcatggaaggtggtcttatttccgaatgtgcaaattcttatgctatttcttctataagaattttgcatttacacttgtgcatttctggtttggtttcttctgtggtttctcagcccagactgtttatgaccagtggttcatcaccctttttaacattgtttacacatcactgcctgttttagccatggggatttttgaccaggatgtgagtgaccagaacagcgtggactgtccccagctctacaaaccaggacagctgaatctgctttttaacaagcgtaaatttttcatttgcgtgatgcatggaatctacacctcattagtccttttcttcatcccctatggggccttttacaacgtggctggagaagatgggcaacatattgctgactaccagtcctttgcagttaccatggccacatctttggtcattgtggtcagtgtgcagatagccttggataccagttactggactttcattaatcacgtcttcatctgggggagcattgccatttatttctccattttatttacaatgcacagtaatggcatctttggcatcttcccaaaccagtttccatttgttggtaatgcacgacattccctgacccagaagtgcatctggcttgtaattctcttaacaacagtggcttcagttatgccagtggtggcattcagatttttgaaggtggatttatacccaaccctgagtgatcagatccgccggtggcagaaggctcaaaagaaggcaaggcctccaagtagccgaaggcctcggacccgcaggtcaagctcaagaaggtctggatatgcttttgctcaccaagaaggctatggagagcttatcacatctggaaaaaatatgcgagctaaaaatccacccccaacatcagggctggaaaagacacattataatagcactagctggattgaaaatttatgtaagaaaaccacagacaccgtgagcagctttagccaggataaaacagtgaaactgtgagtcaatatgaatttaaaccacgtagttatcttttcacttcaggtggagctgaaattctgctggctccagagtttgagatttgaggcaagaggtggggcaggcagattgcctcacttaacttaaatctgcggcagacaactgccagtgcccatcaaacaggagtgtgcgctatggaaaaccaggccagagggtcactgtctggtttgtgatttggtggacaaaacactcgctgttacaagtacagattttttttttttttaaatcaacctagataccaattgacctgaactttagaatcttatttatggagaaaaacttgtaaagctgcatattcactgaatggatcctcaggcggataaaagggtgcattttaaaggtatatatccaagctgaaaagcatgcctattgacagataaacatgtatctgtaagatcagcctttcccaaggtatacttttaaaatttaaagcgtgtactgtgttgctttcagactgagttgcatgtcactctttagtcttgatatctacctgtctgttcagccaggacaacaaatggcttccaagcctgaagaatacaaaagtgtgcttgtgtttctcatttttataccagtctagggacaaaggagactgaacatctttgcagcaggataggctggtaatttgatcaaatttattcaaaaagctctcagtctgtgtcatgtaaggacatgcttatgaaatgtgagagaggctcgccactaagtattctaaatacttttcaatggcttttctaacaacctcagtagtaatttgctgagcatcatccagaccattaatagaatcagcaaagcactggaatttcacactttaatgataatattccacatagtctatgggcaaatattttcaacatttccaatttttaaagcttcagaattgaagccaaacaaattaataaataattgttttaattactatttaaaaactcaggtttagattgtttaaaattagttgcttttgatactcagctgtcatgtttataattcaaacatgtagtaaacatatgtaggtaaggttgtttttttggagatgttgcagctcaaatttcagtccacatatgaatcatcagtgtattttccataaagtgattcgggcatatttgtgtgaaaacctcagttctgtcacttcttacctctataaacttggacgataatgtgccttctctgagactcagtttcttcctctgtaaaatgaggacatactacctacctcacgtggttggttgatgattgtctgtcaaagcacaaactctgaaattattaaaaacataattatttcataaacagatgagttaagttccagttaactcaacatcagtataacagagcaattggaagagaatatgaaaaaactggaatctaaatagtcagtgaggaaggctttgataaaatgaaattgccagaaagatataaaactggttagggtcctacagggaaataaaattataaccgtggaggtacatttctctaccagaaagcaaaaataaagcatcatgtcttaatggttttctacaaatcaacttctaattctacagagtccttaatctggtccctattaaattcttggtcagacaaagttacatttcccaagagagtcaggtgacacttgagtgagtttgatggataatgagctaatgtgatatctataggtcacaattttttaaaaccaaaattttcaagtctgggataatctttcctaaatgggatcaaatgaaataatatgtgtaaaagagtcaaatgcagtcctttaccatagtaactgcctatggacgttgtctttcccttacatgcctgcctacacttaaccagatgttggttttcaatgtctaatttgtcattagtttcaccacatttgctcactttttgtaacatttttgcaagatttgaaaactttcagtaaatgttttggcactattggtaaaaaaaaaaaaaaaaaaaaaaaaa

SEQ ID NO: 75 - DNA, 1410 bp, Homo sapiens
gcccacgcgtccgagaaaaatgctgctcagtttttattgtctaccaatggtaagtatacatattttctttccatgtgcccactgtgtgtacctgttgcacatatcctgtagcctaggagaggaatcatttaacagagatacttgtaaaaaggacttttgtttttctatacagaatgtaaactctacttttttactgtcacttgcagtttttagattctctgaaagattctctgatagcaattttttgtttactacacctccaatttgtagtgaaaagaatgggctgctataccattggatttaggtcaggtactatttctgtcatttctcagtctcgtaatcttgggcaggttactaacactgaattgaattttcctcagcagcaaactagagatagcaattttttattatagtattattatgaatattaaataacttcacatacatcatgagtgcaagtgctcaataaatgttaatttattcctcctttttaagtgtttgtaaactacacagagtatctcaaactgcagatacaaaatactcaaaggatggtctccattccaggatacgctataggagagcactttcttacttgatcaccattagcatattgccttcttcccagcaatccacatggctggaaggagattcctctcctactgtttacttgccaagggaacattttttgttgttttttgagacaatgtctgtcgcccaggctgaagtgcattggtgtaatcacagctcactgcagcctcgacctccctacctcagtctcctgagtagctgggaccacaggtgagtgccaccacacccggctaattttttaaaaacatttttgtagagcctgggtaacatggggtggaacaagcctgtagtcccagatactcaggaggctgaggtgaaaggattgcttgggccagggaggtcaaggctgcagtgagccgtgaaaggccactgcactccagcctgggtgacagaatgagaccttgtctcaaaaaaaaaaaaaaagtttcttggaacctatacgtttttttttgttttttttttgaaaagccagaccttgtgcccttgttttgaacaccgactgggaagatggggcttaggtaacagccaaacctggctgtcagctgtgtgggagccaccaccctctctgggaagagttcctgcttctgtatggcaagcataaatcaagctcagtctgggttatggagaagttgaaaattgttttgttcctcattagtttataattgtatgaaatacgattttaatgaaaacttttcagaattcacgtttgtgtagatatttcagagaaccatttttactttacatcctaaaactgccttttcctatggttttgtcaataaaacactatgatgttgaaaaaaaaaaaaaaaaaaaaaaaaaaaa

SEQ ID NO: 76 - DNA, 1655 bp, Homo sapiens
ccacgcgtccgggcaaagaattaaacctggtgtttggacttcaacttagcatggctagaattggaagtacagtaaacatgaacctcatgggatggctgtattctaagattgaagctttgttaggttctgctggtcacacaaccctcgggatcacacttatgattgggggtataacgtgtattctttcactaatctgtgccttggctcttgcctacttggatcagagagcagagagaatccttcataaagaacaaggaaaaacaggtgaagttattaaattaactgatgtaaaggacttctccttacccctgtggcttatatttatcatctgtgtctgctattatgttgctgtgttcccttttattggacttgggaaagttttctttacagagaaatttggattttcttcccaggcagcaagtgcaattaacagtgttgtatatgtcatatcagctcccatgtccccggtgtttgggctcctggtggataaaacagggaagaacatcatctgggttctttgcgcatagcagccactcttgtgtcccacatgatgctggcctttacgatgtggaacccttggattgctatgtgtcttctgggactctcctactcattgcttgcctgtgcattgtggccaatggtggcatttgtagttcctgaacatcagctgggaactgcatatggcttcatgcagtccattcagaatcttgggttggccatcatttccatcattgctggtatgatactggattctcgggggtatttgtttttggaagtgttcttcattgcctgtgtttctttgtcacttttatctgtggtcttactctattggtgaatcgtgcccagggtgggaacctaaattattctgcaagacaaaggaagaaataaaatttcccatactgaatgagaagttaaaatgaatgtgtcagagaatgggcttaacacatcgttggtttgaaaacttccattttaaaaatttagagtttagtcattagaaaaaataatggactggaaagttatatttatatccaaatatacctatttcaaagtgtatttgtgaggcctgttttagcctgtgtcttttgtattgtgtgttgctaaagaattctacttttagtaggctaatcaacaatgaaagggttagaaaattgctgtggaacatccaggtgaacttcaggaaagacagtgaaaaatggaaaacgttggagcttctgttgagataatcttcattaggtatatatcttagggatacagccttttctttatcttatagcaggaaaaaaaaacttttgagggaaatagaagggctgcgttacacaaaataaacaatggcattgtcataggccttccttttactagtagggcataatgctagggaatatgtgaagatgtttttttgaagtctctttctgatcacgaacaatagcttgcgctctactctgtagttatgtggattgccgagcaatgacccttttcaatttcttatttctgtgttactgaggaccctaatcacttagggatgtaattttatagtataaactttctgtacagtttttcttatagtctaataagtaaaaagtgtccttcaaattatgataattgcctatgtacatggataaattaaaacactgcacacggaaaaaaaaaaaaaaaaa

SEQ ID NO: 77 - DNA, 1905 bp, Homo sapiens
  misc_feature (1)..(1): n equals a,t,g, or c
  misc_feature (1828)..(1828): n equals a,t,g, or c
  misc_feature (1837)..(1837): n equals a,t,g, or c
  misc_feature (1846)..(1846): n equals a,t,g, or c
  misc_feature (1860)..(1860): n equals a,t,g, or c
ngccacagcagagacagtggagggcagtggagaggaccgcgctgtcctgctgtcaccaagagctggagacaccatctcccaccgagagtcatggccccattggccctgcacctcctcgtcctcgtccccatcctcctcagcctggtggcctcccaggactggaaggctgaacgcagccaagaccccttcgagaaatgcatgcaggatcctgactatgagcagctgctcaaggtggtgacctgggggctcaatcggaccctgaagccccagagggtgattgtggttggcgctggtgtggccgggctggtggccgccaaggtgctcagcgatgctggacacaaggtcaccatcctggaggcagataacaggatcgggggccgcatcttcacctaccgggaccagaacacgggctggattggggagctgggagccatgcgcatgcccagctctcacaggatcctccacaagctctgccagggcctggggctcaacctgaccaagttcacccagtacgacaagaacacgtggacggaggtgcacgaagtgaagctgcgcaactatgtggtggagaaggtgcccgagaagctgggctacgccttgcgtccccaggaaaagggccactcgcccgaagacatctaccagatggctctcaaccaggccctcaaagacctcaaggcactgggctgcagaaaggcgatgaagaagtttgaaaggcacacgctcttggaatatcttctcggggaggggaacctgagccggccggccgtgcagcttctgggagacgtgatgtccgaggatggcttcttctatctcagcttcgccgaggccctccgggcccacagctgcctcagcgacagactccagtacagccgcatcgtgggtggctgggacctgctgccgcgcgcgctgctgagctcgctgtccgggcttgtgctgttgaacgcgcccgtggtggcgatgacccagggaccgcacgatgtgcacgtgcagatcgagacctctcccccggcgcggaatctgaaggtgctgaaggccgacgtggtgctgctgacggcgagcggaccggcggtgaagcgcatcaccttctcgccgccgctgccccgccacatgcaggaggcgctgcggaggctgcactacgtgccggccaccaaggtgttcctaagcttccgcaggcccttctggcgcgaggagcacattgaaggcggccactcaaacaccgatcgcccgtcgcgcatgattttctacccgccgccgcgcgagggcgcgctgctgctggcctcgtacacgtggtcggacgcggcggcagcgttcgccggcttgagccgggaagaggcgttgcgcttggcgctcgacgacgtggcggcattgcacgggcctgtcgtgcgccagctctgggacggcaccggcgtcgtcaagcgttgggcggaggaccagcacagccagggtggctttgtggtacagccgccggcgctctggcaaaccgaaaaggatgactggacggtcccttatggccgcatctactttgccggcgagcacaccgcctacccgcacggctgggtggagacggcggtcaagtcggcgctgcgcgccgccatcaagatcaacagccggaaggggcctgcatcggacacggccagccccgaggggcacgcatctgacatggaggggcaggggcatgtgcatggggtggccagcagcccctcgcatgacctggcaaaggaagaaggcagccaccctccagtccaaggccagttatctctccaaaacacgacccacacgaggacctcgcattaaagtattttcggaaaaagccgtgtggtccagcttnccccgtggnttcaattantttcccaattttgnctgcattcggaaccattagccctgcaatttagcaggggcaagccc

SEQ ID NO: 78 - DNA, 6297 bp, Homo sapiens
ccacgcgtccggtcagctttcatctcgtcctatctttgttcaggcaaacttctctagttctgttttaataggcatatttgttaggtctgttttttgaaatcctcttttttacattgtttaaagataatgccttggctaaaaagcctgcttcacttttccctgtttttagttgttttctccacattggcagtaaagagccttggcgtcccagtagcagcaggttctcctttttgtattgtggatgttttgcatttcatactgttgtgaagagtggctttgatcatacatgttgttggtatatttgcctttttgctgggggtgtgagaagaaccagagatgagcagaggtacacccagtagacttcccagcctgcagagcctcccgggaagagcttccgtgttcaggtgcttggggccccaccctaggagcctgactcacagtcagagcagggtcccggcttgtgttcaggattttgaaacatttgtaaggtgattttgttgtttctacacctttctcctcatctttttttttttgtagttaatcgttactaataacagaaaagacatttttggcatggtaattggcacaaagtgaataattgttgaatagatgacttttgaggctttcaaaattcgagtgtccataaaatccatccagagccacctggttcctttttttgaaccacttaacgtaattctggaaaaccttgactgtgggtcttaagtttggtggattgctgcttctcactggctgacctttggaggtcgcatatttcaggatgtgattccacttaggctccatttcacctgacactgcaattctgtgccttcagagggatttgttattgcgaatgatgtggacaacaagcgctgctacctgctcgtccatcaagccaagaggctgagcagcccctgcatcatggtggtcaaccatgatgcctccagcatacccaggctccagatagatgtggacggcaggaaagagatcctcttctatgatcgaattttatgtgatgtcccttgcagtggagacggcactatgagaaaaaacattgatgtttggaaaaagtggaccaccttaaatagcttgcagctacatggcttacagctgcggattgcaacacgcggggctgaacagctggctgaaggtggaaggatggtgtattccacgtgttcactaaaccctattgaggatgaagcagtcatagcatctttactggaaaaaagtgaaggtgctttggagcttgctgatgtgtctaatgaactgccagggctgaagtggatgcctggaatcacacagtggaaggtaacctttcctcgagaactttcattctaaagagtaggtgcagcatcactgaagtagagtcaagtttcaaagcattcacgtgtgagtaacttgaataaatactacatctggttatgccaattagaatcaatttcggagtgttatttcatgacacatttcatgacaagtggcatgtttattcctggcagtggaaaagtttttttttctccacgtacagaaataaactcttttactctcatccctgtaagggtagctttgctttttttttttttttttaaattgggccgggattcaagccttgtttccaatatgaagtaattcattacaattttaggccagaaacagcctgaggcttgtttaaaaagaaaaaaactagatggaaaatgttattttataatgcttgtcctggtttttagaataaatgtatttcatctttgtttttaacagaatttatgtattaataatttggggattttctgtaaagattgttttgttttgtcttggcaaataatcttcctatctttggagtgaatgagaatcaccatttgtcacctttgagagaatggatactcctgccctgtgatttttgttggtattggatagtgctagtaatctggaatgtaccctgtggttctgcaggtaatgacgaaagatgggcagtggtttacagactgggacgctgttcctcacagcagacacacccagatccgacctaccatgttccctccgaaggacccagaaaagctgcaggccatgcacctggagcgatgccttaggatattaccccatcatcagaatactggagggttttttgtggcagtattggtgaaaaaatcttcaatgccgtggaataaacgtcagccaaaggtgagtttttctttttccaaaatgacataacatttgatcttgtacatttaagacaaaaactaaccggagtttagtagaagtacagaggaaagaggagcttcttgctgtgggcagcaggagagctgaccctgaatgagggggaatttcatttaaatatcaagttttccaaaaagcagaaatttctcataggtgataggtaagtggagaagtcagtgtttgggggaatgtattcctgccacactgtaaatccagttatttaataaaaattgaaaagacatgaaagattgctctgtggctctcaattggaagccccaggtttctgtgctctagttccttgtgagtggttcatttcaccaattacagatagcagagctctgctgaccccaagccagcccgggttcaccttggctgcaaggaatgatgacggccttgtccagacctggctagaaagatgcagcccggcctgtttgctatggatctaaactgcctgctggttcctttccaaggcaggccaggaaacagtggtgaaggagtgttgccctcatcctaacacgcagtcctttgtaatgcgtgctgtctcacctgtatcacgccagcattatttattagttcataaatcagccttccatgatgaaagaacctggcctggaatcaaagtctggaagtctgtatttctttaagatccatgcttgaaaattaggacaaaaaacgcttagctttggaggaacaaaaaggaaacagttccgcaaagagctccagcctttttctggggcacggtttgtgcagtttaacgttggaacgtacagcctcagacgggcaaagggggcgactgcacttctgccgccaccagggtttttctgtcaggttagaaagtatttcactttgaggctaaaagtctcacaaggtatcttaacgctgatggaatgttattttcatggaatcagtataagaaattatattgtaaagtattagatactttgcattcattcatactaggtttcagtagcttgtgttttagactttgcgcttgtcacattttaagtggtcagtgaccacaggcttgtggctgcccagctgcagagcacagtgcagtcacagaggagcctgtcttagagacgcgtgctttaggttggcctgcattagggcttacattgatgtttctgacgtgttaatacttacatagaaaggttttgacattttttcaattagccccttatgtatagtcttactttttagaacaacttattgtcattttctcgtttaaataatatgaatacttctctctttctgttactatgtcagtttcttattcacttagttcaacagatctagtgctagcatggcctgtgctgctgttggtcctactgggaacgcaggtagagtctccatggtcaggatgccgtgttctgttgtggtgctgaggcctgtaagcacttggctagaagttaggccagggaagctcacactgaccttggtatttgaaggtcccagaatgaggttgttgaggtagaacagagatgggagaacatgcccttggagctggactcaacaagaaggcccctctgggggaagctgaggttggacaggaagggcgtgtgccctcactgacttgctcacaggcttggggttcatctgttttggtttttgcttttttacattatattaacatggaaataaaaggtgttccctgggatgctcccggcttctctgctcagtagctttgtggctctgagtaaaatgaacttgcctgtgttgaaatatcctaatttttaaacttacttcatagggactgaggaattacgacttttatcaattttgtgacctgttaaaatgttaaaaaggacatgtattttttaaagatctttaagtaaaacattttgctcattcccaaagccaaatttaaattataccatggccctaattcagaagttcattctttggcaggtgtttccttggtgcctggggcactctctctttctcccagttcctgtggcagtttgtccaggtgcccaagaacaattcataccctcctttctcgttatttatatacttgtctttttgcccctgccgggtattttagaaatcgtgcttggtgcactttgtgtccttcagtgtgccttacccagagcagatgcacgataagcatttttacacgagaacaagctggtggtgtaggcctctgctaaggaacaggctgtatatgctctttgtgggattaaggtagaatcagctttaactccaaagaaactgtccatgaattttgtttataatagcaagtagatttaaaatgacactttgaaaaaattctgttgtctttctctacatataatgctgtagaaaaatataactgatggattttgtgaacgtggtatttttaacttttcgtagcagcacaaagaatgctcctctttgtgtgtcaatgaaattgttctttatgacagcttcagggtaaatctgcagagaccagagaaagcacacagctgagccctgcagatctcacagaagggaaacccacagatccctctaagctggaaagtccgtcattcacaggaactggtgacacagaaatagctcatgcaactgaggatttagagaataatggcagtaagaaagatggcgtgtgtgggtaagaaaagtggttatgtcttgatctaatacgctggtgtcttcacagtccttttggattaaatgggatcccagagccacttcttggtcggtttgagggggcagtacatgtgtggtatcaggcacatgcagtgtgagggctggactctgtggaagccggaaggtttcaacatctgccgcaaaccgttccatgttgcacagaactgacagaaaggaagaatgtgcttttggtattgaaggttaccacacattacagattgatttgtctcatcctgattccctttttagtcctcctccatcaaagaaaatgaagttatttggatttaaagaagatccatttgtatttattcctgaagatgacccattatttccacctattgagtaaggattcagcctttttaattattcatttaaagaaatttactatagagtatcaaatgtacaactgatcacatgtaaccattgttttgtatgtagttctgtctagctttttttttttttttaacctttttaactgcatattagagcaggatgaaactttagaggttactcaatcttttaatttaaggagaaagtaaacttttactttgtgaacatgatagataaaaaaaaactggaccgggcgcggtggctcacggctgtaatcccagcactttgggaggccgagacgggcggagcacgaggtcaggagattgagaccatcctggctgacacggtgaaaccccgtctctactaaaaatacaaaaaaaattagccgggcgtggtggcgggcacctgtagtcccagctactctggaggctgaggcaggagaatggcgtgaacctgggaggtggagcttgcagtgagccgagatcgcgccgctgcactccagcctgggcgacagagcgagactccgtctcaaaaaaaacaaaagaaaactggactgtgattatgaatctaaattagttgtgatcctgaacctaaattactcaattgagtatatagacgagtagccaaggttgtctagttcagtttctgtagaagaaatgaagagcagcatgggtgagggctaattagggatgacatagacagaatatagaggaaaagggtttaggacaagtctgacattcatctgtttcttattcattgaattttagaatctatttaccagggcggtcacttactgtcttttttaataactggtcctttgcatacatttgtaaaagtctattaaaaaataagtctcagccgggcacatcccagcacttggggaggctgaggcaggcagatcatgaggttaggagtttgagaccagtctgaccaatgtggtgaaaccccgtctttactaaaaatacaaaaaaaaattaggtgtggtggcgtgcacctataatcacagctgctcaggctgaggcaggagaaccgcttcaacccgggaggcagaggttgcagtgagctgagactgcgccactgcactccagcttggaagacagagcaagactccatatcaaaaaaaaaaaaaaa

SEQ ID NO: 79 - DNA, 3408 bp, Homo sapiens
ccacgcgtccggaggcaggaccttgtcctattcattaatcttgcccctcaacagttattttcagaggggcaagaagtgtttcagggttcttggcccttgtttgaccagtcgtcctaaccctcatgtcttgggtcattgttgttataatctggggttaccttttggaaggtcatggggtacccttttgcaaaagttatgggccctctccttggaaactgcacacacaccatgcagcttacaattcagggagttcacaggtctacagaatcctggaaactctcatgtccggttctactcattgtagcttcagtggaaccttctagcagtcctttccagctcctccccagctcctcagctctgcttccctccgcccatcaagccctcctcagcccataaggtgggccaggtggcctgtggggataaatcagagtgcccacaagtgcaggggcccaaagacatcccagagcaaacccaagaatccctctacaagccccagcccactcagaaggatgcattttgccccctctgtttatttgtttgtttttaattatgaaagtagggcatggtcattgttgagaatgtgagaaatgcagagaagttaaaatgatgctttttgtttagggcgctgctgcttctggcttaagatcctaaatcaaagcagctgccagatctggacctaagacttgcttcccatcaccttacataaaagaaagagcactggactaggaatcaaagatctgaattcccatcaaatctctgctattactagcttttatctctatttatttatttatctgtctatctatctagtaccttttgtgaatatgagtgtttctcaccgaggccctcccatctctcttgcccccgatcctggaatggaccaaataccttgtttactgaaggatacagatggcatgtgactgttgagaatcactcaccctcttagagccatggtttcctcttctataaaatagggatgttcgtgcctatttgctaatcatgagtgacaatgacataaggtacataaagctgtactgcatgatgcaaacataacatcatatttgtagggttgttgctaataatactatccatcagcaaagcagtcattcatttactcagtcaaatactgatgcactggtacattcagtttcctcttttgtaaaatggggataaaaataggacttagctcatagggtatttaagattcagtgagttaatatatataaaatacttagagcagtccttggaacatattaagaactcaatacatattagctagttgagcaggctgtagtatttgttccagccaagaaaagactgttctctaacagcacaggaaataaagatggggttaggcacgacacggcagcaggacttaccttctgtctaattcagctggcagtcaaagaaagaattattagaagcctatgagcttggtctcccaaagatctactgagtacagggggatatttaaagaataaaaatccctagacccacttacagtacaggagagacaagaagctgttcacacaataacaagtgctaaattccttgatttttatactgacagctgaagttttagagaagagaaggatcaataaagaccggaatattaaagcagacaggcctaaaagaggattttagatttgataaagaattcctccagttctcagagcagggactttggagggtaacaacttggatttcagtccttgcctgccacttactgattgtatgaccttggaaaagttacttcacttctgtgagcaatgattctctcatctggaaaacaaaacaaaacaaaaaaactaacaagggtgataataatacctacctccctacctcatagggctgatgagaagattaaaaagtacctacataaagcccttctctgcgtgcctggagcatggcaagggctccatgtgaaccactatttttttttttttttttaatgaaaagtcatgggcagcaccaaagctcagaattttggcagtaaggaattatgattctacattgaaatttgccagaaggggagctgactgcctcatgagacatttttgaatgaggccaaaaaaggaaacaagtgtatcctgggattttacgagatgctaggtatgtccttagcacttaatcctcatgactaccctatgatgtaagtactatctgttgtccctattttacagttggccaaggtcacatagctgaaacggacttctgtgtgtcttctaacttttgctttcaggtctggaaaaatgcaatgtaaacctagaccctctttgaaatactgaagatggtaatcttatcccttcctcactttctgttttctaaaataacagtccttgttccttacaatgtctgttttccagattcttagaagactttttgcttattttccataactctttacttgtgatccctgaatgacaccgggggtatagcagagaatgtccatttcctcaaagttcaaaggtcctacaaaaaatagttgctagcctggcatgatggtgtgtgcctgtggcctcagctacctgggaggctgaggcaggaggattgcttgagctgaggagtttgaggcgcagcgtgatcgcggctcaccgcagcctcccgggctcaagcattcctctcgcctcagcctcctgagtagctgggaccacagctccactaattttgaagtttttttggtagacatgaagtctccctgtgttgcccgggctggtctcaaactcctgacctcaagcagtcctcctgtcttggcctctggaaatgctgggattacaggcgtgagccactgtgctggcctcttttttctttttctttttttttaaggtttttatttgttaaatgggaagtctgtgccatcaactgagcattgtattttctccttagtaagagcctgggtgggccactgggagagaactatacattaaatgtaagtagcctctgggtagagagcccctggctggtttcctttcctttctctccttttctctactttggtgtctggaggcatttcccagactccagtttcttaccaccctcacggattttgctattgtattatcacctcctttatcattcccaaaattgactttatggagactcattaaaagaaagaatcatcggccgggagcggtggctcacgccacgaaggcgggcgaatcacctgaggtgcggagttcgtgaccagcctgaccaaaacagagaaaccccatctctactaaacaatacaaaattagctgggcgtggtggtgcacgcctgtaatcccagctactggggaggctgggacgggagaatcacttgaacccgggaggcagaggttgcagtgaccaaagatcgcactattgcactccagcctgggcaacaagagcaaaactctatctcaaaaaaaaaaaaaaaaaaaaaaaaaa

SEQ ID NO: 80 - DNA, 1663 bp, Homo sapiens
tcgacccacgcgtccgggcagtggggtgagggcacacaagcagttcagggtcccagcaggaagtggggctgcagggccggggtgggtcctgggcctggccatcaggcagcctagcaggttgttctgggcatggagggggcctggtgtggctgagggcatgcccagggctccctggaggatcccgctctgtgccctgcccaccctgtgcctggggagccctctgccctcacagcccacccaccccattttctatgaccacagagctccgacctggaagatggctcacccaggaggtcccaggagctctcactcccccaggacctggaggacacccagctctcagacaaaggctgccttgccggcggggggagcccgaaacagccctttgcagctctgcaccaggagcaggttttgcggaacccccatgtaaggcttccccggggtggggtcctcccagccgtgggcctcagggtgaccgatcacagggagagtggctccctgccctgggcaccccctgcggtggccccgacgacagctgaggagtgaccacaaggtctctgcccacagtgctcggggtgcggtgtctgggctgcgaagtggatccccctcctttcttgggcactgcagcagcttggggggctttttggacgtggatgtgcctggtcctggtttcccgagggcctttacagtggatgaggaggtgaacacaggagtcctgagagcaagcaccacctcgggctttgttgtagaaacaatggcccggaccccaggccggagccgtggcttggcctcctgggtgtgtcttggcatctgaaatgcaggctacccacaccggctcacctccaggggtacaggcaggtcccacagggagagcttggcgctgagctgaggctgtctgggctcctcgcctcccaaccagtctgcagttacaggggccagtggggggcgggtgagaaggacgggttccctcaggggagccggccggagcccgagccttcccccttctccaggacgcaggcctgagcagcggggagccgcccgagaaggagcggcggcgcctcaaagagagttttgagaactaccgcaggaagcgcgccctcaggaagatgcagaaaggatggcggcagggggaggaggaccgggagaacaccacgggcagcgacaacaccgacactgagggctcctagccgcagcagcgcaggccccgaccagggcacacccaccggcccggcctcctgccacccgggggtgccgacgccctggggcgcagacttccccgagccgtcgctgacttggcctggaacgaggaatctggtgccctgaaaggcccagccggactgccgggcattggggccgtttgttaagcggcactcattttgcggaggccatgcgggtgctcaccacccccatgcacacgccatctgtgtaacttcaggatctgttctgtttcaccatgtaacacacaatacatgcatgcattgtattagtgttagaaaacacagctgcgtaaataaacagcacgggtgacccgcaaaaaaaaaaaaaaaaaaaaaaaaaaaaaaaaaaaaaaaaaaaaaaaaaaaaaaaaaaaaaaaaaaaaaaaaaaaaaaaaaaaaaaaaaaaaaaaaaaaaaaaaaaaaaaaaaaaaaaaaaaaaaaaaaaa

SEQ ID NO: 81 - DNA, 2343 bp, Homo sapiens
agtcaggactcccaggacagagagtgcacaaactacccagcacagccccctccgccccctctggaggctgaagagggattccagcccctgccacccacagacacgggctgactggggtgtctgccccccttgggggggggcagcacagggcctcaggcctgggtgccacctggcacctagaagatgcctgtgccctggttcttgctgtccttggcactgggccgaagcccagtggtcctttctctggagaggcttgtggggcctcaggacgctacccactgctctccgggcctctcctgccgcctctgggacagtgacatactctgcctgcctggggacatcgtgcctgctccgggccccgtgctggcgcctacgcacctgcagacagagctggtgctgaggtgccagaaggagaccgactgtgacctctgtctgcgtgtggctgtccacttggccgtgcatgggcactgggaagagcctgaagatgaggaaaagtttggaggagcagctgacttaggggtggaggagcctaggaatgcctctctccaggcccaagtcgtgctctccttccaggcctaccctactgcccgctgcgtcctgctggaggtgcaagtgcctgctgcccttgtgcagtttggtcagtctgtgggctctgtggtatatgactgcttcgaggctgccctagggagtgaggtacgaatctggtcctatactcagcccaggtacgagaaggaactcaaccacacacagcagctgcctgactgcagggggctcgaagtctggaacagcatcccgagctgctgggccctgccctggctcaacgtgtcagcagatggtgacaacgtgcacttcggcctctccctgtactggaatcaggtccagggccccccaaaaccccggtggcacaaaaacctgactggaccgcagatcattaccttgaaccacacagacctggttccctgcctctgtattcaggtgtggcctctggaacctgactccgttaggacgaacatctgccccttcagggaggacccccgcgcacaccagaacctctggcaagccgcccgactgcgactgctgaccctgcagagctggctgctggacgcaccgtgctcgctgcccgcagaagcggcactgtgctggcgggctccgggtggggacccctgccagccactggtcccaccgctttcctgggagaacgtcactgtggacaaggttctcgagttcccattgctgaaaggccaccctaacctctgtgttcaggtgaacagctcggagaagctgcagctgcaggagtgcttgtgggctgactccctggggcctctcaaagacgatgtgctactgttggagacacgaggcccccaggacaacagatccctctgtgccttggaacccagtggctgtacttcactacccagcaaagcctccacgagggcagctcgccttggagagtacttactacaagacctgcagtcaggccagtgtctgcagctatgggacgatgacttgggagcgctatgggcctgccccatggacaaatacatccacaagcgctgggccctcgtgtggctggcctgcctactctttgccgctgcgctttccctcatcctccttctcaaaaaggatcacgcgaaagggtggctgaggctcttgaaacaggacgtccgctcgggggcggccgccaggggccgcgcggctctgctcctctactcagccgatgactcgggtttcgagcgcctggtgggcgccctggcgtcggccctgtgccagctgccgctgcgcgtggccgtagacctgtggagccgtcgtgaactgagcgcgcaggggcccgtggcttggtttcacgcgcagcggcgccagaccctgcaggagggcggcgtggtggtcttgctcttctctcccggtgcggtggcgctgtgcagcgagtggctacaggatggggtgtccgggcccggggcgcacggcccgcacgacgccttccgcgcctcgctcagctgcgtgctgcccgacttcttgcagggccgggcgcccggcagctacgtgggggcctgcttcgacaggctgctccacccggacgccgtacccgcccttttccgcaccgtgcccgtcttcacactgccctcccaactgccagacttcctgggggccctgcagcagcctcgcgccccgcgttccgggcggctccaagagagagcggagcaagtgtcccgggcccttcagccagccctggatagctacttccatcccccggggactcccgcgccgggacgcggggtgggaccaggggcgggacctggggcgggggacgggacttaaataaaggcagacgctgtttttctaccc

SEQ ID NO: 82 - DNA, 3091 bp, Homo sapiens
aaaccggaaagtttgtaggaaaattgctgcacatggcctttgcagaaaagagagccttcaaaacctcttacattccagtagaaaactctctctgcaagtccttaactttgttcactcattccaggaaggtgcttcaatattggatattcacacagagcccagtttttcaagtttgctttcacagtcatcgtatgctgacatgggtgttccacttcctgcaaaaaacttaatatttaaagatggtgtcttatcagaakggagtggacggtcaccttcctcacttcttattgctaatctccatttgcaataatttggttacaccatttgttgctcacactttctgccttttttctttcttaacgttagctttatagtgtcagccactaaaaagcatcctgctgctgcagtgcaattcttgcttaactaatattaaaagttggggaacatattcatgttttctgaagttttgctcattattgcacatcttattgcgacaaagtgctttttagcagccagcactgtattttttaccttgagacaatctgcatttcttttataaaactaagtatatactttataggctttatgatgactgttatgtttataagcagtcactatgaaaattgcaatggtaattttatatgttagtttatcaaacataaatcttgtttaattttatattttgttacctatactttgggggatcaagggaagagatggaactcttcctctgaaaaggcttcttggtacttaaagtagtaaaactataaaacaataaacatccagtattgagagatgatatgatagggcattatgaattcctatgggtgtctgtaaattatgtatgtcagttggacattgtagaaggtatgtaaatcagcatagttgtgtataacttaaccttgatttataaggtcttaagattatgactattcattgacatctcatgagaagctttagaagactttctatttttaaacaccatttatatgtggacttctgttgtcactgactttgggctttatattttcatagagtctttatggaaaaaatagaatttattttccactcttgtagctatagctgctgcacactttcaccctgatttatttttttgtttcttagctttgatgttttcaaaccaaggattgtgattttaggttagaattacatattagaagcattaagactatgtctttggatcagaatgctttagtgataaacctactttgaagacatactcttaagcaatctggatcttaaatttatgtgaatacttttttagaaaatgataaagaaaaatggaattacttcaaagtgtttcttgagtcattgattcttttagcatctcaaatgttaattagaataattggaatcactttttagacttttcaagttaccttccttgggaagtttgtgcagtgttatagtttagtttagctcctcttacagggtaatggtttgctagtttaaaactgtaaccaaacgaactggtcagacaacatatatctaaaacacttaaaatgttaggaagtttgggaatgttataacctaaacgtttttgctggtaactttttgttatttatagatatttgtgtatttaacatacatacttcaggaaatatatgcctttcctaaaacttaaccatgcattcaataccatggcctatctatagaattgaatattttggaccatgttatctgtggcacagtcagtgctgtgtttgaggtaaatgcagtaacggttagttttctactttgtcttatagaaggtagaaaccatgtgtatgttatgtttgtctataaaagaaaaaatactaatattaaataatttcttacgactctgagtcactcacttatttttccaataattgatattgtacattcctagtgccattaggtatgtatgtatgtaacttttacagtttttcagctgaaagttgtaagtattttttttttttgatcggggctctttaatctcattttaatttcctttgtttgaactgtagttatttattcctatattaaccatctaaaccaactgtaatgacatgtacactaatacagaattgaacatttgtagttgttggcagtgaacccagttgttggtgaatttaaagcttaaaatatgggaatgatttgctgctatatttcctttgagagagaaaggaggaagaaatagaacctaatagtgatcatgaattttagggaaagtaccgaagaaccatggggtcccctctggtttcttgtgttgaatgaggcaagggtaatcatctgattccgagctgaagacctctggtcctcttaaggagggagagtgcatttttagagcttttagcaaaatgtgaaaagctgatgtttgcgccttgctttgtgaatttggctttgttttacttatacattaactcatgtaatctcttaaatcttacaagcattgatccatttcaacaaaaaggtaaatttaaaatgcagactttgttatttgccaaagaagattcatgaaaaatttacgtccaattattttgcaaatagttaatttcatttggctttttaccatgttccttcctttctttttcccgcttccttaatgtaatttaaaccctggcaaacattctttagaaaccaagaggaaagaaagaacaaatatcaaaaaagacatagaatttaatattgatacaatttcacctctaaaatggatttgaagaaatgcaactttatatcaaaaaatgtcatctgatttcctttgtttcttttttaaattatgtaatcagatgattttatgtttttttttcaggggagcggaatattggtttcttttacttgttgttttcagttttctctgccattcatgtttcttttttgtgttcagtgtttcaaatacaatttgtatttaaggattttaaaataccaaactgtaactgagtacagtggatcgttttctgttaggatgttaatattatacaatgaaatctataaagtgttgtcaatttgattattgacacatataacatgtttacaaataaactgtggtattgatcaagttactatgaaaaaaaaaaaaaacccggggggggccccggaacccaatccc

SEQ ID NO: 83 - DNA, 1396 bp, Homo sapiens
  misc_feature (668)..(668): n equals a,t,g, or c
  misc_feature (739)..(739): n equals a,t,g, or c
  misc_feature (751)..(751): n equals a,t,g, or c
gctggtaaccaggtggaaccatttcacgtgtccctccccagctgcctcagtccccttccccacctgggccacagcatgggggttccctcacccaccgcctggccctctcttgcctcgttccacactcagaaaaaagcaaggatcagacaagaagaagagtccccacccctcccgtccccgcaggagctggcgttctctgcgctaagggtgttttttagagtgatgttttttctcctctgtctcgttgccctggagatcaaagggttcactttctcagcgaggggtgccagggacagatttctaaacaagtctggaccgcagccaggaaaaaagatgaaaacaacacactgtaaacagcctctattcagcaaacctggtcaggtcagaggggctytgaggaaagcaagagggaggcaggaggagagggaagcggtggggatgtggggggggcgggggcacagttatcctgaatacataaaaacaagtgaggtcactgaggtcagggatagtcccaaacatccccaagtccagcctttcctgacaaccagggttacatgcagagtcccaggccatctgcaggttttggaggccctgtgcggggcctgggggtctatgtttaaacacgcccttgtggtggtccaagtycccagaascaggggaagggcgantctgggctctgaatggcargtggggcagctccamctcatcctcctacatggcacccagcactgggctgcangcytggtccccnacttgccgcaggaatcaatcctgccagctcagagccsccgtgtgacaaacaccccaggaacagaggagacatgagaaagggactcaccagcccactgcccaggatgtagaagtcgtcgcaggagaagatggtgccggggtaggaggagaagaccagcttgttgccgggaaccagcgggtagtcccctgtgcaggcagagcgagccagggatgctggtcagacaggcacaggtggaggcccctgcaccctacctaacaagacacaggcacaggggcacaggcaggcctycgaggaagcccccactgtgtcctttttgtcatttagcaaatgaggtcattgggcatataaaagtgcatatacgtgcaagtaaaaataaaagctagcagcaaaacttatatagttggscctycatgtccgtgggttccacatccttggattcaatsgamtggggaccaaaaatactaggaaaaaaacatgattaaaaagaaacaacacagctgggtgcagtggytsacacctgtaatccctgcactttgggaggccaaggcaggcggatcacgaggtcaggagaccaagaccatcctggctaacacggtgaaacccgtctctactaaaaatacaaaaaaaaaaaaaaagggcggccgc

SEQ ID NO: 84 - DNA, 1748 bp, Homo sapiens
agacgttccctcgcggccctggcacctccaaccccagatatgctgctgctgctgctgctgcccctgctctgggggagggagagggtggaaggacagaagagtaaccggaaggattactcgctgacgatgcagagttccgtgaccgtgcaagagggcatgtgtgtccatgtgcgctgctccttctcctacccagtggacagccagactgactctgacccagttcatggctactggttccgggcagggaatgatataagctggaaggctccagtggccacaaacaacccagcttgggcagtgcaggaggaaactcgggaccgattccacctccttggggacccacagaccaaaaattgcaccctgagcatcagagatgccagaatgagtgatgcggggagatacttctttcgtatggagaaaggaaatataaaatggaattataaatatgaccagctctctgtgaacgtgacagccttgacccacaggcccaacatccttatccccggtaccctggagtctggctgcttccagaatctgacctgctctgtgccctgggcctgtgagcaggggacgccccctatgatctcctggatggggacctctgtgtcccccctgcacccctccaccacccgctcctcagtgctcaccctcatcccacagccccagcaccacggcaccagcctcacctgtcaggtgaccttgcctggggccggcgtgaccacgaacaggaccatccaactcaatgtgtcctaccctcctcagaacttgactgtgactgtcttccaaggagaaggcacagcatccacagctctggggaacagctcatctctttcagtcctagagggccagtctctgcgcttggtctgtgctgttgacagcaatccccctgccaggctgagctggacctggaggagtctgaccctgtacccctcacagccctcaaaccctctggtactggagctgcaagtgcacctgggggatgaaggggaattcacctgtcgagctcagaactctctgggttcccagcacgtttccctgaacctctccctgcaacaggagtacacaggcaaaatgaggcctgtatcaggagtgttgctgggggcggtcgggggagctggagccacagccctggtcttcctctccttctgtgtcatcttcattgtagtgaggtcctgcaggaagaaatcggcaaggccagcagcggacgtgggagacataggcatgaaggatgcaaacaccatcaggggctcagcctctcagggtaacctgactgagtcctgggcagatgataacccccgacaccatggcctggctgcccactcctcaggggaggaaagagagatccagtatgcacccctcagctttcataagggggagcctcaggacctatcaggtcaagaagccaccaacaatgagtactcagagatcaagatccccaagtaagaaaatgcagaggctcgggcttgtttgagggttcacgacccctccagcaaaggagtctgaggctgattccagtagaattagcagccctcaatgctgtgcaacaagacatcagaacttattcctcttgtctaactgaaaatgcatgcctgatgaccaaactctccctttccccatccaatcggtccacactccccgccctggcctctggtacccaccattctcctctgtacttctctaaggatgactactttagattccgaatatagtgagattgtaacgtgaaaaaaaaaaaaaaaaaaaaaaaa

SEQ ID NO: 85 - DNA, 2679 bp, Homo sapiens
ccacgcgtccgcctcagcggccgggcccacggccccgagcagccatgctgggcgcgcgggcctggttgggccgcgtccttctgctgccccgcgccggtgcaggcctcgccgcaagccgcaggtgtcctggagtctggcccaggacctggccccacaggagtcccagcaggggtagctcctcccgggacaaggaccgaagtgcgacggtcagtagttcagtgcccatgcctgctggagggaaaggaagccatccttcatctacaccccagagggtccccaaccgcctgatccacgagaagtcaccatacctcctacaacatgcctacaatcctgtggactggtacccctggggacaggaagccttcgacaaggccaggaaggaaaacaagccgattttcctctcagtcgggtactccacctgccactggtgccacatgatggaagaggagtccttccagaatgaggagattggccgcctgctcagtgaggactttgtgagtgtgaaggtagaccgtgaggagcggcctgacgtggacaaggtgtacatgacgttcgtgcaggccaccagcagcggcgggggctggcccatgaatgtgtggctgactcccaacctccagccctttgtcgggggcacctatttccctcctgaggatggcttgacccgagtcggcttccgcacagtgttgctgagaatacgagaacagtggaaacagaacaagaacaccctgctagaaaatagccagcgtgtcaccactgccctgctggcccgatcagagatcagcgtgggtgaccgccagctgccgccctctgccgccaccgtgaacaatcgctgcttccagcagctggatgagggctatgatgaggaatacggtggcttcgctgaggcccccaagtttcccacgccggtgatcctgagcttcctgttctcctactggctcagccatcgactgactcaggatggctctcgggcccagcagatggccttgcataccctgaaaatgatggctaacgggggcatccgggaccatgtggggcagggctttcaccgctactccacagaccgccagtggcacgtccctcactttgagaagatgctctatgaccaggcacagctcgctgtggcctattcgcaggccttccagctctctggtgatgaattctactctgacgtggccaaaggcatcctgcagtacgtggctcggagcctgagccaccggtccggaggcttctatagcgcagaagatgcagactcgcccccagagcggggccagcggcccaaagagggcgcctactatgtgtggacggtcaaagaggttcagcagctcctcccggagcctgtgttgggtgccaccgagccgctgacctcaggccagctcctcatgaagcactacggcctcacagaggctggtaacatcagccccagtcaggaccccaagggggagctgcagggccagaatgtgctgaccgtccggtactcgctggagctgactgctgcccgctttggcttggatgtggaggccgtgcggaccttgctcaattcagggctggagaagctcttccaggcccggaagcatcggcccaagccgcacctggacagcaagatgctggctgcctggaatggcttgatggtgtcaggctatgctgtgactggggctgtcctgggccaagacaggctgatcaactatgccaccaatggtgccaagttcctgaagcggcacatgtttgatgtggccagtggccgcctgatgcggacctgctacaccggccctggggggactgtggagcacagcaacccaccctgctggggcttcctggaggactacgccttcgtggtgcggggcctgctggacctgtatgaggcctcacaggagagtgcgtggctcgagtgggctctgcggctgcaggacacacaggacaggctcttttgggactcccagggtggcggctacttctgcagtgaggctgagctgggggctggcctgcccctgcgtctgaaggacgaccaggatggagcagagcccagcgccaattccgtgtcagcccacaacctgctccggctgcatggcttcacgggccacaaggactggatggacaagtgtgtgtgcctattgaccgccttttccgagcgcatgcgtcgtgtcccggtggcgttgcccgagatggtccgcgccctctcagcccagcagcagaccctcaagcagatcgtgatctgtggagaccgtcaggccaaggacaccaaggccctggtgcagtgcgtccactctgtctacattcctaacaaggtgctgattctggctgatggggacccctcgagcttcctgtcccgccagctgcctttcctgagtaccctccgacggttggaagaccaggccactgcatatgtgtgtgagaatcaagcctgctcagtgcccatcactgatccctgcgaattacgaaaactactacatccatgactgccccaacccccttggggtggggcagaaggtgaagcatcccaactgactagagactcaggccctgcagggccctatagaacctgtggccatccctgagcaccctgccaccaggtgacctcggccatactcactgccccccttgggcacccactcaccctagaataaacttaacagtgtcccgtggtaaaaaaaaaaaaaaaaaaaaaaaaaaaagggcggccgc

SEQ ID NO: 86 - DNA, 766 bp, Homo sapiens
  misc_feature (670)..(670): n equals a,t,g, or c
  misc_feature (713)..(713): n equals a,t,g, or c
  misc_feature (721)..(721): n equals a,t,g, or c
  misc_feature (728)..(728): n equals a,t,g, or c
  misc_feature (731)..(731): n equals a,t,g, or c
  misc_feature (756)..(756): n equals a,t,g, or c
ggcgagacgcgttcaccaccatatgcactgttgtcaactcccctggagatgcgcccaagccccacaggaagccttcctcctctgcctcctcttcctcatcctcgtcctcgttctccttggatgcagccggggcctccctggccacactccctggaggctccatcctgcagccgcggccctccttgcccctctcctccacgatgcacttggggcctgtggtttccaaggccctgagtacctcttgccttgtttgctgcctctgccaaaacccggccaacttcaaggaccttggggacctctgtgggccctactaccctgaacactgcctccccaaaaagaagccaaaactcaaggagaaggtgcggccagaaggcacctgtgaggaggcctcgctgccgcttgagagaacactcaaaggtcccgagtgtgcagctgccgccactgccgggaagccccccaggcctgacggcccagctgacccggccaagcagggcccactgcgcaccagtgcccggggcctgtcccggaggctgcagagctgctactgctgtgatggccgggaggatgggggcgaggaggcagccccagccgacaagggtcgcaaacatgagtgcagcaaggaggctccggcagagcccggcggggaggcccaggaagcactgggtgmatnaagcctgttmccgtgttggaccgggggggttttaactggtggncggggaantcttttnggnttgcaagaggccaattaaagttggnccttggaaaa

SEQ ID NO: 87 - DNA, 2803 bp, Homo sapiens
cccacgcgtccgcgacccacgcgtccggggggaggtaactgcagtaagtcccgcttggccctggagtccacgcggattttcgaagctggggctggcaagaggccgctggacaccacgctccagtcgtcagcccacttcctagctgaacagcgcgaggcggcggcagcgagccgggtcccaccatggccgcgaattattccagtaccagtacccggagagaacatgtcaaagttaaaaccagctcccagccaggcttcctggaacggctgagcgagacctcgggtgggatgtttgtggggctcatggccttcctgctctccttctacctaattttcaccaatgagggccgcgcattgaagacggcaacctcattggctgaggggctctcgcttgtggtgtctcccgacagcatccacagtgtggctccggagaatgaaggaaggctggtgcacatcattggcgccttacggacatccaagcttttgtctgatccaaactatggggtccatcttccggctgtgaaactgcggaggcacgtggagatgtaccaatgggtagaaactgaggagtccagggagtacaccgaggatgggcaggtgaagaaggagacgaggtattcctacaacactgaatggaggtcagaaatcatcaacagcaaaaacttcgaccgagagattggccacaaaaaccccagtgccatggcagtggagtcattcatggcaacagccccctttgtccaaattggcaggtttttcctctcgtcaggcctcatcgacaaagtcgacaacttcaagtccctgagcctatccaagctggaggaccctcatgtggacatcattcgccgtggagactttttctaccacagcgaaaatcccaagtatccagaggtgggagacttgcgtgtctccttttcctatgctggactgagcggcgatgaccctgacctgggcccagctcacgtggtcactgtgattgcccggcagcggggtgaccagctagtcccattctccaccaagtctggggataccttactgctcctgcaccacggggacttctcagcagaggaggtgtttcatagagaactaaggagcaactccatgaagacctggggcctgcgggcagctggctggatggccatgttcatgggcctcaaccttatgacacggatcctctacaccttggtggactggtttcctgttttccgagacctggtcaacattggcctgaaagcctttgccttctgtgtggccacctcgctgaccctgctgaccgtggcggctggctggctcttctaccgacccctgtgggccctcctcattgccggcctggcccttgtgcccatccttgttgctcggacacgggtgccagccaaaaagttggagtgaaaagaccctggcacccgcccgacacctgcgtgagccctaggatccaggtcctctctcacctctgacccagctccatgccagagcaggagccccggtcaattttggactctgcactccctctcctcttcaggggccagacttggcagcatgtgcaccaggttggtgttcaccagctcatgtcttccccacatctcttcttgccagtaagcagctttggtgggcagcagcagctcatgaatggcaagctgacagcttctcctgctgtttccttcctctcttggactgagtgggtacggccagccactcagcccattggcagctgacaacgcagacacgctctacggaggcctgctgataaagggctcagccttgccgtgtgctgcttctcatcactgcacacaagtgccatgctttgccaccaccaccaagcacatctgtgatcctgaagggcggccgttagtcattactgctgagtcctgggtcaccagcagacacactgggcatggacccctcaaagcaggcacacccaaaacacaagtctgtggctagaacctgatgtggtgtttaaaagagaagaaacactgaagatgtcctgaggagaaaagctggacatatactgggcttcacacttatcttatggcttggcagaatctttgtagtgtgtgggatctctgaaggccctatttaagtttttcttcgttactttgctgcttcatgtgtactttcctaccccaagaggaagttttctgaaataagatttaaaaacaaaacaaaaaaaacacttaatatttcagactgttacaggaaacaccctttagtctgtcagttgaattcagagcactgaaaggtgttaaattggggtatgtggtttgattgataaaaagttacctctcagtattttgtgtcactgagaagctttacaatggatgcttttgaaacaagtatcagcaaaaggatttgttttcactctgggaggagagggtggagaaagcacttgctttcatcctctggcatcggaaactcccctatgcacttgaagatggtttaaaagattaaagaaacgattaagagaaaaggttggaagctttatactaaatgggctccttcatggtgacgccccgtcaaccacaatcaagaactgaggcctgaggctggttgtacaatgcccacgcctgcctggctgctttcacctgggagtgctttcgatgtgggcacctgggcttcctagggctgcttatgagtggttctttcacgtgttgtgtccatagctttagtcttcctaaataagatccacccacacctaagtcacagaatttctaagttccccaactactctcacacccttttaaagataaagtatgttgtaaccaaaaaaaaaaaaaaaaaaaaaaaaaaaaaaaaaaaaaaaaaaaaaaaaa

SEQ ID NO: 88 - DNA, 2181 bp, Homo sapiens
  misc_feature (5)..(5): n equals a,t,g, or c
gtacnggattcccgggtcgacccacgcrtccggcaggcagaggggcagtgggcgcggggaagatgattctgggcctcccccatctactgtcattaaccaaaatgaaacatttgccaacataatttttaaacctactgtagtacaacaagccaggattgcccagaatggaattttgggagactttatcattagatatgacgtcaatagagaacagagcattggggacatccaggttctaaatggctattttgtgcactactttgctcctaaagaccttcctcctttacccaagaatgtggtattcgtgcttgacagcagtgcttctatggtgggaaccaaactccggcagaccaaggatgccctcttcacaattctccatgacctccgaccccaggaccgtttcagtatcattggattttccaaccggatcaaagtatggaaggaccacttgatatcagtcactccagacagcatcagggatgggaaagtgtacattcaccatatgtcacccactggaggcacagacatcaacggggtcctgcagagggccatcaggctcctcaacaagtacgtggcccacagtggcattggagaccggagcgtgtccctcatcgtcttcctgacggatgggaagcccacggtcggggagacgcacaccctcaagatcctcaacaacacccgagaggccgcccgaggccaagtctgcatcttcaccattggcatcggcaacgacgtggacttcaggctgctggagaaactgtcgctggagaactgcggcctcacacggcgcgtgcacgaggaggaggacgcaggctcgcagctcatcgggttctacgatgaaatcaggaccccgctcctctctgacatccgcatcgattatccccccagctcagtggtgcaggccaccaagaccctgttccccaactacttcaacggctcggagatcatcattgcggggaagctggtggacaggaagctggatcacctgcacgtggaggtcaccgccagcaacagtaagaaattcatcatcctgaagacagatgtgcctgtgcggcctcagaaggcagggaaagatgtcacaggaagccccaggcctggaggcgatggagagggggacmccaaccacatcgagcgtctctggagctacctcaccacaaaggagctgctgagctcctggctgcaaagtgacgatgaaccggagaaggagcggctgcggcagcgggcccaggccctggctgtgagctaccgcttcctcactcccttcacctccatgaagctgagggggccggtcccacgcatggacggcctggaggaggcccacggcatgtcggctgccatgggacccgaaccggtggtgcagagcgtgcgaggagctggcacgcagccaggacctttgctcaagaagccataccagccaagaattaaaatctctaaaacatcagtggatggtgatccccactttgttgtggatttccccctgagcagactcaccgtgtgcttcaacattgatgggcagcccggggacatcctcaggctggtctctgatcacagggactctggtgtcacagtgaacggagagttaattggggcacccgcccctccaaatggccacaagaaacagcgcacttacttgcgcactatcaccatcctcatcaacaagccagagagatcttatctcgagatcacaccgagcagagtcatcttggatggtggggacagactggtgctcccctgcaaccagagtgtggtggtggggagctggggkctggaggtgtccgtgtctgccaacgccaatgtcaccgtcaccatccagggctccatagcctttgtcatcctcatccacctctacaaaaagccggcgcccttccagcgacaccacctgggtttctacattgccaacagcgagggcctttccagcaactgccacggactgctgggtcagttcctgaatcaggatgccagactcacagaagaccctgcagggcccagccagaacctcactcaccctctgctccttcaggtgggagaggggcctgaggccgtcctaacagtgaaaggccaccaagtcccagtggtctggaagcaaaggaagatttacaacggggaagagcagwtagaytgytggtttgccaggaacatgccgccaaactgattgacggggagtacaggattacctggcat

SEQ ID NO: 89 - DNA, 2207 bp, Homo sapiens
ccacgcgtccggaaaaagggaaaagatgccgtgtaaaatctcgttctgtgtctgaattgccgtagggctcagatcttcatttgaggttctgtgtctgaattgccgtagggctcagatcttcatttgaggttatgttctataagttaacgttgatcttgtgtgagctttcggtagctggagtaacacaggcggcctcacagcgacctctccagcgccttccaaggcacatctgcagccagcgtagctcctcctgggagatgcctcctcaaggccctgctccagaccacgtggggagggcctgacagccaattcccaggctgtccccacccttggagagtgaccctaaacgctagacagatggggaatgggaaagaaaagaaagctgcagacctcaagttaaaattccctcaaaaacgtttttatttatctgctttttctgaaaggataaaggctttttgaaaattattttctaacaaataacatgaacacttctagaaaccctagaaaaacacaaagtattcaaaatagaaagaaaaattacccattactctttaagccagcattatccattgcggtgcttttggagttgggtgaggccgtagcctctgccaagtcaaggagcccggtggtggctgtggcattcctgcagggttgtttttttttctttgagatggagtctcactcttgtcaccccagctggaatgtggtggtgtaaacagctcactgcagccttgaccctgaggctcaagcgatccttctgccttggcctcctgagtagctgggatcccaggcgagagtcaccacaccctgtccatgttcctgcaggtcttgatatgcgaggacgctgtgtcttccctgccacattttcttcttctttcttgagacagacccttgctccatcacccaggccagagtgtggtggtgcgaacacggctcactgcagcctcgaccctcaggctcaagcgatcctcacgcctcggacccccaaagtgctgggatcacaggcgagagtcaccatgctggcctgaatcttcagggtattttacggttgaagtgtcacttacttaaccatccctgtttcaagagtgtaggtggtcaccctgtctctgccgctgacctggcctggaccctcggctgtgagagggaggggtgggctgggctggaggaacctgaagccctcgtgatgtcacaagcccatctggctgggcatcccctgctgtgtcctgagctgcacatgccccaggtggcccccacagcagaggcgagccactggagggtggagggcttccacgggacggtcttcagggggagaaggaagggcccaggcccccaggagactcaggagaccagagcctggggtcaggggctcagccaggggctcagccagggctggatgtccggagccagccccgcagccctgtgttctttgttcttcgcactcccaccgtccgtgtgaacagctccagccccacctgcgcctccctgtgctgggctccatcagggagcccagaagacgtgtgtgcttctgaaattgggtccctacatgcctttgtcccagtgcaccttgctccttccatttactatcgagatttaaatgcctgttttctccccagaggttgacggatatattcagacgttacgacacggatcaggacggctggattcaggtgtcgtacgaacagtacctgtccatggtcttcagtatcgtatgaccctggcctctcgtgaagagcagcacaacatggaaagagccaaaatgtcacagttcctatctgtgagggaatggagcacaggtgcagttagatgctgttcttcctttagattttgtcacgtggggacccagctgtacatatgtggataagctgattaatggttttgcaactgtaatagtagctgtatcgttctaatgcagacattggatttggtgactgtctcattgtgccatgaggtaaatgtaatgtttcaggcattctgcttgcaaaaaaatctatcatgtgcttttctagatgtctctggttctatagtgcaaatgcttttttagccaataggaattttaaaataacatggaacttacacaaaaggcttttcatgtgccttacttttttaaaaaggagtttattgtattcattggaatatgtgacgtaagcaataaagggaatgttagacgtgtaaaaaaaaaaaaaaagggcggccgctctagaggatcc

SEQ ID NO: 90 - DNA, 3533 bp, Homo sapiens
  misc_feature (44)..(44): n equals a,t,g, or c
ttttatttacttcaaattaactgtactttactcaaatagaaaangaataattttcacattatgaagctacacaattccaaaatacacatgctgaggctctttttaagtccgaattgtctagtaattacaaaaaagtgaagagtttacagatatacaaggaaataaaggcgaattattgcaaagaaaacaagtttaatttcactttgaatgacaacgatttttctggaaagcagatacttcactcctttaagtttccacccaagccacaataatttcaaacggtcttgcggatgacccagctggtcactcttgtttatgtggggactggaggtaatgagagccaaaaaaagtgctataaacctaatttggctagagcaagttcacacgacacgaccgtgctttaaaaacttgctctccattatgtacttccttccatcaggttggggaaaaaaaaatggtggggatggtgagtaaacacaccagtggtttcatcagaggggaactcactactcaggaggtgacggtgacgtggtgccggtccctgaagtacgcgcacaagctccggaggttgcgggagcttccgctgccgcctggagggaagccggagcgacgggggtcacggcggcggtcagagggtaaaggtcttgctcccagcagcctccgcggtggatacgtcgccatcttggatccgcgggacaagaaaattcatgcgagggagacgtggtgggcggtccttcctgtgacacgacccttgagtgacagttctatttgattgcctccggtactgtgaggaaaggacacgactctatggtgaggactgatggacatacattatctgagaaaagaaactaccaggtgacaaacagcatgtttggtgcttcaagaaagaagtttgtagagggggtcgacagtgactaccatgacgaaaacatgtactacagccagtcttctatgtttccacatcggtcagaaaaagatatgctggcatcaccatctacatcaggtcagctgtctcagtttggggcaagtttatacgggcaacaaagtgcactaggccttccaatgagggggatgagcaacaatacccctcagttaaatcgcagcttatcacaaggcactcagttaccgagccacgtcacgccaacaacaggggtaccaacaatgtcacttcacacgcctccatctccaagcaggggtattttgcctatgaatcctargaatatgatgaaccactcccaggttggtcagggcattggaattcctagcaggacaaatagcatgagcagttcagggttaggtagccccaacagaagctcgccaagcataatatgtatgccaaagcagcagccttctcgacagccttttactgtgaacagtatgtctggatttggaatgaacaggaatcaggcatttggaatgaataactccttatcaagtaacatttttaatggaacagacggaagtgaaaatgtgacaggattggacctttcagatttcccagcattagcagaccgaaacaggagggaaggaagtggtaacccaactccattaataaaccccttggctggaagagctccttatgttggaatggtaacaaaaccagcaaatgaacaatcccaggacttctcaatacacaatgaagattttccagcattaccaggctccagctataaagatccaacatcaagtaatgatgacagtaaatctaatttgaatacatctggcaagacaacttcaagtacagatggacccaaattccctggagataaaagttcaacaacacaaaataataaccagcagaaaaaagggatccaggtgttacctgatggtcgggttactaacattcctcaagggatggtgacggaccaatttggaatgattggcctgttaacatttatcagggcagcagagacagacccaggaatggtacatcttgcattaggaagtgacttaacaacattaggcctcaatctgaactctcctgaaaatctctaccccaaatttgcgtcaccctgggcatcttcaccttgtcgacctcaagacatagacttccatgttccatctgagtacttaacgaacattcacattagggataagctggctgcaataaaacttggccgatatggtgaagaccttctcttctatctctattacatgaatggaggagacgtattacaacttttagctgcagtggagctttttaaccgtgattggagataccacaaagaagaacgagtatggattaccagggcaccaggcatggagccaacaatgaaaaccaatacctatgagaggggaacatattacttctttgactgtcttaactggaggaaagtagctaaggagttccatctggaatatgacaaattagaagaacggcctcacctgccatccaccttcaactacaaccctgctcagcaagccttctaaaaaaaaaaaaaaaaaaaaaaaaaaagacttcccttttcttggggtatggctgtctcagcacaatactcaacataactgcagaactgatgtggctcaggcaccctggttttaattccttgaggatctggcaattggcttacgcaaaaggtcaccatttgaggtcctgccttactaattatgtgctgcccaacaactaaatttgtaatttgtttttctctagtttgagcagggtctgaattttttcatttatttccttttttgccagcagacagacttgagtctgtaaagacaagcaaatacactgacagaagtttaccatagtttctaaaatgtaaaaaagaaaacccccaaaagactcaagaaaattagaccacaaattttgcattgttcattgtagcactattggtaataaaataacaaatgtttgtgcatttttatgtgaagatccttctcgtatttcatttggaaagatgagcaagaggtctgcttccttcattttacttccccttctgtttttgaaaggcagtttcgccaagcttaatgcaagaatatctgactgtttagaagaaagatattgccacaatctctggatggttttccagggttgtgttattactgagcttcatctttccagaatgagcaaaacactgtccagtctttgttacgattttgtaataaatgtgtacattttttttaaatttttggacatcacatgaataaaggtatgtatgtacgaatgtgtatatattatatatatgacatctattttggaaaatgtttgccctgctgtacctcatttttaggaggtgtgcatggatgcaatatatgaaaatgggacattctggaactgctggtcaggggactttgtcgccctgtgcactaaaagggccagattttcagcagccaaggacatccatacccaagtgaatgtgatgggacttaaaagaagtgaactgagacaattcactctggctgtttgaacagcagcgtttcataggaagagaaaaaaagatcaatcttgtattttctgaccacataaaggcttcttctctttgtaataaagtagaaaagctctcctcaaaaaaaaaaaaaaaaaactcgag

SEQ ID NO: 91 - DNA, 1434 bp, Homo sapiens
cattaaactctttttatcgggaatagtatgatattttcaatgtcactccattcatgttgatttggagctgacagttattttgtgtaagcagagatttaattttatattgaaagtcagtgcaaaattatgaataggatatactaataaatacaaagtaataacaaaagtcaaagcagtgttctaaataaaaattctgggttccttaaaaattattttaaatttatcttgaaatagttttcttagattaatctcaggatatgagaaagtcaattaagtgtgagtaaagttagtatcattaaacaaattgtctattaaatgcamgagtggtaatatacagaatttatcaggcattaccaagtctaggcacatataggaaatgcagcactcagaatggtttcaatgtagtagttgatgcttgtaaggtaggggagcttattcagacatagtagatagtttctctaatgctgtstcaattgctggcctttggctacctgtacttccscattatggcagcccattcagtcttgagttttcttctctggacaccttatgctctgaaatcatgagcgaggctgattcaattggtgatttgggtagaaagcagtatgttttgctgacattaagatgtaggttatagataggtttagcctttaagtgtatgtttttatactttaaaataagaaatataaccttttaagctattccacctcctcccccagcctatctcaaactggtggaatatatggagagatcttgaaagaagtaaaataaaccttcactgctccactccaggtgaatccgcccactcccactgacctagtagaatttgtaatttaatacttaccttctatttctgaaatcagttgtgaactgttgccttatgttcagargtttaagaacctcmgtgaattcattttttaaaatctgctattctgagaagcattgaatgaattcttaacaagaagactcatctgtagctgtttgctgactcctatgagccccataagggttctgtgcttagcattaacaaaataaggtttataggtaaagccaatgtattaatttttttttgcatggagggctttaaaatttgtgctctttttcatattttattcatattcaatttatggtttgtaactgctttttagggagataattatatgttataaattagttttggggggaataattgtgcaaagaggataatttaatttacgtgcttctgttattcagaataaagagagaagactacgctgcatattcaagagttgtaccttaacattggtgaaacattttttctaagattttcaaaaggaatatgtgtaaattgagaaatcataaccactgtcctaacttggtaaacaaactgttcttaaataaagtatttaatgattttaaaaaaaaaaaaaaaaaaaaaaaaaaaaaaaaaaaaaa

SEQ ID NO: 92 - DNA, 867 bp, Homo sapiens
ggcacgagcaggtactgggtgactgcctggctgaggaaaagttaactagacacttggggaaaggagatccaagggagtaagaggcaaaatgcctttgcatgcttttcttcctatctctttttctttctctccttctcactctctcccttccttcctttcttcctttctctttcttttttttttctcttttcccccacctctctgcctgcctccttccttccctcccctcccctcccttccccctccctccctccctcccttccttccttccttccttccttccttccttccttccctccctcctctctccctccttccctgccttctttccttcgttctgccaacttgccagaaggagcccaagaaaaagcacccagatgcttcagtcaacttcttagaattcttcttttttttatgttcagaaaagatggaaattcatttctgctaaagagaaagaaaaaattggaagacagggtgaaggtgaacaggcccattataagaaagaaacaaaaatctatattctgtctacaaggaagcgagagagagaaagagagagaagaaagaagttccaggattctaatgtaccaaagggatctcctttttcttgttttgttctgaaaatttcaccaaaagagcacaggagaacatcttggctaattcattggcgatgatgtaagaaaactgagagaaatgaaagaaatgaagaattactgctgcagataatatacagccttgaggaaagaaaggcttttaagattatagatataaaggctattgctgtattctgggataaaagaaagtctgatgtcagggaaaggggaagttggaaaaactggaaaaagaaaaaagaaaaaaaaaaaaaaaaaa

SEQ ID NO: 93 - DNA, 1558 bp, Homo sapiens
ggttttggagtatatatattgtatgccatgaactatatttttctgcttatggctttgcctcatttaattgccatagcacttacatggggcaggtattcattttcctgcttagcaaataaggaaactgaatttcagagatgtcaggtaacctgcctacttcacacactaggagttttgatgtttaattttgaactaagatctatctggcttgaaagctctttgcattaaacaaccttgaacaatatacttggaacgtaggtgtgtttttggcacagaacatggcatgtgtgtgagggattgaacacagacttgcccagattcaaacttaccaatcttctgtttcatgtgcccagaagaaacagcctgtttctcagcctcaaacccaaacttctagttgtcttgattggttcagcctgactgtccaactctgatttatagctgtgattgggggagctgagattacacagtgtaggcaggcagaagggccccaggcctattgatatgggtgaggacaatactcacgcactcccttcacttactcactcttccaaggtcttggcttgaacccaattttttttgagagaataaaccaggctttttgttctccacttggcctgactccatttctggcattccagccatgtatttagctgttatcagctttcagatttagascaaagccttgtttccaataagcttgtttctctgaagtaattgttaaaatataattttcagaaaaaggttaaatcatgactcatacaaatataaaaatgaacatgtgctaaagatttttatttcactcatgtgatatgaagtaaccagacagaagttataaccagtacatatggaaagtcaaaaagcacaaattcatatgtagtaaaggaattggattgcaaatgaaggcaaaactgtttttyctacagggtggagggaagataatcaaaatgctagaaccagaatttscatgcctgtcacttagcttcaatttacaaaagcccagaataactcaaaggcaaattctagccctgcaaatatcagccctaaagctgtgctgtggccagtgcatagttttctattgaagtacaattttttccccaaatacattatctctcagagggagtccaaattgcttccctttcactcagcagatctgttcagtcaacagatgttaaatagctacagcgtatcaggcacaaataattctttataaaataaagtaacaaactatatgttgtttcaaagttccagttaaggccagccgtggtagctcacccttataatcccaacactgggaggccgaggcaggcggatcacttgggctaggagttccataccagcatggccaacatggtgaaaccctgctctactagaatgcaaagattagccaggtgtggtggcgcatgccggtagtccaggctactcaggtggctgaggcacaggaatggcttgagcctgggaggcggaggttgcagtgagccgagattgcgwccgctgcactccagcctgggcaacactgtgagactcctgtctacaaaaaaaaaaaaaaaaaaaactcgta

SEQ ID NO: 94 - DNA, 2199 bp, Homo sapiens
ggcacgagcttttccatcttgagcttggcagcctgtctagttgtggaagctgtggtgtggaaatcggtgaccaagaatcggacttcttatatgcgccacacctgcatagtgaatatcgctgcctcccttctggtcgccaacacctggttcattgtggtcgctgccatccaggacaatcgctacatactctgcaagacagcctgtgtggctgccaccttcttcatccacttcttctacctcagcgtcttcttctggatgctgacactggggcctcatgctgttctatcgcctggttttcattctgcatgaaacaagcaggtccactcagaaagccattgccttctgtcttggctatggctgcccacttgccatctcggtcatcacgctgggagccacccagccccgggaagtctatacgaggaagaatgtctgttggctcaactgggaggacaccaaggccctgctggctttcgccatcccagcactgatcattgtggtggtgaacataaccatcactattgtggtcatcaccaagatcctgaggccttccattggagacaagccatgcaagcaggagaagagcagcctgtttcagatcagcaagagcattggggtcctcacaccactcttgggcctcacttggggttttggtctcaccactgtgttcccagggaccaaccttgtgttccatatcatatttgccatcctcaatgtcttccagggattattcattttactctttggatgcctctgggatctgaaggtacaggaagctttgctgaataagttttcattgtcgagatggtcttcacagcactcaaagtcaacatccctgggttcatccacacctgtgttttctatgagttctccaatatcaaggagatttaacaatttgtttggtaaaacaggaacgtataatgtttccaccccagaagcaaccagctcatccctggaaaactcatccagtgcttcttcgttgctcaactaagaacaggataatccaacctacgtgacctcccggggacagtggctgtgcttttaaaaagagatgcttgcaaagcaatggggaacgtgttctcggggcaggtttccgggagcagatgccaaaaagactttttcatagagaagaggctttcttttgtaaagacagaataaaaataattgttatgtttctgtttgttccctccccctcccccttgtgtgataccacatgtgtatagtatttaagtgaaactcaagccctcaaggcccaacttctctgtctatattgtaatatagaatttcgaagagacattttcactttttacacattgggcacaaagataagctttgattaaagtagtaagtaaaaggctacctaggaaatacttcagtgaattctaagaaggaaggaaggaagaaaggaaggaaagaagggagggaaacagggagaaagggaaaaagaagaaaaagagaaagatgaaaataggaacaaataaagacaaacaacattaagggccatattgtaagatttccatgttaatgatctaatataatcactcagtgcaacattgagaatttttttttaatggctcaaaaatggaaactgaaagcaagtcatggggaatgaatactttgggcagtatcttcctcatgtcttcttagctaagaggaggaaaaaaaggctgaaaaaatagggaggaaattccttcatcagaacgacttcaagtggataacaatatttataagaaatgaatggaaggaaatatgatcctcctgagactaactttgtatgttaaggtttgaactaagtgaatgtatctgcagaggaagtattacaaagatatgtcattagatcccaagtgctgattaaatttttatagtttatcagaaaagccttatattttagtttgttccacattttgaaagcaaaaaatatatatttgatatacccttcaattgccaaatttgatatgttgcactgaagacagaccctgtcatatatttaatggcttcaagcaggtacttctctgtgcattatagaatagattttaataatcttatagcattgtatattattattgctgttgtcactgttattattattgtggatactggcccttggtgtgttgcatagctccctatgtattctctgtttccatctttaagttcccagaccaatatacattaagagttttgaaaaaaaaaaaaaaaaaaaaa

SEQ ID NO: 95 - DNA, 1392 bp, Homo sapiens
attcggcagagcagaaaaccagactgcacttgctttataaaacagagctttatttttccttcataataagcagagttgcagtgttgctggtattgattcactggcgtggtggtatcaggacagatgtctctatgattaatttttggcctgtcactcatgtttgcatatggctgttgtggctccaagcattggaagcaagaggacagggaagcaacattgactgtaccaggaactccaaaacagtcttcacatcttaatggttggacaatgccaaatggtcactcttttctggaagttgactggggacaagatagtggtaaggattagatttggccagaaagtttctgccacagtgagctttcctgtctaaatccttattttaactgttgtcacttaatattcacactttggaaggacatctactgttggttacaattatgaaaccaacttgaatactttttagttgaacatttcagtagtcttaattatgtttaaataggtttcacaatttactgtttttagtttagtttccggctccccccaacccccaacttttgytagagagttactctcttaacttttgctagaaagtagcaaagttctctactctacatgttcagggctggctgtagaatttcgttttttaaggaaacaggaagacagaactaattatgcaagtcttcatttagctttttaaaaaaacagctttattgagttagaattgacatgcagtaaatggtacatatttaaagcgtacaatttgttaagttttgacataagtatacattgtgaaaacatcagtcaccacaatcaggatacttattttaaaaaacaactttatttaggattagtatactgataatgtgtccattgtaagtgtacattttcagttttgacaaatgtatagatttttgtaactaccaccaccagtcaagatgaaaacgtttctagcactccagaaagttcccttgtgtcccttcttggtcagttattcccaccatgctctcaggcaaccacagttctgcttctatcactatataagtgacagaatttttctacagaatttcacatagatggaatcatacaatatgtactgttctgtctggcttcttgaggtaagccaaatgtcttttaagagtcatgcatgtttttgcatttattagtagtttattctttttttgttggtgagtagcattcattgtatggatatattccagtctgttttattcattcactttttggacatttgggttgttatcaattttgggctcttttgaattaatccctccctccttccctccttcccyccctccctccttccctccctccctccctctctccctccctccttccttccctccctccctccctcccttttttttttcggcacga

SEQ ID NO: 96 - DNA, 717 bp, Homo sapiens
ggcacgagctagctgccgccacccgaacagcctgtcctggtgccccggctccctgccccgcgcccagtcatgaccctgcgcccctcactcctcccgctccatctgctgctgctgctgctgctcagtgcggcggtgtgccgggctgaggctgggctcgaaaccgaaagtcccgtccggaccctccaagtggagaccctggtggagcccccagaaccatgtgccgagcccgctgcttttggagacacgcttcacatacactacacgggaagcttggtagatggacgtattattgacacctccctgaccagagaccctctggttatagaacttggccaaaagcaggtgattccaggtctggagcagagtcttctcgacatgtgtgtgggagagaagcgaagggcaatcattccttctcacttggcctatggaaaacggggatttccaccatctgtcccagcggatgcagtggtgcagtatgacgtggagctgattgcactaatccgagccaactactggctaaagctggtgaagggcattttgcctctggtagggatggccatggtgccagccctcctgggcctcattgggtatcacctatacagaaaggccaatagacccaaagtctccaaaaagaagctcaaggaagagaaacgaaacaagagcaaaaagaaataataaataataaattttaaaaaacttaaaaaaaaaaaaaaaaaa

SEQ ID NO: 97 - DNA, 832 bp, Homo sapiens
  misc_feature (827)..(829): n equals a,t,g, or c
  misc_feature (831)..(831): n equals a,t,g, or c
gaattcggcacgagtatgaaactaacaacatagaatgccccccaaacaaattcctctaacctcactgagtttacttgccctattactattttttttttttaagatcttctgtctcttgtttttgttttatcccttacctgatgaaagtgaacatttctagtggagaaagaagatcacagttctctaatatgggcattaagagaggggtacagctagaggggaggtgaaaacctgcctccactggggtgaaaaacagtgtgctgaggtttcagccagtgattacactgggtaatcaaccagtcccatgtttcacaaaggagttgtaatgattaacagttcaggtatgcttytgaggaaatctaattgagacctttggaaaatagcattgttatgaatggtgtggtgttacgccctggaggggaaaaggctaggaaaaacattttaacttttcaagtgtatttaaattaacatccaaatgtttcagtgtgctttactggagactgcctgagtttggaattcaaatattgtaaccaaattactccaggtttctgaactaaaatgatctattgatgtttctcaaagtatagatcacagagtaagaaaagaggaaatcaagtctggtttatgacaaacttttttccatgttaacattggacccaaagatgttamtaagagctttttactactgtgagagraccagcgtgatgtgaagacaacgaacattttaagaagtttgactagtagacatttcgtttaagtcttttggagggtcttggttgacaacccacaattttattgtggctccccaggctgggagaacgtggaannncna

SEQ ID NO: 98 - DNA, 685 bp, Homo sapiens
  misc_feature (678)..(679): n equals a,t,g, or c
actacggctgcgagaagacgacagaaggggggcggcgacggaggaggaggatggaggcggtggtgttcgtcttctctctcctcgattgttgcgcgctcatcttcctctcggtctacttcataattacattgtctgatttagaatgtgattacattaatgctagatcatgttgctcaaaattaaacaagtgggtaattccagaattgattggccataccattgtcactgtattactgctcatgtcattgcactggttcatcttccttctcaacttacctgttgccacttggaatatatatcgatacattatggtgccgagtggtaacatgggagtgtttgatccaacagaaatacacaatcgagggcagctgaagtcacacatgaaagaagccatgatcaagcttggtttccacttgctctgcttcttcatgtatctttatagtatgatcttagctttgataaatgactgaagctggagaagccgtggttgaagtcagcctacactacagtgcacagttgaggagccagagacttcttaaatcatccttagaaccgtgaccatagcagtatatattttcctcttggaacaaaaaactatttttgctgtatttttaccatataaagtatttaaaaaacatgaaaaaaaaaaaaaaaaaaaaaaaaaaaaaaaaaaaaaannaaaaaa

SEQ ID NO: 99 - DNA, 921 bp, Homo sapiens
  misc_feature (4)..(4): n equals a,t,g, or c
  misc_feature (9)..(9): n equals a,t,g, or c
  misc_feature (11)..(11): n equals a,t,g, or c
  misc_feature (15)..(15): n equals a,t,g, or c
  misc_feature (20)..(20): n equals a,t,g, or c
  misc_feature (901)..(901): n equals a,t,g, or c
gcgnggggnanaggnaagcnccccactattgggttcaaaagctggagctccaccgcggtggcggccgctctagaactagtggatcccccgggctgcaggaattcggcacgaggtctgagcagataagattaagggctgggtctgtgctcaattaactcctgtgggcacgggggctgggaagagcaaagtcagcggtgcctacagtcagcaccatgctgggcctgccgtggaagggaggtctgtcctgggcgctgctgctgcttctcttaggctcccagatcctgctgatctatgcctggcatttccacgagcaaagggactgtgatgaacacaatgtcatggctcgttacctccctgccacagtggagtttgctgtccacacattcaaccaacagagcaaggactactatgcctacagactggggcacatcttgaattcctggaaggagcaggtggagtccaagactgtattctcaatggagctactgctggggagaactaggtgtgggaaatttgaagacgacattgacaactgccatttccaagaaagcacagagctgaacaatactttcacctgcttcttcaccatcagcaccaggccctggatgactcagttcagcctcctgaacaagacctgcttggagggattccactgagtgaaacccactcacaggcttgtccatgtgctgctcccacattccgtggacatcagcactactctyctgaggactcttcagtggctgagcagctttggacttgtttgttatcctattttgcatgtgtttgagatctcagatcagtgttttagaaaatccacacatcttgagcctaatcatgtagtgtagatcattaaacatcagcattttaagaaaaaaaaaaaaaaaaaarctcgagggggggnccggtacccagggcggaaga

SEQ ID NO: 100 - DNA, 442 bp, Homo sapiens
ggcacgagatagaacccactgcctcctgatgaagtccctactgttcacccttgcagtttttatgctcctggcccaattggtctcaggtaattggtatgtgaaaaagtgtctaaacgacgttggaatttgcaagaagaagtgcaaacctgaagagatgcatgtaaagaatggttgggcaatgtgcggcaaacaaagggactgctgtgttccagctgacagacgtgctaattatcctgttttctgtgtccagacaaagactacaagaatttcaacagtaacagcaacaacagcaacaacaactttgatgatgactactgcttcgatgtcttcgatggctcctacccccgtttctcccactggttgaacattccagcctctgtctcctgctctaggatccccgactcattaaagcaaagaggcttaaaaaaaaaaaaaaaaaaaa

SEQ ID NO: 101 - DNA, 1886 bp, Homo sapiens
ggcacgagcggcacgagggaaaatagagagcaacttaattatgttaaggttgactcaaactttttttttcatttcacagacacttctagattggttcttagcagcagctcttgctcttcctaatttgtgttccccattagcatctaatttcaagagcaggcaaatctcatctgttcccatccagcccagccagggaacctccagagttgctttgcagatatggtgtggatcctgcagaatgaggatgagctcttccacgatccacattcttgccctttaaaaaataaagcgggtaggcagcggggtggcggtgtggggtgtgtggggcaagagctagagcgttcctcctcagtgagtttgatgaagggagaatgtaaaacttggctgaacttagccctccaggaaagggtagccagaatgttgtattaatttagtgatgtcttcaaaagggtgtggtggaggaggagtctcattcagaatgagaagctgatcccagctcccaggaaatcgacacagttgctggtgtgtagtggtcagcactagccgagtccctatttgtagcttcatgctgttttttatactgttgtgatgtaatgtacatctgtgttcacccaagctgcctatgcaatgacttctataaagctcagtttttaaacacagtctcttacagataaaacaacagaaccagtgccagaaagcagccttcccttacatgggcacttctgccaagcatatgagttcattgccttgaagatcaaagtcaaagagaaatggagagggtgttgaaatgatcagcgaaaattaaatgaaaatatattcttattggaagctgatgctctattatcaataaaggacccatagcaaagatacatagaggagtgatttttcaagcagtcaagagcagaactacgaaggttttgagatggtgtagctgccaaagaagtcacccctggctgtcccccatctcagtgagcctgagttgaatgtttcccaatgtcatatcccacagggggatacttagtgcccacagcatgtgatcggtagctgataaggaagcattggaccagaatgtcatggaagaaacaaaagcccacttatcttccgcggcaatatgtttatgaacatgtgaatcattgttcatataactgtctcaaatacttggctgaaaagtagactgtttggtgttaagtttcgacttattttcgagggaggatgggatatggttatacaccatatgaaggattttgtgaataaagagtttcaaaatattttgggaatagtagttcggcatttattttttttcccagtcacatttcatgagcaacaattttatgtttaaggtagtatctgactaacctactgatgctgtctattcattccattagcatacttatgccatgggtaaaagcaatccatctagaactctttcaaccattttttagtttgtctttgcacactctagatagcatttctgaaatcatctgcaggaacagagttcctgaaaagagcaatggtctagagcaggctttctcagacttcagtgtgcaccagagtcacccaggatcttgttaaaatgctgattctgaggccaggcgcggtggctcacgcctgtaatcccagcactttaggaggctgaggcgggcggatcacggggtcaggagagcgagaccatcctggctaacagcatgagaccctgtctctactaaaaatacgaaaaattagccaggcatggtggcaggcacctgtagtcccagctactcaggaggctgaggcaggagaatggtgtgaacctgggaggtggagcttgcagtgagccgagatcgcgccactgcactccagcctgggggacagagcgagactccacctccaaaaaaaaaaaaaaaaaa

SEQ ID NO: 102 - DNA, 1336 bp, Homo sapiens
ccacgcgtccggagttccacaaaatttgttagtcatcaaataatagagtttttcttaagtgaccacttacatactcatctacaataaaccccaactaactaatttttcactttgtgtacctcatgctaatatccgtggacagtaatgtgcctgttgtgttccttttgcttttcatccttgtgatcttatgtcacatggaatgtaaaggccacatatatatatgtgtgtgtgtgtgtgtgtatatgtatatttttaagaatatttagtctggatttcatgaaattgacttctgaaataatttgcctcaattttgtttcctggtggtttgagaagaaagttcctgtggtgaaatgaaaaggggataaagggaagtacttattttaaaacataagtaacttgtggattgttgaatactggaaaaagagtgttacttccccgttaacctacgcctcgtgtaatccttcaggttggaagtcggatcgcagaccgtgtatatgacatacccagaaatttcccccttgctttggatcttggttgtggaagaggttacattgcacaatatttgaataagcttcagttattccattgcaggaaactattggaaagtttttccaagctgacattgcagaaaatgctttgtttgcattgggtgaatgaccttcctagagcacttgagcagattcattatattttaaaaccagatggagtgtttatcggtgcaatgtttggaggcgacacactctatgaacttcggtgttccttacagttagcggaaacggaaagggaaggaggattttctccacacatttctcctttcactgctgtcaatgacctgggacatctgcttgggagagctggctttaatactctgactgtggacactgatgaaattcaagttaactatcctggaatgtttgaattgatggaagatttacaagaacaaaagtccagaatgttgacctaattttacaaaacaagctgcatatcagctgatgaatgcatgagaaattttcaaggctttcacagtggtcttaaggtatgggtgagagtaactgtgcttggaatagaaaagccctgctgcatcgagacacaatgctggcagctgcggcagtgtacagagaaatgtacagaaatgaagatggttcagtacctgctacataccagatctattacatgataggatggaaatatcatgagtcacaggcaagaccagctgaaagaggttccgcaactgtgtcatttggagagctaggaaaaataaacaaccttatgccaccggggaaaaaatcacaataaatatttattcagtgttaaaaaaaaaaaaaaaaaaaaaaaa

SEQ ID NO: 103 - DNA, 1129 bp, Homo sapiens
gctgcttcccaaggaccatgaaactcctgctgctggctcttcctatgcttgtgctcctaccccaagtgatcccagcctatagtggtgaaaaaaaatgctggaacagatcagggcactgcaggaaacaatgcaaagatggagaagcagtgaaagatacatgcaaaaatcttcgagcttgctgcattccatccaatgaagaccacaggcgagttcctgcgacatctcccacacccttgagtgactcaacaccaggaattattgatgatattttaacagtaaggttcacgacagactactttgaagtaagcagcaagaaagatatggttgaagagtctgaggcgggaaggggaactgagacctctcttccaaatgttcaccatagctcatgacttcctctcggctatcactcacccctgtcctcagagtgataaactaagtcacatacagataaagcactgaaaacaccacagtgaccctcccaccccccaccaatatgtaattctattaatagaaacagctgtgtaaagaagtctaaaattttcactatttccaatgataaactcttcagtgctcttcttgaaatgtcacattatttcccaacaagttatacctatttttagtattcttgttgctagtgccatgcacaacttcaatagctagttgctattccaacaacaatttcttcatgtatcgttctgtcttctcaacagctgtctttcatggcagcataagtggtcatgatcaaaattctaaatcttgcatctgtgagagtagctactatgacactaaaagctttttttctagaacaggagacacttcaggtgaagcattcattctcctactaactatggccttggagccaggttttatctctcactgtaggaaattggccgccccaggtgtgagctatgaagactcctttttgccccagtggctttggggttgaaatgctgtcgaaaagcttttatggctctgtagacccatctttttgaccaagccttgatcacacatggacatccaagggtaatcatggacccccaattgtgggtgaaaggatggatcatttatctacctgattactgagagctttatttgtctccctctgatagcaaaaaaaaaaaaaaaaaaa

SEQ ID NO: 104 - DNA, 799 bp, Homo sapiens
ggagacggtgggtgaccagagagtcctgtctatcctaggaggagaacattcagcccaaatcccagccccatcatgcacagatcagagccatttctgaaaatgtcgctgctgattctgcttttcctgggattggcagaagcctgtactcctcgtgaagtcaacttgctgaaagggatcataggtctcatgagcagactgtcaccggatgagatcctaggcttgctgagcctccaagtactgcatgaagaaacaagtggctgcaaggaggaagttaaacccttctcaggcaccaccccatccaggaaaccactccccaagaggaagaacacgtggaacttcctgaaatgcgcctacatggtgatgacctacctcttcgtatcctacaacaaaggggactggttcactttttcctcccaagtgttactgccactactgtaacttggaactggacatcagggatgatccctgctgttctttctagtgagcctgctccatctcagcttagccttcacaaggcctccatctcccaggcattctaacctctgaagaaagctctctgtcccctggactgcctgtgtggagggtaatgaactgggtcctttaaggaatggcacctgggtgcccagaggcatggccagaaggtgtctgtgggggccatgccttagggggatgcacccagggcggctgagagagcaactgcaggagtttcccctaaaatctctcctccagatcgttctcgaactttccccactacttccataataaaatgtatacttgttgaaaaaaaaaaaaaaaaaaa

SEQ ID NO: 105 - DNA, 1345 bp, Homo sapiens
tctacctcttgtcctccccccaacaccaccaccaccctggctcccctccctcatgaccgcctggatcctcctgcctgtcagcctgtcagcgttctccatcactggcatatggactgtgtatgccatggctgtgatgaaccaccatgtatgccctgtggagaactggtcctacaacgagtcctgccctcctgaccctgctgagcaagggggtcccaagacctgctgcaccctggacgatgtccccctcatcagtggccctgatctgcctcctgcgctacgggcagctcctggagcagagtcggcactcttgggttaacaccacggcactcatcacaggctgcaccaacgctgcgggcctcttggtggttggcaactttcaggtggatcatgccaggtctctgcactacgttggagctggcgtggccttccctgcggggctgctctttgtttgcctgcactgtgctctctcctaccaaggggccaccgccccgctggacctggctgtggcctatctgcgaagtgtgctggctgtcatcgcctttatcaccctggtcctcagtggagtcttctttgtccatgagagttctcagctgcaacatggggcagccctgtgtgagtgggtgtgtgtcatcgatatcctcattttctatggcaccttcagctacgagtttggggcagtctcctcagacacactggtggctgcactgcagcctacccctggccgggcctgcaagtcctccgggagcagcagcacctccacccacctcaactgtgcccccgagagcatcgctatgatctaaggtctggggagggtggctggcccggcctccacagcaccccaccccatatcttctttccatttattttgtaccaaaaacaattttgagaaagtattctgttgggatctgggcttcctcacttctggagaagtggccatcccatgcccacctgtgccatggaggagtgggccctgccagctgccacagctgcatgacctgcttccccaccccacggtgtcgttttgtttttaaaggtcacctgtcctcactcacccagccagcccttcaggtgccttctactcccagtgccaaagccagaccactggggtttcctgctgcaggaattgggggctgggaacagcagaggggatagaagtctggtggaggtggagtgggcacgccttagctacggaaaggcccatttctgggcccactgagctgcactgggattcttcactctgcccctcacttcctttagggcaaataacacagcagaaccacgtgggtattttagtacttttttttatattaaaagaattctaatttgcaaaaaaaaaaaaaaaaaa

SEQ ID NO: 106 - DNA, 1347 bp, Homo sapiens
  misc_feature (83)..(83): n equals a,t,g, or c
  misc_feature (334)..(334): n equals a,t,g, or c
gggcagccctcaggccctccggcagcctggccgggcccgagtggccatggcagcactggtgtggctgctggcgggagcacatngtcaagcctcaacaagtggatcttcacagtgcacggctttgggcggcccctgctgctgtcggccctgcacatgctggtggcagccctggcatgccaccggggggcacggcgccccatgccaggcggcactcgctgccgagtcctactgctcagtctcacctttggcacgtccatggcctgcggcaacgtgggcctaaggctgtgcccctggacctggcacaactggttactaccaccacacctctgttcancctggccctgtcggcgctgctgctgggccgccgccaccacccacttcagttggccgccatgggtccgctctgcctgggggccgcctgcagcctggctggagagttccggacaccccctaccggctgtggcttcctgctcgcagccacctgcctccgcggactcaagtcggttcagcaaagtgccctgctgcaggaggagaggctggacgcggtgaccctgctttacgccacctcgctgcccagcttctgcctgctggcgggtgcagccctggtgctggaggctggcgttgccccaccgcccactgctggcgactctcgcctctgggcctgcatcctgctcagctgcctcctgtctgttctctataacctggccagcttctccctgctggccctcacctctgccctcaccgtccacgtcctgggcaacctcaccgtggtgggcaacctcatcctgtcccggctgttgtttggcagccgcctcagtgccctcagctacgtgggcatcgcactcactctttcaggaatgttcctttaccacaactgcgarttcgtggcctcctgggctgcccgtcgggggctgtggcggagggaccagcccagcaagggtctttgagacctgggggatctcaggagccacctgggatggccctggcctgaatccagcctccgctgtggccatagaaggaatggagaacagggctgggcatggtsgctcacgcctataatcccagcacttccagagtccgaggtgggtggatcacctgaggccaggagttcgagaccagcctggctagcatggcaaaacctcatctctactaaaaatagaaaaattagctgggcatggtggcgcgtgcctatagtcccagctacatgggaggctgaggtgggaggatcacttgagccctggagatcgaggctgcagtaagccaagatcgcatgctactgcactccagcctgggagacagagcgagacgctgtctcaattaaaaaaaaaaaaaaaaaccggcacgtag

SEQ ID NO: 107 - DNA, 642 bp, Homo sapiens
  misc_feature (41)..(41): n equals a,t,g, or c
  misc_feature (49)..(49): n equals a,t,g, or c
  misc_feature (64)..(64): n equals a,t,g, or c
  misc_feature (607)..(607): n equals a,t,g, or c
  misc_feature (621)..(621): n equals a,t,g, or c
taaaggggaaacaaaaaggctgggaaggcttccaaccgcgntttgcggnccggcttctaggaantagtggaatcccccgggctggcaggaattcggcacgagaaaatgacttcagacaaatatgatcaatctctacagtcccctgatgaatttcacaggttcccaccaccatcagttctacctattcatctcatccatgctcattgttctgcctctttcctgttcctatggatgccctggcatgtttgtttctttctttctggcctcctatttccctcccctcagacatcacttcagcatctgtgccttctcacttcccttatcctgggtgttaccatttcagcctatgagcatgccattaatttgccatctttacaaaattctctcttgacttcacatccctctgtagctgccctctcccttctctcctcttctttacaacaaaactccttaaaagaactgttggctgggcacagtggttcactcctataatcccagcactttcagaagccaaggtgggaacatcacttgaggccaagaggtcgagaccagcccaggcaacacagtgagacctcatcactacaaaaaaaaaaaaaaaaaactcgangggggggccggtanccaattggcctaaagtgagtc

SEQ ID NO: 108 - DNA, 669 bp, Homo sapiens
cagcctcattttctcagtgccccagaggtctaggataggatttctaaactggaatcatccttaatcaccttgaagatcccttaagaggcatttgactggtgctgccgtctgtgtcctcaaagcaatgctggtggcatcgtcctgtgtacacatgcagagctaatacccaaactaaaaactgggtaactggccctgaagtgcttcccaatcagtaagccacagggaaatgtttgatttttatgttctgttggattttggtttgcttggcatatctaaaggtgcctttacttttctttttttttttttttctttctgctttgttttgtaggacttgttctaacatggaaaacaagtccagaagactctcctctgactgttacctttgccccaagccaccccaaacttttatgctcatgttttattaaagcaggtgctccctggaatctctgggacatttttgaggcatttgaagcagaatatagagtggtctcatctccttccttaatcttcctggtggttgggatgttccacttgtatcatagatttttttattacagatatgctccactgtttttaaatgtgaacttgtgcgcaaatgtgcagattcaatgttcttgttacagattgaataaatttttattttgaarawraaaaaaaaaaaaactcgag

SEQ ID NO: 109 - DNA, 1271 bp, Homo sapiens
ggggctgggccctgctcaggtggctctctccttgcagggaccggcgatgctctgcaggctgtgctggctggtctcgtacagcttggctgtgctgttgctcggctgcctgctcttcctgaggaaggcggccaagcccgcagagaccccacggcccaccagcctttctggggctcccccaacaccccgtcacagccggtgtccacccaaccacacagtgtctagcgcctctctgtccctgcctagccgtcaccgtctcttcttgacctatcgtcactgccgaaatttctctatcttgctggagccttcaggctgttccaaggataccttcttgctcctggccatcaagtcacagcctggtcacgtggagcgacgtgcggctatccgcagcacgtggggcaggtggggggatgggctagggccggcactgaagctggtgttcctcctaggggtggcaggatccgctcccccagcccagctgctggcctatgagagtagggagtttgatgacatcctccagtgggacttcactgaggacttcttcaacctgacgctcaaggagctgcacctgcagcgctgggtggtggctgcctgcccccaggcccatttcatgctaaagggagatgacgatgtctttgtccacgtccccaacgtgttagagttcctggatggctgggacccagcccaggacctcctggtgggagatgtcatccgccaagccctgcccaacaggaacactaaggtcaaatacttcatcccaccctcaatgtacagggccacccactacccaccctatgctggtgggggaggatatgtcatgtccagagccacagtgcggcgcctccaggctatcatggaagatgctgaactcttccccattgatgatgtctttgtgggtatgtgcctgaggaggctggggctgagccctatgcaccatgctggcttcaagacatttggaatccggcggcccctggaccccttagacccctgcctgtatagggggctcctgctggttcaccgcctcagccccctcgagatgtggaccatgtgggcactggtgacagatgaggggctcaagtgtgcagctggccccataccccagcgctgaagggtgggttgggcaacagcctgagagtggactcagtgttgattctctatcgtgatgcgaaattgatgcctgctgctctacagaaaatgccaacttggttttttaactcctctcaccctgttagctctgattaaaaacactgcaacccaaaaaaaaaaaaaaaaaa

SEQ ID NO: 110 - DNA, 802 bp, Homo sapiens
  misc_feature (105)..(105): n equals a,t,g, or c
  misc_feature (730)..(730): n equals a,t,g, or c
  misc_feature (755)..(755): n equals a,t,g, or c
  misc_feature (757)..(757): n equals a,t,g, or c
  misc_feature (777)..(777): n equals a,t,g, or c
cgtgcctgtagtaagctcatccctgcctttgagatggtgatgcgtgccaaggacaatgtttaccacctggactgctttgcatgtcagctttgtaatcagagattntgtgttggagacaaatttttcctaaagaataacwtgaycctttgccaracggactacgaggaaggtttaatgaaagaaggttatgcaccccmggttcgctgatctatcaacatcaccccattaagaatacaaagcactacattcttttatcttttttgctccacatgtacataagaattgacacaggaacctactgaatagcgtagatataggaaggcaggatggttatatggaataaaaggcggactgcatctgtatgtagtgaaattgccccagttcagagttgaatgtttattattaaagaaaaaagtaatgtacatatggctggatttttttgcttgctattcgtttttgtgtcacttggcatgagatgtttattttggactattgtatataatgtattgtaatatttgaagcacaaatgtaatacagttttattgtgttaccatttgtgttccatttgctyctttgtattgttgcatttagtacaatcagtgtttaaacttactgtatatttatgctttctgtatttaccagctattttaaatgagctgtaactttctagtaaagaattgaaaagcaaatcctcactaaaggatacacaggataggataaagccaagtcncatcaacattaaaaaatactaaaananaaaacacaaaaaaaaaaaancccggggggggcccggaacccattc

SEQ ID NO: 111 - DNA, 470 bp, Homo sapiens
ggcacgagggaaatcttgcacataggcaggtaaataattataaatggtgaagtggattattctgagctgcttaattttaaagggaaagagaactttaaactcttcaaccttttatgctgctaataagagttccacaatcaatagaaatctatcttggcaggcacttccttttacccactagaattttttcccttgggagttcacgatccccagaaactgtgatatgagccattcaatattgatgtactaaaacagtgctctgcttaaatacagtttttcaacatacagtcttggaagaaacaaaatccaaaataaattccaatagtccagtaacaggaataaagacaactattgcaaattaaatcttacagacttatatgaaagctgttgttaacagctgggtactagttatttgaaaagtttctcgtgccgaattcgatatcaagcttatcgataccgtcgacctcgta

SEQ ID NO: 112 - DNA, 1020 bp, Homo sapiens
  misc_feature (3)..(3): n equals a,t,g, or c
cgncacgaggtgaagttcaacccaatgcaactttccttcagtctttccgtgaaagcgcctgtgaaaaatgaggtcatatttccctttctcagtctgccccttcccgttttgctctccggttttcttctttgtcttcacagatgtttacctatgttttttctttgtttttgctgttggaagacatctaagtgatccttttcccattctctttttcactcataaatgtcctgatgtttagcaaaaggcagttctctttgctacttgagcttgtaaactgttgttaaatgagtaaccaaaaggaaagtccttgcgaagttggttaccatttcagatacaagaaccgtttatcttcccacgctgacgaattttgcgagtgagatgattatttttccttgtgtttgtaatttatttaagtaaattccttgtttgtttttcttttcagtacaccaggggtatatattttcaatatgacatgtacctttggttcagggctaagttagagtctgaaaaatgaagcctgtaggattcatggcagtgatctaattgtgattcatcttactgattgtagggcaagaagagtggactaactcaagacacaaggcaccttcagcgaggacagcaaagggcgtctacagagaccagccatatggcagatactgattgtactgtctgatgttgtgaaatagccaatctccaccagtcctgtatactgttcaaagtaatttttttctatgaacaatccctttttaaataaatcaaaatgcttaaaatctgaatggatggaacttaaaactactttgttgaaacatcaacctgggcagaaaaaaaaaaaaaaaagacatgtaaaattttgttatttccagtctgtatatgaaaaaataggtcatcaaaaggaaaaaaaataactttgattaactagtgttaaacaaaaaataggtttactaaatctcgtgccgaattcgatatcaagcttatcgataccgtcgacctcgtagggggggcccgtacccaatcgcctgt

SEQ ID NO: 113 - DNA, 1881 bp, Homo sapiens
  misc_feature (70)..(70): n equals a,t,g, or c
  misc_feature (126)..(126): n equals a,t,g, or c
  misc_feature (1860)..(1860): n equals a,t,g, or c
atttttccttttccttaacaatacctttggccatttttttccagttcactatgtttgtatactaactttncttcagccttttaatgcgaagcaactagtagagcatgctttcaggatctgacagcnctgctagtagagcgaagtatttattaatacagaattaaccttmgcccctttaaagtcaagtctgtctaatctaactagcgcctcgctttgccttctcacaatgctcactagccatcatgctcacccttctcttccagatccacttcctcatgatactgtcttctaactgggcttacttaaaggatgcgagcaaaatgcaggcttaccaggatatcaaagcaaaggaagaacaggaactgcaagatatccagtctcggtcaaaagaacaactcaattcttacacataaatgtttgccagagtgtttcggccgacgtatttacagctctgacaaatcatcagacagctgctctgcagtacagatgtgtatcccaccaaactaatgtagatgtacaaacacttcactgtctgtctcaagctgctgggatgtatctctaggaaaaccttccagtgggtaaatctttttctttagaacaaatattggaggtttcatgttagccattttaaaaggcaacactttgacaaaatgatcgttcatactttgggaatttgtggcatgttcacatttattgctagggcaattctaccaagacactcaatggaatatgtcacactccttaatagggacctgtgactccttaataaggacctgtgacatgcccagcatcaagggataagaccgtaaattcacatatatgccatctgtcctcaagtgttatctacataggaaataaaatggaattgatgtaaagttccatttctgacagctgacatttattaaactttggatcaaagataatgtgattcttatgattgatttctcaaactagcttttccctcccaagtccaggacccattaatttcctgagccaatcagaaatatatttttcaataatgctaaaattagctacaattctgctgaccctactattaaagaatctggatgctggactcactgacaagctttccagaagcaattttataacagatttcattttaacaaaatactgatccaattttcattattcttgagaaatgtcagctttgccttaatgagtatttgctttaaatttctaagaatttatatcataactagagacccaaatatctttcacagaattttgttccataaatgtttttcttaattattaagaagtgttaccttattaaaatgaccaccattctaaaccatttttcagtggtctggatacgaagtttacagtttcataccaactatctaaaacctaattgcaaattgaccacagacctctaacctcctacttttatagacttgaatacttaagtaatttaaattagggttggtatttcatttttttcttatctaaatcttagtttcctggaataataaagtttgatgttcagcaagagaactgcttgagtttaagccattttcaaaagaaacttgccttttacattattgtgttccagaacattaagtgactgtaggtactgggtattagtgatggtaaactttgtgttgctctttatgaaatgatccatataactgttgggtgcatcagtgcttttcaaaggggctgcttactatagggttaactatgtatattcattgttaagagttaacttgtggtttggctgttycctggattttataacatacatgtgcagaaatgtattcaaatgaaaggaagcatacctttatcaagatgctattaaaattgaacatcaagtataaaaaaaaaaaaaaaaaaaaattnctgcggccgacaagggaattc

SEQ ID NO: 114 - DNA, 541 bp, Homo sapiens
tgcaggtaaccgttccggaattcccgggttcgacccaaggggtcccgtgatgccttgtcatggtcttcttgcacagggcctcagcctggcacctctgccaccgtgggctctctgttgtgtgggggtgtcccgtgcattgcaggacatccagcagcatccccggcctcctgctccgtgccagtagcgccgcaccccgccgtcgtgacagcccaggtctcccggtgtgcagaatgcccgctggtcatgctgagaggtacaggggtgctgcccccagggtttgaacgctgtctaactcccacctctggtgtgtctctcccctgtgtgtagcgtggagtcactggatgagtgtggtgacctccctgtgtccagctgccctgggctgcaagcaggtccctcctgcagccctccaggccacccttaagcagagctggaccagcctggccaacatggtgaaaccccatctctactaaaaatacaaaaattagccaagcgtggtggaactctgtctcaaaaaaaaaaaaaaaaaaaaaaaagggcggcc

SEQ ID NO: 115 - DNA, 762 bp, Homo sapiens
ggcacgagtgcctctacgtcatgtcttctccaatgtcatgattcacgtcgtgcagtactgttttggacttgtctattatgtccttgttggcctaactgtgctgagccaagtgccaatggatggcaggaatgcctacataacagggaaaaatctattgatgcaagcacggtggttccatattcttgggatgatgatgttcatctggtcatctgcccatcagtataagtgcccatgttattcgcggcaatctcaggaaaaataaagcaggagtggtcattcactgtaaccacaggatcccatttggagactggtttgaatatgtttcttcccctaactacttagcagagctgatgatctacgtttccatggccgtcacctttgggttccacaacttaacttggtggctagtggtgacaaatgtcttctttaatcaggccctgtctgcctttctcagccaccaattctacaaaagcaaatttgtctcttacccgaagcataggaaagctttcctaccatttttgttttaagttaacctcagtcatgaagaatgcaaaccaggtgatggtttcaatgcctaaggacagtgaagtctggagcccaaagtacagtttcagcaaagctgtttgaaactctccattccatttctataccccacaagttttcactgaatgagcatggcagtgccactcaagaaaatgaatctccaaagtatcttcaaagaataaatactaatggcagaaaaaaaaaaaaaaaaaaaaaaaa

SEQ ID NO: 116 - DNA, 1103 bp, Homo sapiens
gtcttaatgagcaacagcaacagcagtctccagttaagaaagagagaattaaatacagcagagatttcctgttgaagctctcaagtgtttccatctgcagaaaaaaaccagactttctgcctgatcatcccattgtactgcaaaaaccagaaaacaaccaaagttttaagtagcattttaagaacagatgaatttaagtttggacatctgcaaatgaggtggatctagcaacaataactgtaatggactgtgacaattcaatttattcttaattttgatggttggctatttgacttctctaaaaatgagaaagagctattttaaaatataaagaattttctaatcagtttcagctttgcaggaggtttcctgcataaattgggaagtaacactggaaagtaggaatttggttagtgaagtgggaagactgtatatttataatttgcatactacttgcaattttttgtttttcatcacttgtaataatggaatggaaatgtaagctgtaaagactctcaaatataaaatatttgctacagtgtatatatggtacataattgcttgttgcttttaaagttccttctgttgttctgcttcccactgatttcataccagctcatgaatggatcattacagtctctccagaggcttagaatgattcagaatgttcaatgcatagttctcaataaacaggaggcagaatttttaatgggtatttcttttcagatatatgattggtctctaggtttttgataataatatggtcttaaattcataattactagcagagattgataatttggaaacaatggtagtgaatgaaactgaagttgaaaaacggctgctacttatgtcactaatcagaccatatgaatagcagaagttgagcaatttcaaagtaaaactgatatttttatttccaaaggaatttagacatttgaaaataattgacatacattaagttttaattcgataatttcttatatatggatgaacaatttttgggtttaagcttttaattcctagaaattttatacattaaatctcctgcaatttgtcactctggatgttactgtttaaaaaaaaaaaaaaaaaactcgtag

SEQ ID NO: 117 - DNA, 1175 bp, Homo sapiens
ggcacgagattgaatgttccagataatccctttcccagtcctgcctgacatctgggtagggggtttgtccctggaattctgggacactggctggggtttgaggagagaagccagtacctacctggctgcaggatgaagctggccagtggcttcttggttttgtggctcagccttgggggtggcctggctcagagcgacacgagccctgacacggaggagtcctattcagactggggccttcggcacctccggggaagctttgaatccgtcaatagctacttcgattcttttctggagctgctgggagggaagaatggagtctgtcagtacaggtgccgatatggaaaggcaccaatgcccagacctggctacaagccccaagagcccaatggctgcggctcctatttcctgggtctcaaggtaccagaaagtatggacttgggcattccagcaatgacaaagtgctgcaaccagctggatgtctgttatgacacttgcggtgccaacaaatatcgctgtgatgcaaaattccgatggtgtctccactcgatctgctctgaccttaagcggagtctgggctttgtctccaaagtggaagcctgtgattccctggttgacactgtgttcaacaccgtgtggaccttgggctgccgcccctttatgaatagtcagcgggcagcttgcatctgtgcagaggaggagaaggaagagttatgaggaagaagtgattccttcctggttttgagtgacaccacagctgtcagccttcaagatgtcaagtcttcgagtcagcgtgactcattcgttcttccaacagtttggacaccacaaagcaggagaaagggaacatttttctacagctggaaagtgagtcctatcctttgaggaaatttgaaaaaagacatggagtggtttgaaagctactcttcatttaagactgctctccccaaccaagacacatttgcctggaaattcagttcttagcttaaagactaaaatgcaagcaaaccctgcaattcctggacctgatagttatattcatgagtgaaattgtggggagtccagccatttgggaggcaatgactttctgctggcccatgtttcagttgccagtaagcttctcacatttaataaagtgtactttttagaacatttggaaaaaaaaaaaaaaaaaa

SEQ ID NO: 118 - DNA, 572 bp, Homo sapiens
  misc_feature (106)..(106): n equals a,t,g, or c
  misc_feature (110)..(110): n equals a,t,g, or c
  misc_feature (422)..(422): n equals a,t,g, or c
  misc_feature (427)..(427): n equals a,t,g, or c
  misc_feature (548)..(548): n equals a,t,g, or c
ggcacgagccagggcccagcatcagaagccggccgttttgatagacgtgttccctctgcgtccttgcagccttccatctgtgctacctcccaggaagccgaagcgncagnagtccctttcggatggcactgggagcaggaaaatgaggtgattatgggctgctgctccaagaagtattggcagctgttgctgggggcggctccctggggtgtcatcccttkcttgctcttgtggatgggaaccagagcaccccacttcaaagactctgtaagccagggcttaccaragaaagctgaagagtctagggccaattttaatcagtttcttgtgcttctcatgccaaaagagatgattgtcctcactatagttcatcctatagtgcggcgggcctgactcgctactgccctctaatgttctggganagaanctgttgggtctttcctacctaatctggtagaaatgtgagaacagaggctaatttggggaaataaatctctcaatttttttgagttgctttgtgtgtgtgcgcgcgcgcatgtgtgtgtgtnaggggcagggtctctaagaaagaa

SEQ ID NO: 119 - DNA, 1633 bp, Homo sapiens
ggcacgagcatcagtaagtaggagctagggaagagaaagcatgcaaaagggcaagaatcaggagaattgatatagtagctggacagaactctagatgtgtgtgtgtgagagaaagagaggcagggagaaggagggaggagttacccccacgatgacctccaacttccctttctgcaccctcatcctggggatagcacaggctcaggcctgccctggttgccctggcgattggcctggcctgggctcaggggtgggggaggggctgcaccacattaggacctgccgtactccaatcccatgcagtcctcctgctcctgctgctgcgtgcctgggctctggtcatgccaggcttccttgtgtcctgcgtctgtggccggttcctgccaacctgtctagtcctttcaggcttgaggccctgcattgctctttctggtcctctcccctccttcccgctccccatctagccttttttgggttccgggatctgctgacagactttcttcttgctgcctgcctgcttacatttcagaagacccctctggaactgcccatggctgtggtccacctgctggtagcaacgccctgttaccaaatgctagataatctgccactcccctctgcagccgccaactggtgctgagctgccacctgttgtctgtttccacacccttgtacactgcattctgcctgtcactctggacagctgcccagcagctgcagctgaggccgtcctgccagcacctaccgcagccccatgggtggtcctgtccagttcctggcgctcccagcctgcctcatctgctgtacttacagagccacatctggttgaatacagagctggggtagcctggatgggcccatggcacactcactcccagagaggcgggcatcctctctctggacctctagggaagggcagggtctggagcccaataataaaacacagtaatgataatcatagctaatgtttactgagaacttaggatgtgataggctcaatgatttaccagaattactctatactgcataactaccctatcaggtaagtactattaatatcccctttcccacatgaagaaactaaggctaaccaatagaaatgaacctgtgtaatgtcccatgggcataattcatggagccaggattcagaaccaggtgctttacttcagggctgaagctcataaccactagaccaaagcgcctcctccgtgacctctggggaaggcccagcaacatcctctattgcgtccaatgacttctccctggtctgagatccactgactcacaggggtagggttaaggttaaggccagagtctcagctaagctttggatactttcttctggatttggagaaggctggaataactgaatttctgctcatcttcaggagcggcctactagagccacacatttcccagctctccttgtgtgtttcccagacccttcttccatcgtgtcctctcccttaggctcctggaaagttttcagagagaatcacccagtggtaacattgttaaacaaaacaggaaaatgggacttgtgtgtatatatgattaaattattaattgatggatctaccttcttagctcgtgccgaattcgatatcaagcttatcgataccgtcgacctcga

SEQ ID NO: 120 - DNA, 1026 bp, Homo sapiens
gtctaaatgttcagtttttcttcctaattccaatgattctcctcatttctcaatgtcctttgtccatctttgctgctccatttgcactgcctcccaaaggtcactgtggctccttctctgacttccacagtcaagttacacttcataaaaattctaagctcattttcagaagccacaaatctatccttctttaaagtcttcaaactttgattgtgtaaataaatactcagaaacaagatttctaaaaaacaaacactattggccatcgtatgttcaaaggagataacaaatgtttaaccttatatgttgtaggctttctaaacttaatttcaaaaaaagactaaataaacagtgtcaatatgtctataaactcacaacgaaaattttcagatcatccaattgtgtattcattggccggaaacaatcatgtaaaaaccacagccctggagctgggtagcatagaaacaagaagattcagcatttcatggttggtgactcaaatctctaaagggktgtcaggttaaaaaaaaaaaargaaaagaaaagaatagaaatttgacctgatctataaaaatgaaagtcgctgggcaaagttttggcttttcactcctgacaaagatgagctctctcataggtagaccaaggcacacgagtgatgactttcgtggccccaaaattcttcaagaaaatagtagattgaggaagcgatctgcgcattgatagaggtgctgtttgaactggatgacatttaagcttccttctttctccaagattctgtgaggccatgaagcatgctatttcatccccactccaattgctgtctccctggcctggtgcccttaccacctcaatcttgggtcactgatctcttttgcaagaaatcagtcctgcctaccacctgcaacttcatcttcctaaaatgtcactttccttaaggcctgctctgttcaaaggccagttcccagccacaccaatgtaaactcgtgccgaattcgatatcaagcttatcgataccgtcgacctcga

SEQ ID NO: 121 - DNA, 1384 bp, Homo sapiens
ggcacgagcagttattttcaaaatggctatggaaaacacgtaagttttaaaatatgccctctttctcgttttaaaaaattattactattgtccatacatgttactcttttcatctagatttatcatgtttctttggcctccagtctctggtgtttgcctaagctttattagagacaggtcatttctacctatgtgtcattttatctatgtcttgatcttatgtaattcaattgctctttaagattatgttctcttctcatgtttggtttatccattatccaaattttccatttctttaacctgttatcccttgactctttacagttctacctttttattcacttagtcttttaccctttttttattcgttcacccctttttgttgtttcaggtactccttacttatctccttagccttttcttcttcatcttctttcttacttttctcctacttctcattttacataatacttactttttgcttcagtcttcaaccattgtcaatcttgtttttccttatattccattttactttctgaactactctttaatctcctgttcaacactacctttccttcttttttatcccctcttatttacacggtgattacaacagtttggtatagtctgatttatctgattgtaaaattgatgagttggatgtaccaaaaatataaggaagctaaattcaaagaaggtaaaagatttgcttgtgtcacctagctggttaattttggcatatgcattgtttctctacatagtctatgtagtcaaacaggtttcatttagaaatcattccccataagaagggtttcaatttgatttgaacaggcagagatggaaaaaatttcctctctgataactactgctactgttgtataccagtagaaatataacagcagcacttaggttagaagaagctcattagctattcagaataaatttcatttttcttaatttttggtaatcatatctcagcctgttgaatttaacttaaactctgaaagaattttggttgccatttaatttttaggtttccttaatgatagggacctaataatttgttttaaaaaatttgtcttggctgggagcagtggctcatgcctgtaatcccagcactttaggaagccaacattggaggattgcatgagcccaggatttcgagaccagcctgggcaacacagtgaaacctcatctctacaaaaagttaaaaaattaaccaactgtggtgccacatgcctgtagtcccagctgcttgggaggatgaggtgagaggatttcttgagtccaggagtttgaggctgcagtgagctatgatcacactcctgctcttcagcctaggtgacacagcaggacactatctttgaaaaaaaaaaaaaaaaaa

SEQ ID NO: 122 - DNA, 941 bp, Homo sapiens
ggcacgagattttggcaagtgctgttatgtgaacaccaccatcacaatcaagatagtctatagttctagtaccccctgccctgaaacttgcttgttctgtttagtcagctcctctccccaccaccagcccttgtcaactgactcattttctgtctgtatagtttatatcatttccagaatgtcatataaatggaattctagagtatgtttcctttggagtcgcacctttcacttaatgcttctgagactcatctgtcttgttgcatatatcagtacagaagtcatttcttttattgctgagtagtaatctgtcatatggatgttccacagtttgtttatccatttatcactggtggggatacttgggktttcagttttcagtgattatgaagaaagctgctgtcaacatttgcaaacagtttgtgtgtccacattgtcktagtaaataactaggagtggaattgccgggttgtatggtaacagtatacttatctatgaaaaactgacagacttttctaaaataactgtaccattttacattcccaccaccagtgtatgaaagtcccagttccttaacttcactgacaattggtatgtcagggtttggtttcatttttattttgttgttaggatttcaaagggttatagcgggatttcattttggttttaatttacacttccctaatggccattgagcatctccactgctcgtttgctatccatttgcctattttcttttgtgaactatgttcaaatcttttgtccatttttttaaaacctggattgtttcttattgatttttgagagttctttatatgttctggatagatatctttgtcagttatgtgttttgcaaatattgtataccattatgtggcttgtgtttttattccattaacagtatttttcacacaagaaaaaaaaaaaaaaaaaaaaaaaaa

SEQ ID NO: 123 - DNA, 1715 bp, Homo sapiens
ggcacgagggacattggagctccccacaccactcattgctgcccaccagctatacaactacgtggctgatcacgccagctcttaccacatgaagccattgcgaatggcccggccagggggcccagaacacaacgagtatgccctggtgtcggcatggcacagttctggctcctacctggactctgagggacttcgacaccaggatgactttgatgtgtctctgcttgtctgtcactgtgctgcaccctttgaggagcaaggagaggctgagcggcacgttctgcggctacagttcttcgtggtgctcaccagccagcgagagctcttccccaggctcactgctgacatgcgccgcttccggaagccacccagactgccccctgagccagaggctcctgggagttcagctggcagccctggggaggcctcagggcttattctagcgcctggaccggctcctctgttcccaccactggctgcagaggtgggcatggcacgagcacggctggctcagctggtgcggctggctggagggcactgccgtcgggacaccctttggaagcgcctcttcttgctggagccaccggggcctgatcgactgcggctaggggggcgcctggccctggcagagctggaggaactcctagaagcagtccatgccaaatccattggggacatcgacccccagctggactgcttcctatccatgacggtctcctggtaccagagcctgatcaaagttctcctaagccgcttccccagagctgtcgccatttccaaagcccagacttgggaactcagtacctggttgcgctgaatcagaagttcactgactgctctgcgctagtgttctggactccacttaggaaagacgtctctgaagtggttttccgagaagcccttccagtacagccccaggacacgagaagcccccctgcccaactggtctccacctaccaccacctggagtctgtcatcaacacagcctgtttcacccttctggacccgcctcctctgaagggagtggactggaccactgaatgtcactgttccttgaatcatgggcctaccagattgcctgccagaggcaggactgaccagcccttctgggccccagggcaagccagacactgagtgacaccaaaggctttgtaactatgtcttgagggtctgctgccccagcctggcagcaggaaccgccctccccaaacacccacagccactgacccatccaggactccagagagtcaggtcaaccccgaggaccccttgggcccttctggggtactcctttcggcccccctggtagagtctcgggagttcacacagggtggcaaacaccccctagagctcctctgcctgaatcctgccccctagcctttgaccactgtcagccacctgtgtcccttgagccttcgggtcttcacttcccacttggacatcactgctggacattcccatcgagatgacacctgggttccaatcccagctctgcctttgaagcacttgcggccaccgtcaagtccctttgctctcggaccctgggtttctcatcctttaatgaggtgggttcagaagctctcccatcttcacagcaaccctggcactggcttctcaatgggagggaagtcagcagagaaactgaagtgttagacactatgtgtcccaccaccccattacagagacatatgacaatgaaaaaaaaaaaaaaaaaa

SEQ ID NO: 124 - DNA, 1437 bp, Homo sapiens
cgcccgacgccggaactgcgagctctcagcgggagccgagacggtgcagggccggagaagcaccttcactcccagcctgcgccccgatgctgcgcgttctgtgcctcctgcgcccctggaggccccttcgggcccgcggctgcgcttccgacggggcggccgggggctcagagatccaagtgcgcgccctggcgggtccggaccaagggatcactgagattctgatgaacagaccttctgcccgcaatgccttggggaatgtcttcgtcagtgagctgctggaaactctggcccagctgcgggaggaccggcaagtgcgtgtcctgctcttcagaagtggagtgaagggcgtgttctgtgcaggtgcagacctgaaggagcgggaacagatgagtgaagcagaggtgggggtgtttgtccagcgactccggggcctgatgaatgacatcgcagccttccctgcacccaccattgcggctatggatgggtttgccttgggcggaggcctagagcttgccctggcctgtgacctccgagtggcagcttcctcggcagtcatgggactgattgagaccacgcgagggctcctcccgggggcaggagggactcaraggctgccccgttgtctgggggtggccctggcgaaggagctcatcttcacgggccgacgactgagtggaactgaggcccacgtactggggctggtgaatcacgctgtggcccagaacgaggagggggacgccgcctaccagcgggcacgagcactggcccaggagatcctgccccaggcccccattgccgtgcggctgggcaaagtagccattgaccgaggaacggaggtggacattgcatctgggatggccattgaagggatgtgctatgcccagaatattccaacccgggaccggctagagggcatggcagccttcagggagaagcggactcccaaatttgttggcaaatgacccccattttaaccttcagcatgggagatgcatgccctgaagagcaggatccagaaggaagatttgtggccagattgccttcatcatttcacctctccagacttccatttcttcacaaggatgatgatggaaataaaatgactggcgtgatgcctggaaccaaggtgctgatcctaccacctactgctaccttccttagcttcaccctggctagaaataatcacgagggttgggtttgctttggaaaatgcctgtctctctacttgaatgataaagaattaaattagatctctctgagtcttggtatcattggctctcagcccctgacctctctcagttatcaggcactcattagagatgtcagaagattttaagatacccctagtttcttcctgtggaacaacagaggtaataaataaactctggacatcggttgaaccagtgtcaggggtcagactgcagatcccagtct

SEQ ID NO: 125 - DNA, 1816 bp, Homo sapiens
  misc_feature (504)..(504): n equals a,t,g, or c
  misc_feature (1405)..(1405): n equals a,t,g, or c
gcgtggatccaagatggcgacggcgatggattggttgccgtggtctttactgcttttctccctgatgtgtgaaacaagcgccttctatgtgcctggggtcgcgcctatcaacttccaccagaacgatcccgtagaaatcaaggctgtgaagctcaccagctctcgaacccagctaccttatgaatactattcactgcccttctgccagcccagcaagataacctacaaggcagagaatctgggagaggtgctgagaggggaccggattgtcaacacccctttccaggttctcatgaacagcgagaagaagtgtgaagttctgtgcagccagtccaacaagccagtgaccctgacagtggagcagagccgactcgtggccgagcggatcacagaagactactacgtccacctcattgctgacaacctgcctgtggccacccggctggagctctactccaaccgagacagcgatgacaagaagaaggaaagtgatatcaaatgggnctctcgctgggacacttacctgaccatgagtgacgtccagatccactggttttctatcattaactccgttgttgtggtcttcttcctgtcaggtatcctgagcatgattatcattcggaccctccggaaggacattgccaactacamcaaggaggatgacattgaagacaccatggaggagtctgggtggaagttggtgcacggcgacgtcttcaggccccccccagtaccccatgatcctcagctccctgctgggctcaggcattcagctgttctgtatgatcctcatcgtcatctttgtagccatgcttgggatgctgtcgccctccagccggggagctctcatgaccacagcctgcttcctcttcatgttcatgggggtgtttggcggattttctgctggccgtctgtaccgcactttaaaaggccatcggtggaagaaaggagccttctgtacggcaactctgtaccctggtgtggtttttggcatctgcttcgtattgaattgcttcatttggggaaagcactcatcaggagcggtgccctttcccaccatggtggctctgctgtgcatgtggttcgggatctccctgcccctcgtctacttgggctactacttcggcttccgaaagcagccatatgacaaccctgtgcgcaccaaccagattccccggcagatccccgagcagcggtggtacatgaaccgatttgtgggcatcctcatggctgggatcttgcccttcggcgccatgttcatcgagctcttcttcatcttcagtgctatctgggagaatcagttctattacctctttggcttcctgktccttggtttcatcatcctggtggkatcctgktcacaaatcagcatcgtcatggtgkacttccarctgtgtgcagaggnattaccgytggtggtggagaaattycctagtctccgggggctctgcattcwacgtcctggtttatgccatctttwatttcgttaacaagtgactgcagcgccaagcggcatccaccaagcatcaagttggagaaaagggaacccaagcagtagagagcgatattggagtcttttgttcattcaaatcttggatttttttttttccctaagagattctctttttagggggaatgggaaacggacacctcataaagggttcaaagatcatcaatttttctgactttttaaatcattatcattattatttttaattaaaaaaatgcctgtatgcctttttttggtcggattgtaaataaatataccattgtcctacaaaaaaaaaaaaaaaaaaaacttctcggccgcaaggaa

SEQ ID NO: 126 - DNA, 776 bp, Homo sapiens
ggcacgagctgatttctatttttaggagctacttggatttgtatgtattttttctacgtgaaaatatatgtactcttcacttttgttccagtactataattgctcatgcactctttctcccctttgagaacattcagtgaaatacaacttcatcaaagatttgctcaaaggagaagaatcgcatgagtgtgaaaagtagatgctcgtagccagaacagaaaaggttacacatgatcatggcacagaagataggaggtttgacttggtgggccataatgtttattatcctttttgaaataacagggaccagcagcagttttctcaggataaatgctctaccccacttctctatgaacaggtgtggggaggcttactttccattttcatatttatacacctctctacaaaagcaatttttaatgaaggttagtggaattgttaaaaatctgagagggaatgatgactggaggtgttttggggtttttttctgtattcattttttaatgagaaaagttttaaatgtagtacaggttagacccaactactaccttactattataggacgattctatgtttctgttaaagtattcaagtagctttctctgggggaaaaagtaccacttggacacttaaaggaattgggatttttgtctactttggataaggcagttgacttcttaagtaaaagcaatagtgtaaaatgtcattttgtttggaatgttaagtgagcaaataaaaaacatgttgaaattgtaaaaaaaaaaaaaaaaaaaaaa

SEQ ID NO: 127 - DNA, 406 bp, Homo sapiens
aggttttccagaaagttatcagatcttgctttcctgattagcagcagttagcggggtggataaaagcaccccttcagagcaatctcatttccatttctttcaggccacttattttttccaactttttttccgtatcttcataaatgtttcactcttctttgttagtatttcttagtctcttgagtcaagaaatatttactgagtatgattgcatgcataagtagtgtgcgttagagatacgatacctgtaagacaccacagtgctgggtagatccgggtgccattgtctgttgccagggccgaagttggcattttgtaagtgttcgaataagcaccatgccgtgggataagaaataaaagtgtgtgcctcatctgtaaaaaaaaaaaaaaaaaactcgaggggggg

SEQ ID NO: 128 - DNA, 3102 bp, Homo sapiens
  misc_feature (3096)..(3096): n equals a,t,g, or c
tcgacccacgcgtccgcccacgcgtccggcccagtagtttttattgttgggtttttgaaaaaacctctaccaagaatatggtgttttttttgtttgtttgttttagaaaaattgggatttccccccaccccgccccacccagataaactatatctacactgtctcgtcaagttctctgacacgatctttctgggctctacatttcctactagtttgtgtccagaaactgcaagttgacatgaatagaggacaaaggttgtgtcttgcttttgtctctctcttccctccctgcaactctctcksscctcctcccactctcttcccctcccccctcctcccactgtctctcacctcccccaccccccactctctctcatctctcgctgtgtcctgtgtatgtgtgggtgtgtgtgtatttgggtgtgtaaatgttggttcttccactactggattttgtaatctaggataaatcactttttttggggactttgattttgctccattacgttttcattttttctgagcactgactgttctgaaagctgcacaaaacgtagaaagaagacatagcgcctgccagggaataggaaatgagggcacttacacattaatgtgaattagtaattgtggtatagaaatgttttatagtgaaagattcaaatttgcttttcaagaaaaatgccaaaagctatttaaataattcgaggttacatcgtargttttgatttttctcaatttaagatacagaaatacagcaagccttaatataaagtttcctaaagtttcttcaagtattttttaaggtggagaaatgcaggaattgtataaccagaattgtttctgcctttagcttttcagaacttgagatgtggcagcactggactgggtttttttaaatgttaggactaggaatgtttgctcttgttaattatgaattaattgattattaagtttagaatgcatttttacaagtatctaactatcaaattgtgtttagtaacttgagtgtatgcacaagtttgatcaacagcaaaatagagttctgaatttcttttaaagtgatgatatattattttgtgaaactttgtgtttgaaaatgtttatttctgtttatggtgtaatcattctgaggtgaggcttttcttatttcctttgcattttgctagagctgtgctgagttcagcatttgcttatttaaccactacataatgacagaccagttattaggtattagcatgtgtggtaataataatagtggaacttcacacttacatcaattcagtgcaggggcatagaataaaatattaaatattggcagatgtatgaaaagaagtgtgagttaaaaatattgaatattggcaggtgtgaaaacaagtgtcaaaattcctcatatagagaaaataattttgagtttagagtattatcttttaattaagtgtagtctaaacttaactttctgtaaaggcactttgtggttttyccaaagatgttctagatctatttggttgctctatagtcaaacagctcttttgaagacaactgtcttattttattacaaattggcttgacatatyyatactgtaacattgtaatattgctgtgctgtacattttggcccttackaaatacgtctttttcagaactgttaaagttttgatgtacatcragctgaattctgtttttaccagtttcaaaaccttcaagtgatatgtggaaaaaagtgaatgagacctctgatagggggttttcagaaccttgttcacaccaaaatgtgacagttctttcatgttttcctaaaccaagttaaaattacatgtatattttggtgttaaggttgatttttaagatacttctgatttgtacaaaaggaatgtttcctttataaatcacagaagaaaatgacaatatctgttggatatttgatataatttaatggtgttataaaacctttaagaggattcatggtgaatatatgtgataacatctttatactttgaaaaatgttccacttacccttcagatatttgttgtaagttaattcaattcttaatactttaattttgctccaacaagggctttatgttgctggtaagagaatttatttactaaatgcactatgtataaagtgaaagatagtttacttatctgactttgatattagatggctgacattagtgcacataatgcagagtttaaccttgattcttcaacagagtccagatttaaatgtctacttagttaattagttagctgatattcttccacaattaatatattcaatttcccatcagtatatcactttaaattttatgtttttctaaggaaactttccacagaattttaaacaactgatgcatccatactcagggtgtagggagaatactttgcatttaaaaaccctgtccacctgtcaccagcacaagagaattagagcttcagtgagaatttagaaaaattatactaaagtgagatgcattttttctcattttcagcaagactcctctaagcatttactcatttactgtattcctgctctgaagatgtggatacagaattagtcactcttgtcactttatttatttattggtttttttttaaccatctgtgtacattcctttcatagggtagagttctagttctagaagttcttattttgtttttgttgtaatgtttgaatactatttaatatccggttttaatattgctggatttgctacctttggttacttgtgcagtgttaaaagtaatccactttcttgtttaatataccagatacatagcaaaagcagcttggaataattatagctgtttatttggctgtgctcagttactatattaagatcttgtactgtgtaacagtaactcttttttgcttttcagtaatttaatatgttcacttaacaaaatacgaactttgagatgcactaaagttttgtttcagcagtggctcaaaaaatttcagaaattacttttgtaattatttgcaattaattgttcttttatcttacaattgtttaagcctgtgatctttcttctcccagctaagagttcttcaataaatttaagaaatacaaaaaaaaaaaaaaaaaaaaaaanaaaaaa

SEQ ID NO: 129 - DNA, 1155 bp, Homo sapiens
ccgggtcgacccacgcgtccggtgagtgcactctaggatgttcacatgatgacaaaatcacctaacaatgtagacgcttcagaacatataccctttgttaatcgatgcatcactgtatatatgtgtgtatatacacacatatatgtacatatatttaatacatttgtgtatgtgtgtgtatatatatatatatatacttctcattatttatactctagacccagagcctcctagctggtctccaaaattggactctcatctctctttgagacagccttcaaatgatcgtttttaaagtgctaattaactcctcttctcaaaatgcttcaatggcccactaatctctaccgaatcaaggaattcagccatactgtcccaagatatctttccttggccagttggagcctcatttcagctgctctgggtttatcccctgtctcttctttcccacttccaagcctgtgctcagcccacctcctcttctggggatgccccacaccccactctgccatatctgccaaacctttcatctccccgtgaagctcttgacaccaaatacagtttactttagaaaatgtattttttccactttctcaactaaacttttccttgtgtgatctgcttttccgctgccaaggcacatcgtttttaattctctacagcactgctcatatcttgcccagtattatagcttctacatattggtcttgcttcttatttttgagcacaaaaactaagccactccactttctcttaccagtgaatccagcttaaaaaaactgtgagcaacctatcagtattttgttgacatgaactctatagaaaccttagtccctggatcttcgactctgcctcccctgacatttatctgctcccacaaagcacgcaggtgtgggaagagaagtggctgttttttgaggtcacatttcagccctgattcatcctaatgtcttcaccctttttatcctttggscactgtgtycctagagatgtgaattcaattccgcaccattctctcctttacaatgatgccaatattctcaggcttttaagactaaattttaaattacgagaaaatttgatcttcaaacttaagttggacctagaaagaacaatctcatgaactcaaaaaaaaaaaaaaaaaaaaaaaaaaaa

SEQ ID NO: 130 - DNA, 1459 bp, Homo sapiens
acgcgtccggcgtctgcagctgcaggggaggaggactgggtccttccctctgaagttgaagtgttggagtccatctatctagatgaactacaggtgattaaaggaaatggcagaacttcaccatgggagatctacatcactttgcatcctgccactgcagaggaccaggattcacagtatgtctgcttcactctggtgcttcaggtcccagcagagtatccccatgaggtgccacagatctctatccgaaatccccgaggactttcagatgaacagatccacacgatcttacaggtgctgggccacgtggccaaggctgggctgggcactgccatgctgtatgaactcattgagaaagggaaggaaattctcacagataacaacatccctcatggccagtgtgtcatctgcctctatggtttccaggagaaggaggcctttaccaaaacaccctgttaccactacttccactgccactgccttgctcggtacatccagcacatggagcaagagctgaaggcacaaggacaggagcaggaacaggaacggcagcatgctacaaccaaacagaaggcagtcggtgtgcagtgtccagtgtgcagagagcccctcgtgtatgatcttgcctcactgaaagcagcccctgaaccccaacagcctatggagctgtaccagcccagtgcagagagcttgcgccagcaagaagaacgcaagcggctctaccagaggcagcaggagcgggggggaatcattgaccttgaggctgagcgaaaccgatacttcatcagccttcagcagcctcctgccccggcggaacctgagtcagctgtagatgtctccaaaggatcccaaccacccagcacccttgcagcagaactatccacctcaccagccgtccaatccactttgccacctcctctgcctgtggcgacccagcacatatgtgagaagattccagggaccaggtcaaatcagcaaaggttgggcgaaacccagaaagctatgctagatccccccaagcccagtcgaggtccctggcgacagcccgaacggaggcacccgaagggaggggagtgccacgcccctaaaggtacccgtgacacccaggaactgccacctcctgaggggcccctcaaggagcccatggacctaaagccagaaccccatagccaaggagttgaaggcccccacaagagaaggggcctggcagctggcaggggcccccaccccgcaggactcgggactgtgttcgctgggagcgctctaaaggccggacacccggttcttcctaccctcgcctgcctcggggccagggagcataccggcctggtactcggagggagtccctgggcctggaatctaaggatggttcctagcaggacttggtggggggaacagggaattggggatgggagggaggcaataaagatatttggccttcaaaaaaaaaaaaaaaaaa

SEQ ID NO: 131 - DNA, 870 bp, Homo sapiens
  misc_feature (743)..(743): n equals a,t,g, or c
ggcacgagcagatattaaatctcacagaaaggtgttccttattaatctttacaaaattgtcatttccccggtgaagccaatttacattaaaaataatgttcagaaaatgctgctgcctgctttctctcctcttttacccaccccttgttctcccagcaatcttcgccctgtatgtttatgtggacaatttctattgtaacattctccattccattaactctgcctcttcctctgaggggggaaaataaaaccctaaatggctctaatagttatgtattttattttgtctcagaggtttccaaacttctgcttttagcttccttttcactgggacaaatggatgtaagttattttccagtttcctgaaaaataatcagggactattttcttcatctatctcaggtgcttcatgagtttcctaagatattaattacggtttccatacattcagaatcaagggactcacggatatggtactgtgttcactgctacacagagtttttctagaaaaaaaaattctttatttttatcttctatttgtatccaaacgatggtaaaacaaaattcctctttagctaggtactgggattttttctttaggaaatactaatagagttacaaaggttagcttataggtagacaaaagactggcggccaaacagagcagtgggtgaaatgggtccctgggtgacatgtcagatctttgtacgtaattaaaaatattgtggcaggattaatagcanaaaaaaaaaaaaaaaaaaaaaaaaaaaaaaaaaaaaaaaaaaaaaaaaaaaaaaaaaaaaaaaaaaaaaaaaaaaaaaaaaaaaaaaaaaaaaaaaaaaaaaaaaaaaaaaaaaaaaaaaaaaactc

SEQ ID NO: 132 - DNA, 1835 bp, Homo sapiens
ggcacgagagccgccctgggtgtcagcggctcggctcccgcgcacgctccggccgtcgcgcagcctcggcacctgcaggtccgtgcgtcccgcggctggcgcccctgactccgtcccggccagggagggccatgatttccctcccggggcccctggtgaccaacttgctgcggtttttgttcctggggctgagtgccctcgcgcccccctcgcgggcccagctgcaactgcacttgcccgccaaccggttgcaggcggtggagggaggggaagtggtgcttccagcgtggtacaccttgcacggggaggtgtcttcatcccagccatgggaggtgccctttgtgatgtggttcttcaaacagaaagaaaaggaggatcaggtgttgtcctacatcaatggggtcacaacaagcaaacctggagtatccttggtctactccatgccctcccggaacctgtccctgcggctggagggtctccaggagaaagactctggcccctacagctgctccgtgaatgtgcaagacaaacaaggcaaatctaggggccacagcatcaaaaccttagaactcaatgtactggttcctccagctcctccatcctgccgtctccagggtgtgccccatgtgggggcaaacgtgaccctgagctgccagtctccaaggagtaagcccgctgtccaataccagtgggatcggcagcttccatccttccagactttctttgcaccagcattagatgtcatccgtgggtctttaagcctcaccaacctttcgtcttccatggctggagtctatgtctgcaaggcccacaatgaggtgggcactgcccaatgtaatgtgacgctggaagtgagcacagggcctggagctgcagtggttgctggagctgttgtgggtaccctggttggactggggttgctggctgggctggtcctcttgtaccaccgccggggcaaggccctggaggagccagccaatgatatcaaggaggatgccattgctccccggaccctgccctggcccaagagctcagacacaatctccaagaatgggaccctttcctctgtcacctccgcacgagccctccggccaccccatggccctcccaggcctggtgcattgacccccacgcccagtctctccagccaggccctgccctcaccaagactgcccacgacagatggggcccaccctcaaccaatatcccccatccctggtggggtttcttcctctggcttgagccgcatgggtgctgtgcctgtgatggtgcctgcccagagtcaagctggctctctggtatgatgaccccaccactcattggctaaaggatttggggtctctccttcctataagggtcacctctagcacagaggcctgagtcatgggaaagagtcacactcctgacccttagtactctgcccccacctctctttactgtgggaaaaccatctcagtaagacctaagtgtccaggagacagaaggagaagaggaagtggatctggaattgggaggagcctccacccacccctgactcctccttatgaagccagctgctgaaattagctactcaccaagagtgaggggcagagacttccagtcactgagtctcccaggcccccttgatctgtaccccacccctatctaacaccacccttggctcccactccagctccctgtattgatataacctgtcaggctggcttggttaggttttactggggcagaggatagggaatctcttattaaaactaacatgaaatatgtgttgttttcatttgcaaatttaaataaagatacataatgtttgtatgaaaaaaaaaaaaaaaaaaaaa

SEQ ID NO: 133 - DNA, 407 bp, Homo sapiens
  misc_feature (352)..(352): n equals a,t,g, or c
  misc_feature (376)..(376): n equals a,t,g, or c
  misc_feature (378)..(378): n equals a,t,g, or c
ctttctgggtttagggaagtggtggacaaggcaggagagaaccacattcatcttctcctcttgtgtttgtcttctgtctttcaataacgtccatgaactgtgaggttagtgtcttggctgagagataagtawggctkggcatkgattcttytgtkgtwacctcaagctgttttctagtccccaagaacagcaytytcagtgggtgtggaagtgggcgggacatgaagcaatggttttacattgcattgcctggctacagsttggcatttctttcctttttctttttctttgcgtcattgccattggtgccactaattttgcttcccctytcttttataaacttgtttcctcnggagttgcctaagagtcctgcatnanaacctaattgggaatgaagcagtgtgttc

SEQ ID NO: 134 - DNA, 711 bp, Homo sapiens
ggcacgagcgaagaccctgttcggaccctgccccgattccagactcaggtagatcgtcggcataccctctaccgtggacaccaggcagccctggggctgatggagagagatcaggtatcccccagggagtaggggctaccttgaggggatgatagacctcccccactcccagtgkkactctggaaatatgaaggaactagggagtggaagagatttcagagctggggagaggagttcctcccttcaaagccagcaactgcctttggggaatgtcggggggtctctcctttctcctgcttgtgtkargtggtacacagtccccccttcacctggcgggaagctgtcccggacagactcatctcagctttcccttggggcaggatcgggggcagcagctccagcagaaacagcaggatctggagcaggaaggcctcgaggccacacaggggctgctggccggcgagtgggccccacccctctggragctgggcagcctcttccaggccttcgtgaagagggagagccaggcttatgcgtaagcttcatagcttctgctggcctggggtggacccaggacccctggggcctgggtgccctgagtggtggtaaagtggagcaatcccttcacgctccttggccatgttctgagcggccagcttggcctttgccttaataaatgtgctttattttcaaaaaaaaaaaaaaaaaact

SEQ ID NO: 135 - DNA, 890 bp, Homo sapiens
  misc_feature (818)..(819): n equals a,t,g, or c
  misc_feature (829)..(829): n equals a,t,g, or c
  misc_feature (859)..(859): n equals a,t,g, or c
  misc_feature (887)..(887): n equals a,t,g, or c
cttgtaaatgtttcttttcccttaaatacagataattcatttgtattgcttattttattatgagctacaacaaaaggacttcaggaacaagtaatgtattagtatggttcaagattgttgataggaactgtctcaaaaggatggtggttattttaaatataaatagctaatgggggtggtaggcctataaaattaaatgccttgtataaaatccaaaatgaatgcaaaattgttttcacttgtattgactttatgttgtatgattccaatctctgttctgtttggcacttgtatttaattcttcacctttgtaagacatttgtatattgtggatgtgttcattcaagctatttaatatctggcactgttaatacacagtactttattgtacagactgttttactgttttaattgtagttctgtgtactttttttggatggggctggcatgttttctttgtttcctggcaatacgacgtgggaatttcaatgcgttttgttgtagatgctaacgtgtcagaatcctttacattcaacttttctaagaaaagcattttcagtcttgtagtgtgtgcttacagtaactaattttgttgaaaatggtttcaagttattcaaatttgtacaggactgtaaagatttgttgacagcaaaatgttgaagaaaaaagcttatagaataaaagctataaagtatatattaggatctgcaaacaatgaagaattatgtaatatattgtacaaatgtaagcaaaggctctgaaataaaatgccatagtttgtgaaaaaaaaaaaaaaaaaaactcgagggggggcccgnnacccaatcgnccaaaagtgagtcgtattacaattcactgngccgtcgtttacaacgtcgtgactgggnaaa

SEQ ID NO: 136 - DNA, 1161 bp, Homo sapiens
ggggaaacggagctctgggtgtgatatttcctctgcattttcctgtcggggtggtgaaataactggtttgaacccagtccactggactcgaaagctcatgctcagaagccccagggctccctctaactttcttggttgctgcaactcagagagcgctggaatggacccagggcatgctcctcatctcagcggttcaggttttcattcttctatctccatccttctatttaattctgtacttactaagacctgggggtacagggaggggcttggagcctatttgcccagctgctgaatggggaggttggagagatggatacttatggctccagtaccaggagccaactgtttcccttgacaactggggaaactgaggcccacagagccaaggccacttgcccgtggttacctaaagatgttaacgagaaatccgggtctggaactcagatccctttgtatcctgtttcggtgttggtgtagtttgttgctttccctaagatgagcccagatagggaaactgaagtgcctgggstcctggttgggtcttctgcggggagagaatggcgattcaactcccgtgtactgttgaacttgacacaaacacgctcacatcccaggctgcatacgtgttttgctttagaaatgacatgaagccttttgactatttttaagagaaaggcaatggctgtgatatttcccctgcacctccctctcggggccacttggttaaatgtcaggaaagggagagtatttcctggtcaggaacattcagagcttgctgggagctgaagttttgttttccattaagtaggtattcggggagtctatttccctctgcctcctctgtttccctggaarcttgcgcttgacagttgcagggaggaggggtttgagaatgagcagccgagatgcccacgtatcgcgtgcccgctctaggagtggcggggtggctatttttagccatcctgattcagtagaggcatttcagcgtttgttcaatatttaattatccatctgaaattggcccatgtggccttcagtttggaagcagctctctgtgctgtgatttcccagttgcataaataaggaagtcaagggaatctcaatagccctccaaataataataacgaaaaaaaaaaaaaaaaaactcgacggcacgta

SEQ ID NO: 137 - DNA, 2152 bp, Homo sapiens
ccgctttgttctccagatgtgaatagctccactataccagcctcgtcttccttccgggggacaacgtgggtcagggcacagagagatatttaatgtcaccctcttggggctttcatgggactccctctgccacattttttggaggttgggaaagttgctagaggcttcagaactccagcctaatggatcccaaactcgggagaatggctgcgtccctgctggctgtgctgctgctgctgctgctggagcgcggcatgttctcctcaccctccccgcccccggcgctgttagagaaagtcttccagtacattgacctccatcaggatgaatttgtgcagacgctgaaggagtgggtggccatcgagagcgactctgtccagcctgtgcctcgcttcagacaagagctcttcagaatgatggccgtggctgcggacacgctgcagcgcctgggggcccgtgtggcctcggtggacatgggtcctcagcagctgcccgatggtcagagtcttccaatacctcccgtcatcctggccgaactggggagcgatcccacgaaaggcaccgtgtgcttctacggccacttggacgtgcagcctgctgaccggggcgatgggtggctcacggacccctatgtgctgacggaggtagacgggaaactttatggacgaggagcgaccgacaacaaaggccctgtcttggcttggatcaatgctgtgagcgccttcagagccctggagcaagatcttcctgtgaatatcaaattcatcattgaggggatggaagaggctggctctgttgccctggaggaacttgtggaaaaagaaaaggaccgattcttctctggtgtggactacattgtaatttcagataacctgtggatcagccaaaggaagccagcaatcacttatggaacccgggggaacagctacttcatggtggaggtgaaatgcagagaccaggattttcactcaggaacctttggtggcatccttcatgaaccaatggctgatctggttgctcttctcggtagcctggtagactcgtctggtcatatcctggtccctggaatctatgatgaagtggttcctcttacagaagaggaaataaatacatacaaagccatccatctagacctagaagaataccggaatagcagccgggttgagaaatttctgttcgatactaaggaggagattctaatgcacctctggaggtacccatctctttctattcatgggatcgagggcgcgtttgatgagcctggaactaaaacagtcatacctggccgagttataggaaaattttcaatccgtctagtccctcacatgaatgtgtctgcggtggaaaaacaggtgacacgacatcttgaagatgtgttctccaaaagaaatagttccaacaagatggttgtttccatgactctaggactacacccgtggattgcaaatattgatgacacccagtatctcgcagcaaaaagagcgatcagaacagtgtttggaacagaaccagatatgatccgggatggatccaccattccaattgccaaaatgttccaggagatcgtccacaagagcgtggtgctaattccgctgggagctgttgatgatggagaacattcgcagaatgagaaaatcaacaggtggaactacatagagggaaccaaattatttgctgcctttttcttagagatggcccagctccattaatcacaagaaccttctagtctgatctgatccactgacagattcacctcccccacatccctagacagggatggaatgtaaatatccagagaatttgggtctagtatagtacattttcccttccatttaaaatgtcttgggatatctggatcagtaataaaatatttcaaaggcacagatgttggaaatggtttaaggtcccccactgcacaccttcctcaagtcatagctgcttgcagcaacttgatttccccaagtcctgtgcaatagccccaggattggattccttccaaccttttagcatatctccaaccttgcaatttgattggcataatcactccggtttgctttctaggtcctcaagtgctcgtgacacataatcattccatccaatgatcgcctttgctttaccaytctttccttttatcttattaataaaaatgttg

SEQ ID NO: 138 - DNA, 1002 bp, Homo sapiens
ggcacgagcccagcggaagccaagccaccaggccccccagcgtccacgcggagcatgaacattgaggatggcgcgtgcccgcggctccccgtgccccccgctgccgcccggtaggatgtcctggccccacggggcattgctcttcctctggctcttctccccacccctgggggccggtggaggtggagtggccgtgacgtctgccgccggagggggctccccgccggccacctcctgccccgtggcctgctcctgcagcaaccaggccagccgggtgatctgcacacggagagacctggccgaggtcccagccagcatcccggtcaacacgcggtacctgaacctgcaagagaacggcatccaggtgatccggacggacacgttcaagcacctgcggcacctggagattctgcagctgagcaagaacctggtgcgcaagatcgaggtgggcgccttcaacgggctgcccagcctcaacacgctggagctttttgacaaccggctgaccacggtgcccacgcaggccttcgagtacctgtccaagctgcgggagctctggctgcggaacaaccccatcgagagcatcccctcctacgccttcaaccgcgtgccctcgctgcggcgcctggacctgggcgagctcaagcggctggaatacatctcggaggcggccttcgaggggctggtcaacctgcgctacctcaacctgggcatgtgcaacctcaaggacatccccaacctgacggccctggtgcgcctggaggagctggagctgtcgggcaaccggctggacctgatccgcccgggctccttccagggtctcaccagcctgcgcaagctgtggctcatgcacgcccaggtagccaccatcgagcgcaacgccttcgacgacctcaagtcgctggaggagctcaacctgtcccacaacaacctgatgtcgctgccccacgacctcttcacgcccctgcaccgcctcgagggggggcccggtacccaattcgc

SEQ ID NO: 139 - DNA, 1113 bp, Homo sapiens
  misc_feature (349)..(349): n equals a,t,g, or c
gttggtgttgagcacagctttaggcttagattcttcatcaactaggagaagctgtgcttcaatacagttattcgtttgcatggttcctaatgtgcttcactcaatttagcagaattttttttttaacctcttccttgacgctagctgcttgtgcaaatcacatcttggccgcctactcttcttcacttgctgacagatgtgtaggtgagaaaagtctcatagtcattgttcctgaaagaagcttccagacccacttctagggccagtgacatatgcaggaaatcagctgcttctgggccaggacagagctggtcttttttttagtgggggatggcgggcagtggggcangggacattcaaaatttattttccaacagacagatagcatcagcaggtacaactacaagggtatctacatagatcatacattcacaaggcattattagttcaacagtgagaaagccactcgtgggttttctgtaacaatatcccacttcatagtgtaaacaggtactattttgttcacttacaattccggaaggaagggcacaccttgcaggggggaagaaaaggggaatcctaaagtaaggtgcaacaattaagagacaacactttggctaacaatcttggatccacatttcagtcagggccttccacatagaggggaaagacttttctctcagaagttagaatctttcttcctcctttcttgttaaactgagagcagtgttttgtttgctcaatattacatgtacaaaaggagattagaagaaaatgcatcacaaaaccatcttgaacgttcagctcttcctgccaatacatcacaactcttaggttttagacggggcctgggaatacgtaagtgttttttcttttttttttttttaagtgaaagcaagtttattacgaaagcaaagggataaaagaatggctgctccataggcagagagcagcccagtaatcttaaaataggaaaatagacactatggctacaaaaaataaaaaataaatgaggtagataaaattttcacacccaggacttgcctgttccaacttcatagtcttcatgaaatattcatcaagaagacaaaaaaaaaaaaaaaaaacctcgta

SEQ ID NO: 140 - DNA, 1668 bp, Homo sapiens
aatttcgaacacccataaaattgtaaagaattgtacagtacattttaacatattkgcttgttacaayctatacatttwawgttttttaaccacttcaaagtaagtttcagacaccaacacattttttaaatgatccctaccattttttaaatgatccctaccaaaatggaaggctggtatcccaaggttttgttccatttctcaattctagtctgtgaaattgargtctgatgaccactcttaagrgggctgttcattagggkgcgggctgggcattatgagtgtgtttttcatgagkcagtggaaggaggggcttgttgtgagcagtgcatgagaaaaacggcttggctttgcttctttttccagctctgtggccttggtcaggttacgtctcttcagtatcgtaactgtaatgtggagataaagccttcattagttaggggcacacaccgcagtattccttaagtcatcttgatgacaagtgaatgcaaggcagctggtacctttcaggtagtagttgaattcaggtagtattgttcagtttttttttttcccttcatgttctaagaccagctgagaggcaaagttgtaccactgagctctagttgttgttacctaaaaagsccttgttttaaatttctgtgatacctaagaatttcaaatctgggttgtcatggattctttattctttttttctcccttaaaaagttacattttagatgaaatcccctttyttaaaatgggcaaagcaataattctacatcatttctccccttcccttccacttgtttagactaagatatgttagagagggaaagggtcgttgttttagtaaatactattgctgttgacatgttaatactattgctgttgacatgtttactgatgggctgtgttccataattttgttttaggtcttttgtttgaaacagtttactgtttttatcagttttggtccctaatttttcctaacctacagtttttctctgagtacatatggtttcattgtttgatctactttctatctatctgaatatgaacttctaggatcatgtttattctagtagatgatgacttaaagcctgcagtataggagggacaacgtcaactactgcatgtgcaataacaagcttgaagggaagctaaatgtttgttacaaatttaagacagtattttaatgccgtttgcatttttctaagaattttctataaagctaattctgktattttttgtctctaaattagggaactgtccaggtttattgctgccgggagactacactgcaaaatagataaagtgaatgaaatagtagaaaccaacaggtactctcatttctcagaataagggggcattcctaaattttaaaagtaggkcaactattgkcatggaataatgtgactggtaaataattcattttttcttgaatttatttatagacctgatagcaagaactggcagtaccaagaaactatcaagaaaggagatctgctactaaacagagttcaaaaactttccagagtaattaatatgtaaagccatgtaactaacaaaggatttgctttagagataattatttggaatttttatagcttacttcacaatgtgcccaggtcagctgtataaaataaatactgcattgttgttaaaaaaaaaaaaaaaaaactcgta

SEQ ID NO: 141 - DNA, 1555 bp, Homo sapiens
  misc_feature (1248)..(1248): n equals a,t,g, or c
  misc_feature (1389)..(1389): n equals a,t,g, or c
  misc_feature (1391)..(1391): n equals a,t,g, or c
  misc_feature (1393)..(1393): n equals a,t,g, or c
  misc_feature (1396)..(1396): n equals a,t,g, or c
  misc_feature (1551)..(1551): n equals a,t,g, or c
ggcacgagctgggcagatgcaaaatctggagagcgcgagggccgggcggtcagtcagcacccagactggcagcatgaccggtcagataccaaggctttctaaagtcaaccttttcactctgctcagcctctggatggagctctttccagcagaagcccagcggcaaaaatctcagaaaaatgaagagggaaagcatggacccttaggagataatgaagagaggaccagagtatctactgacaaaagacaggattactgggagcagctaagatgcctaratgaaaggtttaccatcactgctggttaggaaatggattatgagaactcgaacagagggaaggtgaaatgcaaccggaggaaacactctgatatgaggtttgaggccttcaaaattgctttgcagcataagccacagtgagtcaggagtaccagggagtggatagaatgtttatttgtttaactgagactttttagttcatcaattattttgaagggtagaacactctgtgggctctctttctatttccttctgggtacaatcacaaaaaaaaaatctctcctagctgaaattacatgcagtactagcaaagggtctctttgttataaactgttcattaattgacgaacatttgtgtacttaactatgtataaggcatctcatcgttcaatttcaaatacaaattaaaatattttttcacatttgttatcctgttatgttttctcttttacaaattgtctgttcgtatctttttgtctctctttaggccttattcttgtcaattcatatgtgctctaatgaattgaaatattttctgtatattaaacattactaacctttcctctgtcacactgattgaaaaatgatctatttagtttgttgttttgtctttaattttgtaagctttaaaaagttaatattgcccttcagacaccatcccaacatcacataagaattttttcatgttataaattctttgtggacatatttgataactgttttattatgaggaggaccataattaattcaaccattcccctattttggtcatttaggtttttgggtttgggttttttgtttgtttaacgtctttgcttgctattttaaagaatgctgcactaaatgtgaatgcttgagatttcttctctgtatttagaatattttcctagaatggattctcagaagaattctcagtctgtggagaggaacatttttaatgcatggaagagctggagtgaaccgaatttcanactgccctgctgatccagaaataagtttgcttacggaggcttctagttctgaagatgcaaagttagatgccaaagcagtggaaagattgaagtcaaacagtcgggcccatgtgtgtgtcttacttcaacctttggtgtgtnananggngcagtttgtagaggagacctcttacaaatgtgactttattcaaaaaattacaaaaacattgccggatgctaacactgacttttattatgaatgtaaacaagaaagaataaaagaatatgaaatgttaaaaaaaaaaaaaaaaaaaaaaaaaaaanaaaa

SEQ ID NO: 142 - DNA, 575 bp, Homo sapiens
ggcacgagtgcaggaattcgtgtgccggatttggttagctgagcccaccgagaggcgcctgcaggatgaaagctctctgtctcctcctcctccctgtcctggggctgttggtgtctagcaagaccctgtgctccatggaagaagccatcaatgagaggatccaggaggtcgccggctccctaatatttagggcaataagcagcattggcctggagtgccagagcgtcacctccaggggggacctggctacttgcccccgaggcttcgccgtcaccggctgcacttgtggctccgcctgtggctcgtgggatgtgcgcgccgagaccacatgtcactgccagtgcgcgggcatggactggaccggagcgcgctgctgtcgtgtgcagccctgaggtcgcgcgcagcgcgtgcacagcgcgggcggaggcggctccaggtccggaggggttgcgggggagctggaaataaacctggagatgatgatgatgatgatgatggaaaaaaaaaaaaaaaaaaaaaaaaaaaaaaaaaaaaaaaaaaaaaaaaaaaaaaaaaaaaaaaaaaaaaaaaaaaaa

SEQ ID NO: 143 - DNA, 1532 bp, Homo sapiens
  misc_feature (1412)..(1412): n equals a,t,g, or c
  misc_feature (1433)..(1433): n equals a,t,g, or c
  misc_feature (1446)..(1446): n equals a,t,g, or c
  misc_feature (1505)..(1505): n equals a,t,g, or c
gctggagcggtttcattgcctacattccgcattggaaaatagaagcaggcacaatgaagggaaaaggccgaggcatcagcgtgtgaagaccgcaaagacgatcccgagtacagttgtgaacagcattgctgctaggctcctcctgcagatcatctgaaatgaacctctcttattgatttttattggcctagagccaggagtactgcattcagttgactttcagggtaaaaagaaaacagtcctggttgttgtcatcataaacatatggaccagtgtgatggtgaaatgagatgaggctccgcaatggaactgtagccactgctttagcatttatcacttccttccttactttgtcttggtatactacatggcaaaatgggaaaggtaaggaaaatgactcggaaaatgtgcatgaaatgtactagggtttttgcttggttaaggtgcctaaatgcttaggtcaaataccctggcaatctgcatgttacatgctatctgctggcagtttctttctgatataaaaatgaaacagtattcttggacagaggacacagaatttctaattccagtggggcttgttttgctttcagtttcttataattgtacttggagaaacagatactgatcagtgttttatattctaaaagacagccaagttgaataataaagactttcgttttggcattttgttctttttactaaacataattaagtgtttaataagcttccttgtaccgagtgttgcataaaacacttaaaaggacacaattagtgccttcgtgagatttacatgctaattatgctaaygattgggtgctatgtagttaatgatttaaactgcatgcattgacagattactccttaggcaaaagtatttaagaagggataagtagaaattctgattggaatattaaaacattttttaaaaattaattatgkttagactgktgaaccgkgttatataattttaggataawggattwatttgctttttttttttttaagagaaactacttgaagtaaattcctacccatacttcttacttgtctcctttcctttgattaatctaaggaatgktgatgatgagaagaaagatggaaatgttgaggtggttgcatatttggtttgttagaatatctgtcatcacctgggctwtttgaagctgctgttgctgatgttgttttattgactcatgaagacaactgaaaagattgctttgtaaccttatttttttctgatgtgtgtttacatccatgtctatatatacatattgcatatgtatatatctgtatgtgcatgtatatgttaaaaatctgatataagtgaaaacatgctctgtgctttgaaacaaaaaaaaaaaaaaaaaactcgagggggggcccggtacccaattcgccctatagtgagtcgnattacaattcactggccgcgntttacaacgtcgngactgggaaaaccctggcgttacccaacttaatcgccttgcagcacatccccctttcgncagctggcgtaatagcgaagaggcccg

SEQ ID NO: 144 - DNA, 1559 bp, Homo sapiens
  misc_feature (1445)..(1445): n equals a,t,g, or c
  misc_feature (1551)..(1551): n equals a,t,g, or c
atccagcagtggggagacagcgtgctgggcaggcgctgccgagaccttctcctgcagctctacctacagcggccggagctgcgggtgcccgtgcctgaggtcctactgcacagcgaaggggctgccagcagcagcgtctgcaagctggacggactcatccaccgcttcatcacgctccttgcggacaccagcgactcccgggcgttggagaaccgaggggcggatgccagcatggcctgccggaagctggcggtggcgcacccgctgctgctgctcaggcacctgcccatgatcgcggcgctcctgcacggccgcacccacctcaacttccaggagttccggcagcagaaccacctgagctgcttcctgcacgtgctgggcctgctggagctgctgcagccgcacgtgttccgcagcgagcaccagggggcgctgtgggactgccttctgtccttcatccgcctgctgctgaattacaggaagtcctcccgccatctggctgccttcatcaacaagtttgtgcagttcatccataagtacattacctacaatgccccagcagccatctccttcctgcagaagcacgccgacccgctccacgacctgtccttcgacaacagtgacctggtgatgctgaaatccctccttgcagggctcagcctgcccagcagggacgacaggaccgaccgaggcctggacgaagagggcgaggaggagagctcagccggctccttgcccctggtcagcgtctccctgttcacccctctgaccgcggccgagatggccccctacatgaaacggctttcccggggccaaacggtggaggatctgctggaggttctgagtgacatagacgagatgtcccggcggagacccgagatcctgagcttcttctcgaccaacctgcagcggctgatgagctcggccgaggagtgttgccgcaacctcgccttcagcctggccctgcgctccatgcagaacagccccagcattgcagccgctttcctgcccacgttcatgtactgcctgggcagccaggactttgaggtggtgcagacggccctccggaacctgcctgagtacgctctcctgtgccaagagcacgcggctgtgctgctccaccgggccttcctggtgggcatgtacggccagatggaccccagcgcgcagatctccgaggccctgaggatcctgcatatggaggccgtgatgtgagcctgtggcagccgacccccctccaagccccggcccgtcccgtccccggggatcctcgaggcaaagcccaggaagcgtgggcgttgctggtctgtccgaggaggtgagggcgccgagccctgaggccaggcaggcccaggagcaatactccgagccctggggtggctccgggccggccgctggcatcaggggccgtccagcaagccctcattcaccttctgggccacagncctgcgcggagcggcggatccccccgggcatggcctgggctggttttgaatgaaacgacctgaactgtcaaaaaaaaaaaaaaaaaaacccgrgggggggcccggnacccaatt

SEQ ID NO: 145 - DNA, 1021 bp, Homo sapiens
gtaattccttaaacataccatctgtcacagttaatctagatttgtaaataggtagtaatttatagaatttttaaagcgtaaaatccggtaatattaaaagataggtaaacctaggcctggaaagctgttatttggctaaaattgcacaggaggccatgaacagaggcaagtgccccagagactccactttcattcctaactgttctcaaattaatgctcatgattgagtattctcagtgcaactcgtagagtttgataagtaaaagttacatgcccctgttttcctagcatgatattcactgttatcaaagacaagaggcagaccattcattcattctcaaaacactgaatgccattctgtgcctagtgctatacaaggcatgggagattcagtgtgaataagtctttgctctccacctaacaagggacagttttaattatagattgtcttcctattaagtatgagttttagtaggcattaaaaatcgtaattagtttgataatatgagacccaaccctaacttgccagaagagtaatcagttcatgaaccattgatatttcctgtatatttcatgaatgtgacttcagtcattctagtgttaatactgtggaatgtcattggtgtagcaacgtgggttcaccaaaacacctttttatacaaaagacagatgygtgaattaaagagattaaaggatagagtattctgtttctttgttttgatttggcttttaggtattaaaataaggcccagatcactaaaaattagtaacagagggagacctctaatagatttaaagtcagttaattctctctgaaatttgatgttttcttctataaagaataactctaaaataggcatcttcccaggactttccattctcaggaaaagacctagttacgtataaaaaataacttctactgctttatgtagtcatataggtctgcctaaaataagaatttgtatttaataaataccaaaattttcaaatggtaaaaaaaaaaaaaaaaaaaagggggggc

SEQ ID NO: 146 - DNA, 1024 bp, Homo sapiens
  misc_feature (5)..(5): n equals a,t,g, or c
  misc_feature (14)..(14): n equals a,t,g, or c
  misc_feature (32)..(32): n equals a,t,g, or c
  misc_feature (713)..(713): n equals a,t,g, or c
gtggntcccccggntggccaggattcggcacngggcgctggccgccttccagctgctcaacctgactgggcaacgtggggctcttcctgcgctcggatcccagcatccgtggcgtgatgctggccggccgcggtctgggccagggctgggcttactgctaccaatgccaaagccaggtgccgccacgcagcggacactgctctgcctgccgcgtctgcatcctgcgtcgggaccaccactgccgmctgctgggccgctgcgtgggcttcggcaactaccggcccttcctgtgcctgctgcttcatgccgccggcgtcctgctccacgtctctgtgctgctgggccctgcactgtcggccctgctgcgagcccacacgcccctccacatggctgccctcctcctgcttccctggctcatgttgctcacaggcagagtgtctctggcacagtttgccttggccttcgtgacggacacgtgcgtggcgggtgcgctgctgtgcggggctkggctgctcttccatgggatgctgctgctgcggggccagaccacatgggagtgggctcggggccagcactcctatgacctgggtccctgccacaacctgcaggcagccctggggccccgctgggccctcgtctggctctggcccttcctggcctccccattgcctggggatgggatcaccttccagaccacagcagatgtgggacanacagcctcctgactccaggaagagccagagctgtgcagggaggaaggggtgagaggggggcccccacacctagactcagtaaggaagtcgggttggaccttaacatctgcattggacaactccaccccttccttggccttgcccctgcccgcctacactcctacgtgtccagggcttgggccgtgacttaggcagaggagtgcagaggagggtctggcaggggctgctcaggccgcctagctgcccctttgccaggttaataaagcactgacttgttaaaaaaaaaaaaaaaaaaaaaaagggcggccgct

SEQ ID NO: 147 - DNA, 1231 bp, Homo sapiens
ggcacgagtgaatgtcgaggagttccaggatctctggcctcagttgtccttggttattgatgggggacaaattggggatggccagagccccgagtgtcgccttggctcaactgtggttgatttgtctgtgcccggaaagtttggcatcattcgtccaggctgtgccctggaaagtactacagccatcctccaacagaagtacggactgctcccctcacatgcgtcctacctgtgaaactctgggaagcaggaaggcccaagacctggtgctggatactatgtgtctgtccactgacgactgtcaaggcctcatttgcagaggccaccggagctagggcactagcctgacttttaaggcagtgtgtctttctgagcactgtagaccaagcccttggagctgctggtttagccttgcacctggggaaaggatgtatttatttgtattttcatatatcagccaaaagctgaatggaaaagttaagaacattcctaggtggccttattctaataagtttcttctgtctgttttgtttttcaattgaaaagtaattaaataacagattagaatctagtgagagcctcctctctggtgggtggtggcatttaaggtcaaaccagccagaagtgctggtgctgtttaaaaagtctcaggtggctgcgtgtggtggctcatgcctgtaatcccaacattctgggaggcccaggcgggagaactgcttgagccccaggagttcagaatcagcctgggcaacatagcaatactccgtctcataaaaattaataaataaaaagtctcaggtgaccaaaggctcctgaagctagaaccaggtttggataaagattgaagagccacaggccactcttccctctgagccattgggcctagtggtgtcatgtattgtaattgctcgcagggagagcagtctttttggtgtaatagtgggatgtctgcttagttggcaggggttcagtccaaatggaagaatattgggaaataaacctccactatcctttatagccagggacttttttcctatttattcataaaataaattatagttaattatacccataacacctttatttaaatccagtgttctccgcagccttttgtctatttatatgtgtaccaagtgttaaacataattattattgggcatttgaactttgtttttctttaaagaaatgctgctattaaacatatttgtaaatggaaaaaaaaaaaaaaaaa

SEQ ID NO: 148 - DNA, 1223 bp, Homo sapiens
  misc_feature (1204)..(1204): n equals a,t,g, or c
  misc_feature (1206)..(1206): n equals a,t,g, or c
gcttagctcgaaattaaccctcactaaagggaacaaaagctggagctccaccgcggtggcggccgctctagaactagtggatcccccgggctgywkgaattcggcacgagctgctgtctgtgcttcgggatcctgccctccagaagtcctccaaggcttggtacttgctgcgtgtccaggtcctgcagctggtggcagcttaccttagcctcccgtcaaacaacctctcacactccctgtgggagcagctctgtgcccaaggctggcagacacctgagatagctctcatagactcccataagctcctccgaagcatcatcctcctgctgatgggcagtgacattctctcaactcagaaagcagctgtggagacatcgtttttggactatggtgaaaatctggtacaaaaatggcaggttctttcagaggtgctgagctgctcagagaagctggtctgccacctgggccgcctgggtagtgtgagtgaagccaaggccttttgcttggaggccctaaaacttacaacaaagctgcagataccacgccagtgtgccctgttcctggtgctgaagggcgagctggagctggcccgcaatgacattgatctctgtcagtcggacctgcagcaggttctgttcttgcttgagtcttgcacagagtttggtggggtgactcagcacctggactctgtgaagaaggtccacctgcagaaggggaagcagcaggcccaggtcccctgtcctccacagctcccagaggaggagctcttcctaagaggccctgctctagagctggtgccactgtggccaaggagcctggccccatagcaccttctacaaactcctccccagtcttgaaaaccaagccccagcccatacccaacttcctgtcccattcacccacctgtgactgctcgctctgcgccagccctgtcctcacagcagtctgtctgcgctgggtattggtcacggcaggggtgaggctggccatgggccaccaagcccagggtctggatctgctgcaggtcgtgctgaagggctgtcctgaagccgctgagcgcctcacccaagctctccaagcttccctgaatcataaaacacccccctccttggttccaagcctcttggatgagatttggctaagcatacacactgttgcactggagggcctgaaccagccatcaaacgagagcctgcagaaggtncncagtaaggctgaagttt

SEQ ID NO: 149 - DNA, 1238 bp, Homo sapiens
ccctcacatcagggaaaatgaccttcactgctgttaacagtaatgkgtccctttcattttctggatcaagccttctcagcggtgggtctggatgtgggtaaactaaggtaaaggggatgatattccacaaactaattatgcacacagaaaatctgtggagcctatcagaccccaagtgtcttgaaatgtttgtagaaacccactaaaatgccccttctctgggtgtgggcccttattgcagctgtctcacagcctgagctgtggtacagagaaatgggggttctccttttattttcattttttttccccaatggcagcttttctcccgttgttttaccttcctatttcccaaacagttcctcttattttgtcttttgcaccagtttctggaggcccttgtcatttcaaaaaggatagtctcttttcttactctggcaaacctgtgagtgattccacaaagatacagtattacttagctawctgaattatgatagaaaaggtcctagttaggttcctatataaagcatttggaagatgaccttgttgcccttgaaacttgaaaatagggattctggggtgaggatacaaagacattgtcttgcatatccataagcaggtcttagagcattattccaaactctagctgtttcagtagttctatgaggattgcaagtcataggtgtgtgtggcatatcagtccatctccctcatctccattctcagtttcttccccacaaaatttggaatcaaagcttttatgacgtttgccaattgcagaacttcttcagctaaggttaatttgacgctatgataaaactgagagatgtcaaaaagcctcttagaaattttaatcttgaaagacttttcagggtatctcattttttaggtgggggtggcaggtgtatttcttttttaacaaataaaaggcatttaagtaaaactaaaatgaaaaaagtaggccttctgacattgtgtacttggtggttctgtccctctgcctgtaacaaatctcatttttgttaccaagaactgtatgaaagaagtaaatccaccccgattctgtatgattaattccatctgtgtttgtcatttctgactggaaaacttcttactccataccttgttcgatatggaggacaaataattggattgtctgataagtctgccaataaactatccagaaatagcaagtgtaaaaaaaaaaaaaaaaaaaaaaaaaaaaaaaaaaaagggcggcc

SEQ ID NO: 150 - DNA, 1189 bp, Homo sapiens
gcgtccgctgggctggaacagcacagaacccacagggctgccgtccacactctcccggtcagagtcctgggaccacatggggacgctgccatggcttcttgccttcttcattctgggtctccaggcttgggatactcccaccatcgtctcccgcaaggagtggggggcaagaccgctcgcctgcagggccctgctgaccctgcctgtggcctacatcatcacagaccagctcccagggatgcagtgccagcagcagagcgtttgcagccagatgctgcgggggttgcagtcccattccgtctacaccataggctggtgcgacgtggcgtacaacttcctggttggggatgatggcagggtgtatgaaggtgttggctggaacatccaaggcttgcacacccagggctacaacaacatttccctgggcatcgccttctttggcaataagataagcagcagtcccagccctgctgccttatcagctgcagagggtctgatctcctatgccatccagaagggtcacctgtcgcccaggtatattcagccacttcttctgaaagaagagacctgcctggaccctcaacatccagtgatgcccaggaaggtttgccccaacatcatcaaacgatctgcttgggaagccagagagacacactgccctaaaatgaacctcccagccaaatatgtcatcatcatccacaccgctggcacaagctgcactgtatccacagactgccagactgtcgtccgaaacatacagtcctttcacatggacacacggaacttttgtgacattggatatcaataaggccaggcgtggcggcgattacgtctgtaatcccaggactttgggaggccaaggcgggcagatcacttcaggccaggaattcaagagcagcctggccaatatggcgaaactctgtctctactgaaaacaaacaaacaaacaaacaaacaaacaaagaaacaacaaaaattagccgggtgtggtggcacacgcctgtagtcccagctactcaggaggctgaggcataagaattgcttgaaccctggaggcggaggttgcagtgagctgagattgggccaccgcactccagtctgggagacagagtgagactgtctcaaaacaacaacaaaaaaatccctaacataatctcaaaaaaaaaaaaaaaaaaaaaaaaaaaaaaaa

SEQ ID NO: 151 - DNA, 496 bp, Homo sapiens
tcgacccacgcgtccgaactgacacaatgaaactgtcaggcatgtttctgctcctctctctggctcttttctgctttttaacaggtgtcttcagtcagggaggacaggttgactgtggtgagttccaggacaccaaggtctactgcactcgggaatctaacccacactgtggctctgatggccagacatatggcaataaatgtgccttctgtaaggccatagtgaaaagtggtggaaagattagcctaaagcatcctggaaaatgctgagttaaagccaatgtttcttggtgacttgccagcttttgcagccttcttttctcacttctgcttatacttttgctggtggattcctttaattcataaagacatacctactctgcctgggtcttgaggagttcaatgtatgtctatttctcttgattcacttgtcaataaagtacattctgcaaaagcaaaaaaaaaaaaaaaaaaaaaaaaaaaaaaaaaaaaaaaaa

SEQ ID NO: 152 - DNA, 3153 bp, Homo sapiens
  misc_feature (1)..(1): n equals a,t,g, or c
  misc_feature (2584)..(2584): n equals a,t,g, or c
  misc_feature (2590)..(2590): n equals a,t,g, or c
  misc_feature (3153)..(3153): n equals a,t,g, or c
nggccgtgggtgtacgcggcgcagcgcggcagtcctgatggcccggcatgggttaccgctgctgcccctgctgtcgctcctggtcggcgcgtggctcaagctaggaaatggacaggctactagcatggtccaactgcagggtgggagattcctgatgggaacaaattctccagacagcagagatggtgaagggcctgtgcgggaggcgacagtgaaaccctttgccatcgacatatttcctgtcaccaacaaagatttcagggattttgtcagggagaaaaagtatcggacagaagctgagatgtttggatggagctttgtctttgaggactttgtctctgatgagctgagaaacaaagccacccagccaatgaagtctgtactctggtggcttccagtggaaaaggcattttggaggcagcctgcaggtcctggctctggcatccgagagagactggagcacccagtgttacacgtgagctggaatgacgcccgtgcctactgtgcttggcggggaaaacgactgcccacggaggaagagtgggagtttgccgcccgagggggcttgaagggtcaagtttacccatgggggaactggttccagccaaaccgcaccaacctgtggcagggaaagttccccaagggagacaaagctgaggatggcttccatggagtctccccagtgaatgctttccccgcccagaacaactacgggctctatgacctcctggggaacgtgtgggagtggacagcatcaccgtaccaggctgctgagcaggacatgcgcgtcctccggggggcatcctggatcgacacagctgatggctctgccaatcaccgggcccgggtcaccaccaggatgggcaacactccagattcagcctcagacaacctcggtttccgctgtgctgcagacgcaggccggccgccaggggagctgtaagcagccgggtggtgacaaggagaaaagccttctagggtcactgtcattccctggccatgttgcaaacagcgcaattccaagctcgagagcttcagcctcaggaaagaacttccccttccctgtctcccatccctctgtggcaggcgcctctcaccagggcaggagaggactcagcctcctgtgttttggagaaggggcccaatgtgtgttgacgatggctgggggccaggtgtttctgttagaggccaagtattattgacacaggattgcaaacacacaaacaattggaacagagcactctgaaaggccattttttaagcattttaaaatctattctctccccctttctccctggatgattcaggaagctgacattgtttcctcaaggcagaattttcctggttctgttttctcagccagttgctgtggaaggagaatgctttctttgtggcctcatctgtggtttcgtgtccctctgaaggaaactagtttccactgtgtaacaggcagacatgtaactatttaaagcacagttcagtcctaaaagggtctgggagaaccagatgatgtactaggtgaagcattgcattgtgggaatcacaaagcaaatagtactccagaaagacaaatatcagaagcttcctattcttttttttttttttttttttttgagacagggtctttctctgttgcccaggctagagtgcactggtgatcacggctcactctagccttgaattcctgggcccaagcaattctcccacctcagcctcctgagtagctgggactacaagtgtgcaccaccatgcctggctaattttttgaatttttgtagtgatgggatctcgctctgttgcccagggtggtctcgaactcctggcctcaagcgatcctcccacctcgacctcccaaagtgctgggattacaggtgtgagccacctcgcctgggcccccttctccatatgcctccaaaaacatgtccctggagagtagcctgctcccacactgtcactggatgtcatggggccaataaaatctcctgcaattgtgtatctcagacatttgtgtctttgatcctcaccctgtgaccctaaagggaagaaagcctgagtgtcaagtaactctgggcctcccctaaagagaaatggagatggtggctcatctaggaagtagaggagcagggggttcctggttctcaggccacgtgtgatctctgcccacccagggcctgccccagcctgcaggtattgctgtgtggtgggaacacccacttcccttgtgcacagcctttgagaggggatcgtggcctcagttccaggggttcctggccagggccaagtgctccttctgcagaggcctgcacgcatctcacccctttgacttgtatttccatggcttcccctccccacctgccccctagccctccctgactggccagcccctcagtagtcctcctcggccagggagaggagcacggccttgggtgtgttctcgaaaagggctgcccggttctgctgctgccccttcttcacccagtggccatagattcggaaagcgtaggcgtcgatgagccggcgcagaggccggagggcataggggtctcggatgacgatctcccgggtcacaggcttcacccggcgntactgntagtagatccgcactgaagccagcacggtcagagcgatcaccttgaacttcccccgggggctgaagtgccgcacttcctctaccaagtactgctggaagaaggggtgtgccaaggcctcttccgctgtgtagcggttctggggttgcaccaccaggaatcgggagaccaggtccttcacggtgtccgagtaatcatcccactcgggcgagccaaactggtagttgccgctcatgatcatcctcagcatcagcatctgcttccggtgccagaagggcggggagccggccagcagcgtgtacatgatgacgccagtgctccacatgtccacctctttcccgtagcccgggtggtcctcattcatggagcactcgataatctcaggggccaggtaactgggggtcccgcagacctctcgcagcctctctcccggctccagctggcaggaaaagccaaagtctgtgagcttgatgttcatgttgtcatccaagagaatgttctcgggcttcaggtcccggtgcacgatgttgagtttgtgcaaggtgcagatcacctccagcagagn

SEQ ID NO: 153 - DNA, 686 bp, Homo sapiens
tcgacccacgcgtccgaactgccaaaagctggtgattctgggacaggccttcactttggagccacgggatggggtgggggagccccatgggcctgggaaggagggtgctgtggagggggctgcagggctgaccagcaggcagcctcatctggtcgggggcgggggcggcaggagcagaagcggggtctccgtccttgggactgtcctggttggccacgggccctgaggatgcacggtgcctggggctcctgtgccggtgggcggggggcatgctggcctctgagcgatcaggcgaggccagcgagggtgtgcttgcaaattcaagcaataagaggggggttcctgggggcttccagcccaggctagaagcccccatggcttctggcagctggacatcagccccaggtattggggtgattttggtcatgacagtgtgcctgtcccactgttacacgcatgaatgggggttatggggtgggggtgggactcaaggcttgaccgactcctagtggacctgatgtgaaattcctgtcaaacaaacaccacttttcaatggtttgctaggagtatttctgtattgaaagtttctaattatgctttttaaaaaaatactaaaaataaaggttcaagctgccaaaaaaaaaaaaaaaaaaaaaaaaaaaaaaaaaaaaaaaaaaaaaaaaaaa

SEQ ID NO: 154 - DNA, 2496 bp, Homo sapiens
  misc_feature (2340)..(2340): n equals a,t,g, or c
  misc_feature (2373)..(2373): n equals a,t,g, or c
ggccttacctactagcggaatcgactgaagagacgcctgccagtgcgggaggtaggaagctcgatccccaaagaaaagagcgagtgggcaggcagctgcgagacagaaccggagtgtgcagggtccctagaggccggttcctggtctgtgctgctctcctggaagccatggtacaggcagagctcagggcgatccccaggtgagggcagcggctctgcctgggattccaccgcagtacaaccgggtagatgcggggtggagaagaaaggatgttgcctgcactgctcgccaatagcaccctgagaggctacatttgcagaagcagcagcagcagaagacacagcgccggtccaggaggcggctcgagctgttcgtaaagtcgcccgacagctttttctccgtagtatgcgagttgacaaaacagccagagaacagggctccccattacaatcttttcgagatcttttcccttgctaaccggatctgatttgtgcgaaaacatgccttgcacttgtacctggaggaactggagacagtggattcgacctttagtagcggtcatctacctggtgtcaatagtggttgcggttcccctatgcgtgtgggaattacagaaactggaggttggaatacacaccaaggcttggtttattgctggaatctttttgctgttgactattcctatatcactgtgggtgatattgcaacacttagtgcattatacacaacctgaactacaaaaaccaataataaggattctttggatggtacctatttacagtttagatagttggatagctttgaaatatcccggaattgcaatatatgtggatacctgcagagaatgctatgaagcttatgtaatttacaactttatgggattccttaccaattatctaactaaccggtatccaaatctggtattaatccttgaagccaaagatcaacagaaacatttccctcctttatgttgctgtccaccatgggctatgggagaagtattgctgtttaggtgcaaactaggtgtattacagtacacagttgtcagacctttcaccaccatcgttgctttaatctgtgagctgcttggtatatatgacgaagggaactttagcttttcaaatgcttggacttatttggttataataaacaacatgtcacagttgtttgccatgtattgtctcctgctcttttataaagtactaaaagaagaactgagcccaatccaacctgttggcaaatttctttgtgtaaagctggtggtttttgtttctttttggcaagcagtagttattgctttgttggtaaaagttggcgttatttctgaaaagcatacgtgggaatggcaaactgtagaagctgtggccaccggactccaggattttattatctgtattgagatgttcctcgctgccattgctcatcattacacattctcatataaaccatatgtccaagaagcagaagagggctcatgctttgattcctttcttgccatgtgggatgtctcagatattagagatgatatttctgaacaagtaaggcatgttggacggacagtcaggggacatcccaggaaaaaattgtttcccgaggatcaagatcaaaatgaacatacaagtttattatcatcatcatcacaagatgcaatttccattgcttcttctatgccaccttcacccatgggtcactaccaagggtttggacacactgtgactccccagactacacctaccacagctaagatatctgatgaaatccttagtgatactataggagagaaaaaagaaccttcagataaatccgtggattcctgaacagtatggaaaagcaaactgtgcaactactacattatatcattacctggtatcccatggattttgtgcttgggacagaccataaatgatggaaaatgtcaacacaaaaatagctgaaagccaggtacaactactgcatttatatatgtaagttttgtatatcaaaaataattggtctaaatttcctagacttagacttgatttcttaacattagggtatcgcatactcaaatggtagacaatgaccccaactaaatcttcctgatgttacactgctttatcaagaggatggactttttttttttgaggcagacagagtcttggctctgtcacccaggctggagtgcagtggcgcaatctcgggtcactgcaagctctgcctcccaagttcatgccattctcctgcctcagcctcccaagtagctgcgactacaagcacctgccaccatgcccagctaattttttttttcagtagagacagggtctcaccatgttagccacgatgctcttgatctgaccttgngatcccgcgacctcggccttccaaagtgctggnaatacaggcgtgagccactgggccttgccaagattgggcactttttaacatcagaacttcctatcactgctgcattgagttgctccgcatttattagaagcattatgcctgtacggattgggg

SEQ ID NO: 155 - DNA, 1001 bp, Homo sapiens
  misc_feature (919)..(919): n equals a,t,g, or c
cgcgctggaaccctgtggcggcggccatggccatatggcgctgcccgcctggctgcagccaggtataggaagaatgcgtatcttttcatctattacttaatccagttctgtggccactcttggatatttacaaatatgacagtcagattcttttcatttggaaaaggtaaaactccgaaacagtttttttatttttaacttttaatccttgttttcacctcatcctgcttatattaaatttctacacacctcaaccttctaccacgggatacagattcaatggttgacactttttatgctattggacttgtgatgcgactttgccaatccgtatctctcctggaactgctgcacatatatgttggcattgagtcaaaccatcttctcccaaggtttttgcagctcacagaaagaataatcatcctttttgtggtgatcaccagtcaagaggaagtccaagagaaatatgtggtgtgtgttttattcgtcttttggaatctattggatatggttaggtacacttatagcatgttatcagtcataggaatatcctatgctgtcttgacatggctcagtcaaacactatggatgccaatttatcctttgtgtgttcttgctgaagcatttgccatctatcaatcgctgccttattttgaatcatttggcacttattccaccaagctgccctttgacttatccatctatttcccatatgtgctgaaaatatatctcatgatgctctttataggtatgtattttacctacagtcatctatactcagaaagaagagacatcctcggaatctttcccattaaaaaaaagaagatgtgaagtacagcattccagtgtgacacgagaaaagacaggctgtggattcagtgcagtaaataaaacacaggaagtattctggtggaaaaanaaaaaaaaaaaaaaaaaaaaraaraaaaaaaaawaaaaaaaaaaaaaaaaaaaaaaaaaaaaaaaaaaaaaaaaaaaaaaaa

SEQ ID NO: 156 - DNA, 1142 bp, Homo sapiens
gaagaagtgacacttcttggtcagaatgttaatagttttcgggacaattcggaggtccagttcaacagtgcagtgcctaccaatctcagtcgtggctttaccaccaactataaaaccaagcaaggaggacttcgttttgctcatcttctggatcaggtctccagagtagatcctgaaatgaggatccgttttacctctccccaccccaaggattttcctgatgaggttctgcagctgattcatgagagagataacatctgtaaacagatccacctgccagcccagagtggaagcagccgtgtgttggaggccatgcggaggggatattcaagagaagcttatgtggagttagttcaccatattagagaatctattccaggtgtgagcctcagcagcgatttcattgctggcttttgtggtgagacggaggaagatcacgtccagacagtctctttgctccgggaagttcagtacaacatgggcttcctctttgcctacagcatgagacagaagacacgggcatatcataggctgaaggatgatgtcccggaagaggtaaaattaaggcgtttggaggaactcatcactatcttccgagaagaagcaacaaaagccaatcagacctctgtgggctgtacccagttggtgctagtggaagggctcagtaaacgctctgccactgacctgtgtggcaggaatgatggaaaccttaaggtgatcttccctgatgcagagatggaggatgtcaataaccctgggctcagggtcagagcccagcctggggactatgtgctggtgaagatcacctcagccagttctcagacacttaggggacatgttctctgcaggaccactctgagggactcttctgcatattgctgacctgagaggatggcctcagagctgacttgggcaatcctccccaacaggaaggggagacattgcctgccactgaggaaacaggtcatgaaggtggagataagctgcaaggggcgaagcaactttatgtcagtggaaaacgtgtctctttaaagctgctatgtgaacagcttttacagtcattaaatttacctaaactaaggttaaaaaaaaaaaaaaaaaaaaaaaaaaaaaaaaaaaaaaaaaaaaagggcggccgctct

SEQ ID NO: 157 - DNA, 2238 bp, Homo sapiens
  misc_feature (12)..(12): n equals a,t,g, or c
  misc_feature (45)..(45): n equals a,t,g, or c
tgtccttgttgncgcggctgaagtacgccgtgggccacttcctcnaacgacctgtgcgcgtccatgtggttcacctacctgctgctctacctgcactcggtgcgcgcctacagctcccgcggcgcggggctgctgctgctgctgggccaggtggccgacgggctgtgcacaccgctcgtgggctacgaggccgaccgcgccgccagctgctgcgcccgctacggcccgcgcaaggcctggcacctggtcggcaccgtctgcgtcctgctgtccttccccttcatcttcagcccctgcctgggctgtggggcggccacgcccgagtgggctgccctcctctactacggcccgttcatcgtgatcttccagtttggctgggcctccacacagatctcccacctcagcctcatcccggagctcgtcaccaacgaccatgagaaggtggagctcacggcactcaggtatgcgttcaccgtggtggccaacatcaccgtctacggcgccgcctggctcctgctgcacctgcagggctcgtcgcgggtggagcccacccaagacatcagcatcagcgaccagctggggggccaggacgtgcccgtgttccggaacctgtccctgctggtggtgggtgtcggcgccgtgttctcactgctattccacctgggcacccgggagaggcgccggccgcatgcggaggagccaggcgagcacacccccctgttggcccctgccacggcccagcccctgctgctctggaagcactggctccgggagccggctttctaccaggtgggcatactgtacatgaccaccaggctcatcgtgaacctgtcccagacctacatggccatgtacctcacctactcgctccacctgcccaagaagttcatcgcgaccattcccctggtgatgtacctcagcggcttcttgtcctccttcctcatgaagcccatcaacaagtgcattgggaggaacatgacctacttctcaggcctcctggtgatcctggcctttgccgcctgggtggcgctggcggagggactgggtgtggccgtgtacgcagcggctgtgctgctgggtgctggctgtgccaccatcctcgtcacctcgctggccatgacggccgacctcatcggtccccacacgaacagcggagcgttcgtgtacggctccatgagcttcttggataaggtggccaatgggctggcagtcatggccatccagagcctgcacccttgcccctcagagctctgctgcagggcctgcgtgagcttttaccactgggcgatggtggctgtgacgggcggcgtgggcgtggccgctgccctgtgtctctgtagcctcctgctgtggccgacccgcctgcgacgctcccgaggcggagaacaccgaacacccagtgaaggtgaggggatcagcacggcgccgccaccgtgctggaacgagactcagccacaaggaggtgcgaagctctgacccaggccacagtgcggatgcaccttgaggatgtcacgctcagtgagagacaccagacacagaagggtacgctgtgatcccacttctatgaaatgtccaggacagaccaatccacagaatcagggagaggattcgtgggtgccgggactgaggagggggacctgggggtgactaggtgacataatggggatcagcacgggcggcaccagcacacacgtgctggaatgagaactcagccacaaggggaggtgcgaagttctgacccaggccacagtgcggatgcacctttgaggatgtcacgctcagtgagagacaccagacacagaagggtacgctgtgatcccacttctatgaaatgtccaggacagaccaatccacagaatcagggagaggattcgtgggtgccgggactggggagggggacctgggggtgactaggtgacataatggggacaagggctgcctttctggggtgatgagaatgttctggaatcagaatgggatggctgcacggcgtggttgaagggtactgaaggccacccttcagtgtacgaaggggtagatttttgtatttttaccaacaataaacaaaaagaaaagaaaacaaacaaaaaaaaaaagaaaaagataaaaagaatagagaacaagaaagaaaaaaaaaaaaacaaggggggactttttgggcgggggagaaagggtataaagggcgcggggtcaaaggtttcgagcacccttttttacaagagggaataggggcccata

SEQ ID NO: 158 - DNA, 1052 bp, Homo sapiens
acgcgtccggccagccagtccgcccgtccggagcccggctcgctggggcagcatggcggggtcgccgctgctctgggggccgcgggccgggggcgtcggccttttggtgctgctgctgctcggcctgtttcggccgccccccgcgctctgcgcgcggccggtaaaggagccccgcggcctaagcgcagcgtctccgcccttggctgagactggcgctcctcgccgcttccggcggtcagtgccccgaggtgaggcggcgggggcggtgcaggacctggcgcgggcgctggcgcatctgctggaggccgaacgtcaggagcgggcgcgggccgaggcgcaggaggctgaggatcagcaggcgcgcgtcctggcgcagctgctgcgcgtctggggcgccccccgcaactctgatccggctctgggcctggacgacgaccccgacgcgcctgcagcgcagctcgctcgcgctctgctccgcgcccgccttgaccctgccgccctagcagcccagcttgtccccgcgcccgtccccgccgcggcgctccgaccccggcccccggtctacgacgacggccccgcgggcccggatgctgaggaggcaggcgacgagacacccgacgtggaccccgagctgttgaggtacttgctgggacggattcttgcgggaagcgcggactccgagggggtggcagccccgcgccgcctccgccgtgccgccgaccacgatgtgggctctgagctgccccctgagggcgtgctgggggcgctgctgcgtgtgaaacgcctagagaccccggcgccccaggtgcctgcacgccgcctcttgccaccctgagcactgcccggatcccgtgcaccctgggacccagaagtgcccccgccatcccgccaccaggactgctccccgccagcacgtccagagcaacttaccccggccagccagccctctcacccgaggatccctaccccctggccccacaataaacatgatctgaagcagcaaaaaaaaaaaaaaaaaaaaaaaaaaaaaaaaaaaaaaaaaaaaaaaaaaa

SEQ ID NO: 159 - DNA, 1492 bp, Homo sapiens
gccttcccacactccattccctgtcaagttatggctgtcccctcaccccagctgctcctagagaggcccttkttacctgtgtcattcatgtttctaacaagccaccctccaccccgtcttgtgtgccccatgcacctgtgcatctgtgctgtgtgggtgttggtggcccttttgcgcatgcatggggcatcccctgcccagaccagcgggacaaggagcgggaacggcggctgcaggaggcacggggccggccaggggaggggcgcggcaacacagccactgagaccaccacgaggcacagccagcgggcagctgatggctctgctgtcagcactgttaccaagactgagcggctcgtccactccaatgatggcacacggacggcccgcaccaccacagtggagtcgagtttcgtgaggcgctcggagaatggcagtggcagcaccatgatgcaaaccaagaccttctcctcttcctcctcatccaagaagatgggcagcatcttcgaccgcgargaccaggccagcccacgggccggcagcctggcggcgctcgagaaacggcaggccgagaagaagaaagagctgatgaaggcgcagagtctgcccaagacctcagcctcccaggcgcgcaaggccatgattgaraagctggagaaggagggcgcggccggcagccctggcggaccccgcgcagccgtgcagcgatccaccagcttcggggtccccaacgccaacagcatcaagcagatgctgctggactggtgtcgagccaagactcgcggctacgagcacgtcgacatccagaacttctcctccagctggagtgatgggatggccttctgtgccctggtgcacaacttcttccctgaggccttcgactatgggcagcttagccctcagaaccgacgccagaacttcgaggtggccttctcatctgcggagacccatgcggactgcccgcagctcctggatacagaggacatggtgcggcttcgagagcctgactggaagtgcgtgtacacgtacatccaggaattctaccgctgtctggtccagaaggggctggtaaaaaccaaaaagtcctaamccctgctcggggccccacggatgctggtggactgtgtgcccctggtggaggtggacgacatgatgatcatgggcaagaagcctgaccccaagtgtgtcttcacctatgtgcagtcgctctacaaccacctgcgacgccacgaactgcgcctgcgcggcaagaatgtctagcctgcccgcccgcatggccagccagtggcaagctgccgcccccactctccgggcaccgtctcctgcctgtgcgtccgcccaccgctgccctgtctgttgcgacaccctcccccccacatacacacgcagcgttttgataaattattggttttcaamraaaaaaaaaaaaaaaaaaaaaaaaaaaaaaaaaaaaaaaaaaaaaaaaaaaaaaaaaaaaaaaaaaaaaaaaaaag

SEQ ID NO: 160 - DNA, 954 bp, Homo sapiens
gaattcggcacgagcccacaccaaacctgtggacgccgacccgggaccgccgctggctggctgctggctcactcgaccgtcatggagaccctgggggcccttctggtgctggagtttctgctcctctccccggtggaggcccagcaggccacggagcatcgcctgaagccgtggctggtgggcctggctgcggtagtcggcttcctgttcatcgtctatttggtcttgctggccaaccgcctctggtgttccaaggccagggctgaggacgaggaggagaccacgttcagaatggagtccaacctataccaggaccagagtgaagacaagagagagaagaaagaggccaaggagaaagaagagaagaggaagaaggagaaaaagacagcaaaggaaggagagagcaacttgggactggatctggaggaaaaagagcccggagaccatgagagagcaaagagcacagtcatgtgaagattcctggctgcctcttccaggcagtcccccagagatgcctcttctgccccctaaaagcagtgccctggacttgaagcccgtgaaatgactccatctgggattcagaatacagtgttctcaagtgaagaaggcttggaacccaccccacctccctcattgggggctctctgggcaaacatggttttcatgcacccctcttcctgagcttggtccctgcctggtgattcttcttatactcggagagcatccctggttgaggagacacccgcaatcctccacgatctcatggctccacctgcttctccccactgcctgatttcttttctctctgcctgatgtctactgaacagaacttcccctctcccatgcacccactgccagctgagagctgcttcccaatggcctgcattaaagcattcgtaacagccaaaaaaaaaaaaaaaaaaaaaaaaaaaaaaaaaaaaaaaaaaaactcga

SEQ ID NO: 161 - DNA, 2784 bp, Homo sapiens
ggcacgaggaactctgagcaccgtggcttccagcatcaatgccttggcaacagtgacctttgaggattttgtcaagagctgttttcctcatctctccgacaagctgagcacctggatcagtaaaggcttatgtctcttatttggcgtgatgtgtacctctatggctgtggctgcatctgtcatgggaggtgttgtgcaggcttccctcagcattcacggcatgtgtggaggaccaatgctgggcttattctccctgggaatcgtgttcccttttgtgaattggaagggtgcactaggaggtcttcttactggaatcaccttgtcattttgggtggccattggggccttcatttaccctgcaccagcctctaagacatggcctttgcctctatcaacagaccaatgtatcaaatcaaatgtgacagcaacagggcctccagtactatccagcagacctggaatagctgatacctggtactcgatctcctacctttactacagtgcagtgggctgcttaggatgcattgttgctggagtaatcatcagcctcataacaggtcgccaaagaggtgaggatattcaaccactgttaattagaccagtttgtaatttattttgcttttggtctaagaagtacaaaacactatgctggtgtggagttcagcatgacagtgggacagagcaggaaaaccttgagaatggcagtgcccggaaacagggggctgaatctgtcttacagaatggactcaggagagaaagcctggtacatgttccaggctatgatcctaaggacaaaagctacaacaatatggcatttgagactacccatttctaaggcaatacctgtatgaacgcacacacacacgtgcaatacacacacacacacacacacacacacacacaaactccacatacttcttgcctacttgttagtagatatgtatagttgccattgctagaagacagggatgtctggtgcctatttctacttatttataactacatgcaaaatgactatctctcgggatattcttagaaagactccaactttcacagagaaaaaccaacctgctccaaatgcccttgactacttccttcttgaataaattagggctggatttcattaccattcaagaaagcgaagtctttttgcttggtgtcatattaaacttcaggtttttcgttttagtagttttttaaccatcaaaatatcttggagtttagaggcagaacgggaaacagaaatatgcatatttaacactttcctgccacgagggataaaatagaggaatgacatccacccccgacctcatacctgacatacatgtagacatattttatgccacccatctcccatcctgtagctacaattggcatacaactactattaacctcccttcaccaccactgtcaggtcctcttccagtcattcctcattagctgtcctgaccaaacattaaaaaaaaaattcagctaaatacagaagaagatggtatgtctggctagtgggagtgattataactaaaaactttgctccttttgtgctgtccatgcagtatgtcttcttcctttctatcactttacaatgaaaaattgcctcagagctcaataagaagtctggagcctttttccagggctaaggaaagagaaaaggaatgtcctatagaaggttgttaggatagaatttggtaaaagaacgttgcagatattgtaacagaccataggagatttcatcagcaataggattcttctttggagaaaatacattgtccataagacttgtactctattcattcaactcatgtgagcaagctcaactcactccacctgggttaggtaacagaagtggagaacttcatagttcgtgtctagaaaataatgtttaaagttctggagaatgagggtattgcagattaaaaggcgagttgacaaatgaaggagcagtgaaagatttttggaagaagtgaagaagtgaaattctgaaaaggtaaaagaaagaaccagtatgtcacaggggccaagtcagaggacagataataagaaacaaagttgtatctgagagtcatatattaggacaggtgtcagatatttattttggtggccagataaaagcaaaaggcctagaaacagtgtgttagcaaagtaagaagaaatggtccaaataggcaaggataaggaaatccaaaggttgtctttaaatatttctcaaaagagaaagccttgaaagaagcatacaatagagaaaaaataaattaccagtatttattattagaaaagatagaaagacagacaaatcagtggaggaattaaaacagagaaactggagtttataaaacagagcccaatccttgccttctctccctccactcaaatagaaaaggagaatggagaaagagaaagaaggtattaggctacagtttataagagagatgagaaaaaaatacatttgggaatagagggaaagggtcaaaaggggtcacatttggagaaatatctgaaaatgagaaggagcagaatttttggaaacattttttaaagtctggcaacgctaattaagctgttgatctaaggatttgcaaattgagaggtgcaattattttccaaatgatttgtgacactcttattaattagaatatatattctgtgaatattgaaatctgagccaaaactagttagctttattaatatcttagggaaagaagagagaaagaaagagggagggagagagagaaagaaagaaagaaagaaagaaagaaagaaagaaagaaaaaaaaaaaaaaaaaa

SEQ ID NO: 162 - DNA, 943 bp, Homo sapiens
gtattttcaagggtctgtcctgttatagcacataacggaacttcattccttttttaaaagatataattcatgtaccaggtgattcacccctttaaagtctcaaattcagtggtttttagtatatttccagaattgtgcagttatcactaggagcaattttagaatgttttcatcacccggaaagaaactctatatccatacgcagcctctccccatttctccccaacccccagccctaggcaaccactcatctgctttccgtgtctgtaggattgcttgttctggaaatgttgtatacatggaatcatgcactgtgaactcttgtgtgtcacagaaggatcatgtttccatggtgcgtctgtgtcatagcatgtatcagtgcagtaaccccccttatccaaggttttactttctgcagtttcagttacccacagtacagtacagtaagatattttgagagagagaccacactcacattacttttattgtaatatatcgttataattgttctatttgattattgttgttaatctcttactgtgccttatttagaagttagactttgtcataagtatgtatgtataggagaaaagatagtatatataaggtttggtgctatccacagtttcggacatcccctgggggtcttggaatgtawcctgtggataagcgggaccactgtacttcattcctttttattgtcaaataatattycatkgkgtggctawgccatawtttgccyattcattcgtcagttggtagacatttgaggtgtttccatwttttggcttttgtgaagaatcctaggccgggcacagtggctcatactcctgggaccttgggaggccaagacgggacgatcacttgagctcaggaatttaagaccagcctgggcaacatagtgagactctgtctctacaaaaaaaaaaaaaaaaaactcgag

SEQ ID NO: 163 - DNA, 1794 bp, Homo sapiens
  misc_feature (1675)..(1675): n equals a,t,g, or c
gctcctctagtgactgctggggtgctagttttcacggttaccacagaacttgagagaggaaaatgagaacggcaaattaaaatgccataaaattccattcttaacaagcgttagtttttttttcctatatatccactccctcacctatcttatgacatatgagaaatcctaacatgggacttggtgtataattagcattgaatgaatttaagttttctttctttctttcttttcttttatcttctgtggtctcctgcagaatcagtctataaaaagggcatggtaaaaaaaaatctatctcatagcattgttgaaaagattaaatgacataataagatgatgcatatatagtagctagcactgtacctgatgcatattaggagcttgataatattactaacattatcatcatcaatgctatctgagcaaagaggctgttccttctttccagccagagttcttctgttggataatatttccagctgtgaaccccaaccagagaccttgaagcctttatttccttttctctcattggcctttggctgaagtctcctttctgcagagaacaaagtgaccagcttttgatgaactattttcctcttttatccatttccaagtgttagccatagtgaagaagtgtagctgggtgctagcccaactcaagaagtgataatgtwatatccaacccaagataaactcaaggataactttcaacacggctactcaagcagttcaggggggaggcatcttgtagagaggagaccaggaagtcacttggcagctgggccagcacacagagggccattgctccagtaaagcagctaacctccatctcttcatcaaaccatcctagactcagcactctgcagagaaggagcagatggagggaatgtgtggagagattagataagaaggatttctaatctagtgggggagcgagtaaaatgtacagaagtttgagaagccaagctcttatgtammaatccrcccccatcactcaacaatccccactgtatgaataaagcctggaaagtttccaattaaaacagtgcttgtgaatattggcaaggggtatctttgtgtgcagggtacatttaaagggagaagggtgaagatacacccttgccttytaggagtacactttctgagagcttgttcaccaggctgtgagtttctcagtctatctgtttctcagtctgttagtaatgaatgtatctcccacttagcacagcagctagcacatagtagatgcctaacaaatgtgtgttaaattgaatgttggaagtctgtgtcctgaaagcttttcttcacatattacaaggctttttatttgttcaacacatttttaccaagtttttttctgtgttccaggtcttttgattagctgtttttaagtcacagaaatgggtgtcgggaacaaaaccagtcaaaagtcctcattctacatcatttacactttcccttcctatatttataagttttaatatcagcttctacaataggttccagaacaagtggtgctcaaggaatggagaaaatgactattccaaccctagctgtaggtgaaccaaaaaccccagagaaatcaaagtgtagtttaaagcagtgcttctcaagttgtaatgtgcatatagatcacctggggttgttattaaaatgcaaattctaaaagagncaggagaatatcttgagcctgggagccagaggttgcagtgagccgagatcattccactgcattccagcctgggtgacacagcgagactccatcttaaaaaaaaaaaaaaaaaactcgta

SEQ ID NO: 164 - DNA, 887 bp, Homo sapiens
  misc_feature (303)..(303): n equals a,t,g, or c
ggcacgagagaattataggtgcatgatggggcttttggagactggcaatgttctgttttgggtctgggtagtggttacttgtgtgtattcactttatgctaactcattgaactgtacagatatggactgtgcccctttctatatgtgtgtaatgcttcaacaaaagtgtcaatagtgatgcatgcacatgttaaaatttcaaactatattaaagagtgtgcaattaaaaggaagttatcctctcactctaaagtcctatttcctctcttcagtctatcattactactagtttctagtatatcntttagaaatgkgctgtaaaagaacaatgatgtgtatgtctctacaggtatatatttattctttttgtaattacaaaaatataaactcactacatatgttattctaccacatgctttttttcatgtaacagtatgtcttagacatcttttcctattattgcgtggaagctatcaaccttattctttgtaatgactccataaattattctactgtgaaaacacaccatgtttaaccagttctctgttagtgaacatttaggatttttccagtttttaaatattacagtgacatattaaacattaaacatatcttttgacacatgtccttgcacacatgtataggtatgatggactttaacaccctttggctagattctttagcacataacgtaaatatcccatagagtcaaaaccacccttaaaacttcctcaggaggctgggtgtggtggctcacgcccgtaatcccagcactttaggaggccgaggtgggcggatcacgaggtcaggagatcgagaccatcctggccaacatggtgaaaccctgtctctactaaaaatacaaaaaaaaaaaaaaaaaactcgta

SEQ ID NO: 165 - DNA, 1222 bp, Homo sapiens
aattcccgggtcgacccacgcgtccgagcccagcaacgtgcaaggggaaaggggacaggattctggatggccatttgcttcactgggatgcaaaacctcttttgagtactagaatcagtatttcttcttccatctctgctgtacctgagaagaaatggccaaacgcaccttctctaacttggagacattcctgattttcctccttgtaatgatgagtgccatcacagtggcccttctcagcctcttgtttatcaccagtgggaccattgaaaaccacaaagatttaggaggccattttttttcaaccacccaaagccctccagccacccagggctccacagccgcccaacgctccacagccacccagcattccacagccacccagagctccacagccactcaaacttctccagtgcctttaaccccagagtctcctctatttcagaacttcagtggctaccatattggtgttggacgagctgactgcacaggacaagtagcagatatcaatttgatgggctatggcaaatccggccagaatgcacagggcatcctcaccaggctatacagtcgtgccttcatcatggcagaacctgatgggtccaatcgaacagtgtttgtcagcatcgacataggcatggtatcccaaaggctcaggctggaggtcctgaacagactgcagagtaaatatggctccctgtacagaagagataatgtcatcctgagtggcactcacactcattcaggtcctgcaggatatttccagtataccgtgtttgtaattgccagtgaaggatttagcaatcaaacttttcagcacatggtcactggtatcttgaagagcattgacataccacacacaaatatgaaaccaggcaaaatcttcatcaataaaggaaatgtggatggtgtgcagatcaacagaagtccgtattcttaccttcaaaatccgcagtcagagagagcaaggtattcttcaaatacagacaaggaaatgatagttttgaaaatggtagatttgaatggagatgacttgggccttatcagtttttcattcagcaagtctgcactagggacctactatgagccacgcaatacttccttggaatgatgtattccctggccttgaaataaggaatctagtacccatgtttgtgctactggaatgaatccattaaactctctgagactcaaaaaaaaaaaaaaaaaaaaaaaaaagggc

SEQ ID NO: 166 - DNA, 1815 bp, Homo sapiens
cacgcgtccgcggacgctgggctcaatctcctgaccttgtgatctgcccgcctcggcctcccaaagtgctgggtttacaggcatgagccacagcgcccggctgagtattgggtctttaggggtcaaaacttttgatctttgcttgcagtttttgtttttttctcttttacactctccctgttccctgattaaatgaaggccaggcttgcctagttccagggaaaaggcccagggtgcctagagcaaggtggatgggactttgttcgcagatgggccttgagagagcgacccctcgctcctaaatgcccggaggaagggacggacttctttatctttaccatgggtattctgccttactgctttggcctgtggcgtttcttcacttgcttttcctcattttgcttggaatgtgctttgcctgttgcatacccacctcgtctgcccccttgcacactccatggctggcctaaaagcccagtctgctgtcctgtgccctttagacttccactgtaggattatgtttccacactccctgtggactgtgccactggagctctctgcagacagggactgtgtcaggttgacctccatccttcagaccagcccagtgcctggcaggtagaggaaagagaagctgaggaaggacttgctgcacaagtggatgccaggagctctggtcttcccttcttgaatctgctaccttatgatgggagggacacagggctgtgctggatttgtgcacgatgctttggacagcccatgggagagggccaggaggaaggaaacccagactgagtggatagcaggctggatgggggcattgacagtgggggaagcattaaaggccatttatagccttcacaggtcttggtaatgggctcttacacgggttggtggcggaaggacacaggtggacctgggctggtggtcactcctgggctgctcttggccctggcatctgagacctgttggccaaaggctttgatgtggctctggtattttttcttttttttgagaatggaacttttttttttttaatgaaatgctcttttgaataggcaatacagtcacgtttctaaaatgaaaatatattaaaatatattttaagaaattttgcccctcactcctgatctcatctctgtcctccctcctccctggtaaccacctgtagcagtttgaatacccttctagtttttcttaatgcaagtacagcaaacacaaattgtgtattattatttctcccttttcagtaaatgaaagatagcattctgtgtgtactgttcttcatcttgtgctttttttaacttattgtagagatttttccatatcagtgcatggagaatggttgtcattctctttcagctgtgttgcactgtgaagttgtccctgtttgaatactcacccctgaggaaaggcacctggctgtttccagcttgtttcatgacatgccggcgacagttgtctcacgtgcacatcgtttcccacattgcagtggtcctgcagggtggcatcccgcaggcacattgctgagtcaaagaggaaacacagttgtaattttgacagattttgcccagttgccctctacagggcttgttccatgttgcactcccactggcggtgttgatgcctgattccccactgactcgtcaacacaaggtgtagtcaaatgcttggagttctgccagcctgaccaacatggagaaaccctactgaggatacaaagttagccaggcatggtggtgcatgcctgtagtcccagctgctcaggagcctggcaacaagagcaaaactccagctcaaaaaaaaaaaaaaaaa

SEQ ID NO: 167 - DNA, 1262 bp, Homo sapiens
cctaatggcccgasctgaatacttgaaggagctcaagatgagggaatctcgctgggaagctgacaccctggacaaagagggactgtcggaatctgttcgtagctcttgcacccttcagtgaccctagaagaatgattggacagatgtgagccatctggagcagaggggcactaacccaggctgacgccaagaatgaagtggcccactgcagccctggcgagcaggcttcttggatggacagtgctgagacccccatatcccagagtccccagcctccctcaggttactctgcaccccacagatggtttgatggctgtgctgtatactggaggggagggcaggactctgggagaacagcacttctttcatgagacctttgttactcggtggttactgggtcctgtgcctgtccgttttggggcatgcagccctctatcatttttggctccgagaagagggcaaggggcccccgcaggtarcttctgtgcttgccctcgccctgccagcaggcagctgtgcccctggcctgcccttcccgggaccccttattccaactcagctcctctttgcactggaatggggcactccaacacccctcagggaccaccctccccacagtatgcactcagccccacagaacccaccagtctttctgggaactcacacctgcccgccatcttggtactttaggttaatccctcaagcatgaaagctggatcttttggggtttaagaagcccaagccttgttcctgccctggcctagggagcactcaggagggttccttggtcctcatctctcccacctccgttccctctgggccccacactagccacagcgcgggccttgtgctggagtttgagcctgggacagggagagggaggcttggagacagtctgacccagtgccctctaggccacccacttctaggcctgccctgccgccgtggagccctgggcaagctctttcccctttctgggcctgggtctccccatctcttcaatggggctgataccttcacagcccacagcatgggcacttatgaggacaaagtgaatttaacctggaaaagaatgtatttgagagtttcttttaaataatcagcgggtgttggtgatttgtagcccttctgcccttaaatgcttccttgggcaagagctgtctgtcctccctgcaggaggctgagtgtgaagagtatcattcattgtttctctattaaattattttctgctaaaaaaaaaaaaaaaaaatttctgcggtccg

SEQ ID NO: 168 - DNA, 632 bp, Homo sapiens
aattcccgggtcgacccacgcgtccgcgacggtctcatgtaccagaaattccggaaccaattcctctccttttccatgtaccagagcttcgtgcagtttctccagtactactaccagagcggctgcctctaccgcctgcgggcgctgggcgagcggcacaccatggacctcactgtggagggcttccagtcctggatgtggcggggcctcaccttcctgctgccttttcttttctttggacacttctggcagctttttaacgcgctgacgttgttcaacctggcccaggaccctcagtgcaaggagtggcaggtgcttatgtgcggctttcccttcctcctccttttcctcggcaatttcttcaccaccctgagggttgtgcaccacaagtttcacagtcagcggcacgggagcaagaaggattgaggctgggccttcccctgccggcccagaggggcttctgtcctgtgtgttgtgggaggggatgggaggcgcccctcgagtgtgcgtgtatcagggggtctcttctattctcccttgggttttatgggcgctgtgggccctgaaggaagacctgggcccagtgccctcaataaagagaggcccagaggtggaaaaaaaaaaaaaaaaaa

SEQ ID NO: 169 - DNA, 2572 bp, Homo sapiens
  misc_feature (2527)..(2527): n equals a,t,g, or c
aattcggcacgagtctggaccttcttagmttgcttgatatcaggttgtttttgtagccattttgcttcacagtcacctggaatgccgggagcccctgctcatcccgatcctctccttgtacatgggcgcacttgtgcgctgcaccaccctgtgcctgggctactacaagaacattcacgacatcatccctgacagaagtggcccggagctggggggagatgcaacaataagaaagatgctgagcttctggtggcctttggctctaattctggccacacagagaatcagtcggcctattgtcaacctctttgtttcccgggaccttggtggcagttctgcagccacagaggcagtggcgattttgacagccacataccctgtggtcacatgccatacggctggttgacggaaatccgtgctgtgtatcctgctttcgacaagaataaccccagcaacaaactggtgagcacgagcaacacagtcacggcagcccacatcaagaagttcaccttcgtctgcatggctctgtcactcacgctctgtttcgtgatgttttggacacccaacgtgtctgagaaaatcttgatagacatcatcggagtggactttgcctttgcagaactctgtgttgttcctttgcggatcttctccttcttcccagttccagtcacagtgagggcgcatctcaccgggtggctgatgacactgaagaaaaccttcgtccttgcccccagctctgtgctgcggatcatcgtcctcatcgccagcctcgtggtcctaccctacctgggggtgcacggtgcgaccctgggcgtgggctccctcctggcgggctttgtgggagaatccaccatggtcgccatcgctgcgtgctatgtctaccggaagcagaaaaagaagatggagaatgagtcggccacggagggggaagactctgccatgacagacatgcctccgacagaggaggtgacagacatcgtggaaatgagagaggagaatgaataaggcacgggacgccatgggcactgcagggacagtcagtcaggatgacacttcggcatcatctcttccctctcccatcgtattttgttcccttttttttgttttgttttggtaatgaaagaggccttgatttaaaggtttcgtgtcaattctctagcatactgggtatgctcacactgacggggggacctagtgaatggtctttactgttgctatgtaaaaacaaacgaaacaactgacttcatacccctgcctcacgaaaacccaaaagacacagctgcctcacggttgacgttgtgtcctcctcccctggacaatctcctcttggaaccaaaggactgcagctgtgccatcgcgcctcggtcaccctgcacagcaggccacagactctcctgtcccccttcatcgctcttaagaatcaacaggttaaaactcggcttcctttgatttgcttcccagtcacatggccgtacaaagagatggagccccggtggcctcttaaatttcccttccgccacggagttcgaaaccatctactccacacatgcaggaggcgggtggcacgctgcagcccggagtccccgttcacactgaggaacggagacctgtgaccacagcaggctgacagatggacagaatctcccgtagaaaggtttggtttgaaatgccccgggggcagcaaactgacatggttgaatgatagcatttcactctgcgttctcctagatctgagcaagctgtcagttctcacccccaccgtgtatatacatgagctaacttttttaaattgtcacaaaagcgcatctccagattccagaccctgccgcatgacttttcctgaaggcttgcttttccctcgcctttcctgaaggtcgcattagagcgagtcacatggagcatcctaactttgcattttagtttttacagtgaactgaagctttaagtctcatccagcattctaatgccaggttgctgtagggtaacttttgaagtagatatattacctggttctgctatccttagtcataactctgcggtacaggtaattgagaatgtactacggtacttccctcccacaccatacgataaagcaagacattttataacgataccagagtcactatgtggtcctccctgaaataacgcattcgaaatccatgcagtgcagtatatttttctaagttttggaaagcaggttttttcctttaaaaaaattatagacacggttcactaaattgatttagtcagaattcctagactgaaagaacctaaacaaaaaaatattttaaagatataaatatatgctgtatatgttatgtaatttattttaggctataatacatttcctattttcgcattttcaataaaatgtctctaatacaatacggtgattgcttgtgtgctcaacatacctgcagttgaaacgtattgtatcaatgaacattgtaccttattggcagcagttttataaagtccgtcatttgcatttgaatgtaaggctcagtaaatgacagaactatttttncattatgggtaactgggggaataaatggggtcactgggagtaggg

SEQ ID NO: 170 - DNA, 1488 bp, Homo sapiens
cgccaagtttccggagggagagggtagaaactggagggggtggacctgtcactcacgggactgagggtccttttctcccgctcccaggaggaacgagaatgaatatgactcaagcccgggttctggtggctgcagtggtggggttggtggctgtcctgctctacgcctccatccacaagattgaggagggccatctggctgtgtactacaggggaggagctttactaactagccccagtggaccaggctatcatatcatgttgcctttcattactacgttcagatctgtgcagacaacactacaaactgatgaagttaaaaatgtgccttgtggaacaagtggtggggtcatgatctatattgaccgaatagaagtggttaatatgttggctccttatgcagtgtttgatatcgtgaggaactatactgcagattatgacaagaccttaatcttcaataaaatccaccatgagctgaaccagttctgcagtgcccacacacttcaggaagtttacattgaattgtttgatcaaatagatgaaaacctgaagcaagctctgcagaaagacttaaacctcatggccccaggtctcactatacaggctgtgcgtgttacaaaacccaaaatcccagaagccataagaagaaattttgagttaatggaggctgagaagacaaaactccttatagctgcacagaaacaaaaggttgtggaaaaagaagctgagacagagaggaaaaaggcagttatagaagcagagaagattgcacaagtggcaaaaattcggtttcagcagaaagtgatggaaaaagaaactgaaaagcgcatttctgaaatcgaagatgctgcattcctggcccgagagaaagcgaaagcagatgctgaatattatgctgcacacaaatatgccacctcaaacaagcacaagttgaccccggaatatctggagctcaaaaagtaccaggccattgcttctaacagtaagatctattttggcagcaacatccctaacatgttcgtggactcctcatgtgctttgaaatattcagatattaggactggaagagaaagctcactcccctctaaggaggctcttgaaccctctggagagaacgtcatccaaaacaaagagagcacaggttgatgcaagaggtggaaatgttctccatatcaagatgtggcccaaggggttaagtgggaacaatcattatacggactcttcagatttacagagaacttacacttcatctgttccacctctcctgcgatagtcctgggtgctccactgattggaggatagagccagctgtctgacacacaaatggtcttttcagccacagtcttatcaagtatcctatatgtattcctttctaaactgctactcatgaatgaggaaagtctgatgctaagatactgcctgcactggaatgttaaacactaaatatataacaagctgtgttttcctaagctgaaaaaaaaaaaaaaaa

SEQ ID NO: 171 - DNA, 609 bp, Homo sapiens
ccacgcgtccgcggaccccagacatgaggaggctcctcctggtcaccagcctggtggttgtgctgctgtgggaggcaggtgcagtcccagcacccaaggtccctatcaagatgcaagtcaaacactggccctcagagcaggacccagagaaggcctggggcgcccgtgtggtggagcctccggagaaggacgaccagctggtggtgctgttccctgtccagaagccgaaactcttgaccaccgaggagaagccacgaggtcagggcaggggccccatccttccaggcaccaaggcctggatggagaccgaggacaccctgggccgtgtcctgagtcccgagcccgaccatgacagcctgtaccaccctccgcctgaggaggaccagggcgaggagaggccccggttgtgggtgatgccaaatcaccaggtgctcctgggaccggaggaagaccaagaccacatctaccacccccagtagggctccaggggccatcactgcccccgccctgtcccaaggcccaggctgttgggactgggaccctccctaccctgccccagctagacaaataaaccccagcaggccgggaaaaaaaaaaaaaaaaaaaaaa

SEQ ID NO: 172 - DNA, 612 bp, Homo sapiens
ggtcgacccacgcgtccgagcatttgtctgtataattttagttattgaattaaaatcttttgggaccccaacaggatgagatcattggccagctggcttcctcccacctgcacctggactgaaattccccgtggcattagaggtgtttcgtaaggtgctccctgctgtctgtcctacagattgcagtggctctgctggaaaagaacggaattctatgcaagttgcgtgtgtcatgaaggtctctgcacagtgggtgtgtttctttgtcgtcttttctccactctgctcttctgtgaaatgtgccagcagtggacagaacaggggcagaggtgatcagtgaccattgcacagaatatcagtaagtgttgtaaggtatatagtcttggccaacaaattgtaagcaaaataccaggaacttcctaatctagtaggaaattttgtatgcttttgacaaacatctgatcctactgacactgaaagtccttagaaggagaattgcttgaacccggaaggtggcggttgcagtgagccaagatggcgctactgcactccagcctgggcaataggaatgaaactccgtcaccaaaaaaaaaaaaaaaaaagggcggccgc

SEQ ID NO: 173 - DNA, 704 bp, Homo sapiens
  misc_feature (287)..(287): n equals a,t,g, or c
actgtgtctgtcttgtctctgatatttatatgccattatgtggcctctactgccttaggattctaatgttcccactaagatcagctaactcagttccactacagtgtttaccaccatcatctctcgcaaacaaagacagccacttcagagctcctaggaaatagtggtgctcccatcatcattgcattccttaatsacatggtgaaaattaacaatggctaaggagcctttgtgttttctcctctacaatatgcccaggaatttctggcattttggccatcttattnataggctattactgaatttmagcctmatcctmccaaattattaatgccaaaatattaactcttgattcttaggtgagtgcacccatgccaataaatttgccatgatctaaccttaaatgtattctcatatatgctgtccaagtttctrctgattaaaatggcaaggcctttagttctcctacataggttttctctctccagagaaggcctcaattctctgactaggctatgttgggatataactggaggcactaataggtagtagggtaaattctttattttattatttttggagacagggagggtcttgctttgttcagactggagtgcagtggtgtgatcatggctcattgcaactttgaactcctgggcgacagagcaagactccatctcaaaaaaaaaaaaaaaaaaactcga

SEQ ID NO: 174 - DNA, 613 bp, Homo sapiens
  misc_feature (25)..(25): n equals a,t,g, or c
gaattcggcacgagcgggacgcggntgaagatagcctgcggagtgtccgggcggaacacggttgcagcactcccagtagaccaggagctccgggaggcagggccggccccacgtcctctgcgcaccaccctgagttggatcctctgtgcgccacccctgagttggatccagggctagctgctgttgacctccccactcccacgctgccctcctgcctgcagccatgacgcccctgctcaccctgatcctggtggtcctcatgggcttacctctggcccaggccttggactgccacgtgtgtgcctacaacggagacaactgcttcaaccccatgcgctgcccggctatggttgcctactgcatgaccacgcgcacctactacacccccaccaggatgaaggtcagtaagtcctgcgtgccccgctgcttcgagactgtgtatgatggctactccaagcacgcgtccaccacctcctgctgccagtacgacctctgcaacggcaccggccttgccaccccggccaccctggccctggcccccatcctcctggccaccctctggggtctcctctaaagcccccgaggcagacccactcaagaacaaagctctcga

SEQ ID NO: 175 - DNA, 1022 bp, Homo sapiens
ttcccgggtcgacccacgcgtccgcccacgcgtccggcttggggccagcaccctgtctcaaagatggcaaaatgaggctagttctggatgagctagctggtgtgggttccaaccataggaacacactgatgctcaaatcctaaggtgccaagctctaggccctggaggctggtagaacaggatctatgcctggaatcctggcagggattcctgtcaaggacttgtgtttaagcctgcttcagggcttcaggctgcttctgctctgtgtctgcccaggctggctgagcgggtggatgggtggacagaagggctcaccaaggattgtggacatagggtaggccctggtaccacgggtttcaggctgttatcacttcccttgtaggaacatagccagaagcagatgagccagggtagagggctggcccctcctctcatcttcccttcagtcttaaattgtctccagcgatgggaagaggccagggactgtaacccttgtgctgtgtattctctgagcctctgctcactctcagggccaagcagctcccaagccggggccctctcttggccaaaatctgaggagcagtctaggttacaggctttttggtaggtaggttctggctgcctgttaatgcagttaggccccctgattaggtacagtgagaaacaagctagaacaaccctggcccagaagactgtgcactccagcaagatccagggatgatagccttgcagggccactgggagtttgtgcccaagcttctccctcttctctccccagggggcactgggactggtccctgccctcatccttagcctgggccttccccagaggtattaaagagaagtatgattcctctgtcttcagttcttttcaggggcatcctgcccatagtacccagttcccaaggggcccccagtcacgtggtgaagcctagcactcatgcagctcttagggaaccaaaaaccagcactgaaataaagctgaatgactgactgaaaaaaaaaaaaaaaaagggcggccg

SEQ ID NO: 176 - DNA, 1766 bp, Homo sapiens
  misc_feature (14)..(14): n equals a,t,g, or c
  misc_feature (36)..(36): n equals a,t,g, or c
  misc_feature (1750)..(1750): n equals a,t,g, or c
acgggggctttaangggaaacccttcccggaatttncgggtcgacccacgcgtccggttttgtttatggagggtccagtaagtgcaaacaaccattgcctggtcctaagggttcagagtccccgaattccttcttggaccaggaaagccggagacgaagattcaccattgcagactcggatcagttgcctgggtactcggtggaaaccaacattctgcccacaaaaatgagagagaaaacaccatcttatggcaagccacggcctttgtccatgcctgctgatgggaactggatggggattgtggacccttttgccagacctcgaggtcatggcaggaaaggggaggatgccctttgccggtatttcagtaacgagcggattcctccgatcattgaagagagctcctctcccccataccggttctccagacccacgaccgagcggcatctggtccggggtgcggactacatccgaggaagcaggtgctacatcaactcagatctccacagcagcgccacgattccattccaggaggaagggaccaaaaagaaatctggctcctcagctacgagtcctcgtccacagaaccgtccctcctggtcagctggtttacgcgcctcaaactgttgactcactgagagggaccctgctcaggccacctgcctggctcctgscccaagtgccttgcttttacagtggacagcctcttctcgtttcagcctcagtattatgtagggaccttatgcaatttctttttcttttgaaaagttatctactgcccttcttggaagtttgcaggattggatgggaacaaattcagaggatcttaggtgctggcttgtggagacaaaaggagggaaatgggtagagcctgtttgtcttgcttccccagagatagaatgtgaagacacgcgctagaaatcgcagtcctggccagagacgttatggtcattgtgagggactggtggcattgttcctttttgaggggctggggggactcaaattggtggctgttttcacacagatgtgttggtttgtggtccaacttctttatctgaaaaagccagtgagaaaacatttttgatttgatttttctaaactatctaccatattttaagtgtagcagctttgactttgcaataacgtggcaagtatctgatttctcctttgaggcagaggtttaagtgtaggcctgttacacttgtttgatacctttttcatgacagtctcagtatagatcagttggtacagaaatacatgaacacattttgatagggcttatttcacacaaagaagtttatggttatttgtgtggggtggtgttgttatatattattgtctttaagggaaaagaagctataagattcgctgacagccaaagtatcatttagaaaagtgaagcaacaagatttaggttgatgaaagatacatgagtttgcattttgacctgttcagtgtctgtcttccagcacggtgtgtacacttcttcaaaattgtacacagtttgctaattagaaatatcttggaaagcctcatggtcactaattttcaactagcatcaggtattttgaaaacgtgtgtctggatattaactcttgtttaaactgaatgtatgatattttgttagaatggaaaagtactatcttgttaatttaagtattttaaatatagttgtatatttttcttaaaaaaaaaaaaaaaaaaaaaaaaaagggcggccgctctagaggatcccgcgaggggccccanattacgcgtgagcgtt

SEQ ID NO: 177 - DNA, 815 bp, Homo sapiens
  misc_feature (406)..(406): n equals a,t,g, or c
  misc_feature (794)..(794): n equals a,t,g, or c
ggcacgagcggcacgagcggcacgagatggaatgttcattttatggcagttgttttaagttktaaawtacacagaggaaamtattgtggaaggacctctttgttgctttcccttctaagttgtcttcttcttcttcttcttcttcttcttcttcttctttggtccttaagtgaaataaagactctaaaactaatttgtatattatcagccagagatgcggatggcagtcgagccaaatcgcatggctttcagatcaggtattctgcacattcattccaaggtcatagatttttaaaaggacctggatttgaagagatggcaaatgrtgagccatcagaaaacttaatttggaaaacatgtatgtagccagtgtggatattgtggcctctctcaagacacattgacnactgtagacytcattcagtccagtgtgagtattttggagtaggttggatgtagattttgtttttatcgttgatttgtaccgacagaaatagacatttcatcatgtaaaattcctgttattctggaaaaacctattgttttgatccttcttgttttcctgacttggaagtatcctttcaaaaaaactcttaagatatctaggtctaaaaagcacttcatgagatgctaaagctgacccactggttgaaaatgttgaccctatcctgttatttaaatgtgaacatttattgtacattcagtgagttatagtgttaatagtcttgtgctatgcagcaggtgtaaaaattaataaatatattttttaataaaaaaaaaaaaaaaaaaaattnctgcggtccgcaagggaattc

SEQ ID NO: 178 - DNA, 617 bp, Homo sapiens
  misc_feature (9)..(9): n equals a,t,g, or c
  misc_feature (513)..(513): n equals a,t,g, or c
  misc_feature (559)..(559): n equals a,t,g, or c
  misc_feature (587)..(587): n equals a,t,g, or c
  misc_feature (602)..(602): n equals a,t,g, or c
atggaaaancaggcaaatcctgaaatgggctggaaaaaagggagggacccagcactyccagggagaaaacttggcattycttgggaatctaacaggatgcagtgaacccaagccttttgaagagctcaccaatcagactgcccttgtctatccatgagcagatgtttgatagtattgcggaggccctctagtgggtatgctgccaagcaactggagtggcacttgggctctaatccagttgtctatccctttcaccctggcatttcatcagccaaacaaaaaccaactaactcagaaaaaaaggaaagcccctcaagggtcctttgaccccgatatctacatagatgctatcggggtcccctgaggggtaccaaacraattcaaagctcgaaatcaaatagctgctggattcaagtctgtccttttcttgtggtctactataaataaaaatgtagactggataaattacatatactataaaaaaaaaaaaaaaaaaaaaactcgagggggggnccggtacccaattcggcctatagtgagtcgtattacaatcatgggncgtcgttttacaaagtcgtgactggggnaaaacctggcgttanccaatttaatcggct

SEQ ID NO: 179 - DNA, 2286 bp, Homo sapiens
  misc_feature (2262)..(2262): n equals a,t,g, or c
  misc_feature (2264)..(2264): n equals a,t,g, or c
  misc_feature (2272)..(2272): n equals a,t,g, or c
  misc_feature (2278)..(2279): n equals a,t,g, or c
gctgatgtcgaggttcatcctgaaccacctggtgctggccattccactgagggtgctggtggttctgtgggccttcgtcttgggcctatccagggtcatgctggggcggcacaatgtcaccgacgtagcttttggcttttttctgggctacatgcagtacagcatcgtggactattgctggctctcaccccataatgctccggtcctctttttactgtggagtcaacgatgacaccatctcattgattatggcaccaggaagtctgaaggtttccacattcgatgatgtcaacctaaaccagcagccatcccgcttgtccctcttaggcatttcaggcttcctttgggatttcaggtgtcccatgatcttgatgtgctgctaggctggagcacacactggccattactgaacacagccatattagggaaagcaaaaaaacccaaaaaatcctctattgtatatttattcaacaactgtttatgtttccaggacaactgcaaagaaaacaagctgaggtggttatactgttgctgttaaaagttggtatcagtaagatttgtgttttgtgataatccctaaatcaacataccacttgtaaactgaacttcgagaaagaaacatgatgttcattctgtaaatatacatgcagacaggtcatgtactaatcctagtccttttcctgaggtagattttaaacagtatttttaaagtccaagacataggtttttctagtttattccctgaagatctgttgccacagttgggagatttcttcttaatcctgattttcttggtaagcttttttactttattatctctataatttattatctctatccatatttgtggatcgggtagtgggaaaagagattataatacttgtctttctctcctctccctccatccctcaaaagatctttatgcatttcccactactcccttactgtcttttagcattcagagaaaaagccaacttgcttaaagaggaatcacttaaaaggtaggcatatctaagatgctcatagaagaggaagaatgggacatggccccatgcttatttttgtttacaacgtaacatggcatgagagagggcagagaaactaagttgctggggaaagttagaggaactgaaagtttgggaataggctgaccacatattatgccagtgaccagtatgacaggagatggggccctgctgccagtcatctccactgaataaagaataatgctcctctttcagggtaataaagtggggaaaaggaacgtcttctcaatgcaagaacataagctttctcgtatatacctgtatgctacagtttttcacatggaattccgttttctgaggtacagcacattttaggtaacagtatttaacttgaaattcatcatgggagtctgctgctataccaggcacaagataaaactccaaaatttctgtttacattgacctttacatttaaagctgttcatccatggtgcctccccaaatcataagaccaaagaccaccaaacgcagggtggactctgctcattattctttgacccagaaagactggagaaggtatgtgctttaagtgctgctctacctgaaaagaaatcctttaaattacctatggaagtgatgtcctcagataatcttaatgactattttggcatttataaatagaaatgattatggactttgatctgccatacggaggttcggaacctggagaayggctgtgataagtaggttttgattgagtgaaagcatgagcttgttcagagtgaggggcatagtgaaaaaggaacagccatgcctcawaatcaaatcatttgcrttcccacagcatcctgaataccgactacctcttcacttgctaaagcagctaaactgtgaagctctaagtggtttgggtttgttgtttaaccttagcgagatcctttaactgcagcaatattcaagccagatatttggaagcaaatgatatttcctcttgcagtgtccacaaatctgaatattaggggcatgaaattaggcttaccatctgatttgtaattacaattttggaattctctgttttagttgctgaggcctgagttttctggctcttaaagcatagatcatttcacctgatgtttttgaagcatcctaagtacagtagagtagaaaactgatttctttgttaattgtacactgaataatgccttttaaaaatcaaaataaaattaacaaataatggtgaaaaaaaaaaaaaaaaaaaaaaactcgagggggggcncnaaaacaantcgacnnatagtga

SEQ ID NO: 180 - DNA, 1240 bp, Homo sapiens
  misc_feature (1225)..(1225): n equals a,t,g, or c
gtgaaacgcctgggctcaagctgattcacctgcctccacctcccacagtgctgggattacaaacatgatcccccacgcccagccaacacaaaacttctgatgctctgttttctcatctgtgaactggagctaaggctaagtggtctgtctgtttaataagagtttgaatcagatggcctggcatgaagagtcactggcctgagagaatgtcaggggcatttgtaaatgtgtaaagggctgaaaaatcctgagggattattattattgctattgttgttattattcacagacacatccaacagccattgtctgcctccttatctgtcatgctttctgcacgagcgtcagcctgagcttcaatctgtgtgtatatctgcagcttacgtccttgccacccctccagaacccagtttcatccttgtaggtttttccgaagcaggatttgcacaagtggcgtgttttcttaagtatttattttgcaggccatttactcggcatggctatttttacagtgggtaaggagcaaggctaaaaataacttagctcataaccagacaggttctgcatttgacatttacgtggaattcatttgcatctcatttgttcgcctttctgtttaacaggtagaatgtaagaaagctcagccgaaagaagtcatgttcccacctgggacaagaggccgggcccggggactgccttacaccatggacgcgttcatgcttggcatggggatgctgggtgagtctggacaggaccgcaggtcaccatggactgggagggctatggaggcctctactcccaactgggtcacctaccagtggggcaaactgcttcacctttctaagcctcagtttccttgtctgtagatgaggatgataattccccgttccaagacagttgtgatgattaagtgtgggtgtgtgtgtgtgcatgcatgtgtgtgtgtgtgtgtgtgtttgtatttataatattgccccatgcctggcttataggatatgttagactattttctctcttttccatctccttcctcaaaagaaggaaaagtccccctctattgcctcagccctctcatctgagtgggagttcttaagatgtaaggactcctggctgacttgacttgtgtgggctaaggctacgttttctaaaactkgggagaggagggaagtggtaagggtgggcgataatcctgtctatttaaatgattaacatttttctcttgggntatcaaaatttgcat

SEQ ID NO: 181 - DNA, 997 bp, Homo sapiens
  misc_feature (963)..(963): n equals a,t,g, or c
cccgactctaggccggaagcgcgcggagaccatgtagtgagaccctcgcgaggtctgagagtcactggagctaccagaagcatcatggggccctggggagagccagagctcctggtgtggcgccccgaggcggtagcttcagagcctccagtgcctgtggggctggaggtgaagttgggggccctggtgctgctgctggtgctcaccctcctctgcagcctggtgcccatctgtgtgctgcgccggccaggagctaaccatgaaggctcagcttcccgccagaaagccctgagcctagtaagctgtttcgcggggggcgtctttttggccacttgtctcctggacctgctgcctgactacctggctgccatagatgaggccctggcagccttgcacgtgacgctccagttcccactgcaagagttcatcctggccatgggcttcttcctggtcctggtgatggagcagatcacactggcttacaaggagcagtcagggccgtcacctctggaggaaacaagggctctgctgggaacagtgaatggtgggccgcagcattggcatgatgggccaggggtcccacaggcgagtggagccccagcaaccccctcagccttgcgtgcctgtgtactggtgttctccctggccctccactccgtgttcgaggggctggcggtagggctgcagcgagaccgggctcgggccatggagctgtgcctggctttgctgctccacaagggcatcctggctgtcagcctgtccctgcggctgttgcagagccaccttagggcacaggtggtggctggctgtgggatcctcttctcatgcatgacacctctaggcatcgggctgggtgcagctctggcagagtcggcaggacctctgcaccagctggcccagtctgtgctagagggcatggcagctggcacctttytytatatcacctttytggaaatcctgctntttcatcccaaatttaagggggtttcaagaagaa

SEQ ID NO: 182 - DNA, 1770 bp, Homo sapiens
gctgagtgtgagctgagcctgccccaccaccaagatgatcctgagcttgctgttcagccttgggggccccctgggctgggggctgctgggggcatgggcccaggcttccagtactagcctctctgatctgcagagctccaggacacctggggtctggaaggcagaggctgaggacaccagcaaggaccccgttggacgtaactggtgcccctacccaatgtccaagctggtcaccttactagctctttgcaaaacagagaaattcctcatccactcgcagcagccgtgtccgcaggagctccagactgccagaaagtcaaagtcatgtaccgcatggcccacaagccagtgtaccaggtcaagcagaaggtgctgacctctttggcctggaggtgctgccctggctacacgggccccaactgcgagcaccacgattccatggcaatccctgagcctgcagatcctggtgacagccaccaggaacctcaggatggaccagtcagcttcaaacctggccaccttgctgcagtgatcaatgaggttgaggtgcaacaggaacagcaggaacatctgctgggagatctccagaatgatgtgcaccgggtggcagacagcctgccaggcctgtggaaagccctgcctggtaacctcacagctgcagtgatggaagcaaatcaaacagggcacgaagttccctgatagatccttggagcaggtgctgctaccccacgtggacaccttcctacaagtgcatttcagccccatctggaggagctttaaccaaagcctgcacagccttacccaggccataagaaacctgtctcttgacgtggaggccaaccgccaggccatctccagagtccaggacagtgccgtggccagggctgacttccaggagcttggtgccaaatttgaggccaaggtccaggagaacactcagagagtgggtcagctgcgacaggacgtggaggaacgcctgcacgcccagcactttaccctgcaccgctcgatctcagagctccaagccgatgtggacaccaaattgaagaggctgcacaaggctcaggaggccccagggaccaatggcagtctggtgttggcaacgcctggggctggggcaaggcctgagccggacagcctgcaggccaggctgggccagctgcagaggaacctctcagagctgcacatgaccacggcccgcagggaggaggagttgcagtacaccctggaggacatgagggccaccctgacccggcacgtggatgagatcaaggaactgtactccgaatcggacgagactttcgatcagattagcaaggtggagcggcaggtggaggagctgcaggtgaaccacacggcgctccgtgagctgcgcgtgatcctgatggagaagtctctgatcatggaggagaacaaggaggaggtggagcggcagctcctggagctcaacctcacgctgcagcacctgcagggtggccatgccgacctcatcaagtacgtgaaggactgcaattgccagaagctctatttagacctggacgtcatccgggagggccagagggacgccacgcgtgccctggaggagacccaggtgagcctggacgagcggcggcagctggacggctcctccctgcaggccctgcagaacgccgtggacgccgtgtcgctggccgtggacgcgcacaaagcggagggcgagcgggcgcgggcggccacgtcgcggctccggagccaagtgcaggcgctggatgacgaggtgggcgcgctgaa

SEQ ID NO: 183 - DNA, 1167 bp, Homo sapiens
  misc_feature (432)..(432): n equals a,t,g, or c
gggggtggggcaggcgacggtggggaagatggcgtaccagagcttgcggctggagtacctgcagatcccaccggtcagccgcgcctacaccactgcctgcgtcctcaccaccgccgccgtgcagttggaattgatcacaccttttcagttgtacttcaatcctgaattaatctttaaacactttcaaatatggagattaatcaccaacttcttattttttgggccagttggattcaattttttatttaacatgatttttctatatcgttactgtcgaatgctagaagaaggctctttccgaggtcggacagcagactttgtatttatgttcctttttggtggattcttaatgaccctttttggtctgtttgtgagcttagttttcttgggccaggcctttacaataatgctcgtctatgtgtggagccgaangaacccctatgtccgcatgaacttcttcggccttctcaacttccaggccccctttctgccctgggtgctcatgggattttccttgttgttggggaactcaatcattgtggaccttttgggtattgcagttggacacatatattttttcttggaagatgtatttcccaatcaacctggtggaataagaattctgaaaacaccatctattttgaaagctatttttgatacaccagatgaggatccaaattacaatccactacctgaggaacggccaggaggcttcgcctggggtgagggccagcggcttggaggttaaagcagcagtgccaataatgagacccagctgggaaggactcggtgatacccactgggatcttttatcctttgttgcaaaagtgtggacacttttgacagcttggcagattttaactccagaagcactttatgaaatggtacactgactaatccagaagacatttccaacagtttgccagtggttcctcactacactggtactgaaagtgtaatttcttagagccaraaaactggagaaacaaatatcctgccacctctaacaagtacatgagtacttgatttttatggtataagcagagccttttcttcctcttcttgatagatgaggccatggtgtaaatggaagtttcagagaggacaaaataaaacggaattccatttttctctcactgtaaaaaaaaaaaaaaaaagggcggccgc

SEQ ID NO: 184 - DNA, 1618 bp, Homo sapiens
ccacgcgtccgcaaggagccagaggccatgcagtggctcagggtccgtgagtcgcctggggaggccacaggacacagggtcaccatggggacagccgccctgggtcccgtctgggcagcgctcctgctctttctcctgatgtgtgagatccctatggtggagctcacctttgacagagctgtggccagcgactgccaacggtgctgtgactctgaggaccccctggatcctgcccatgtatcctcagcctcttcctccggccgcccccacgccctgcctgagatcagaccctacattaatatcaccatcctgaagggtgacaaaggggacccaggcccaatgggcctgccagggtacatgggcagggagggtccccaaggggagcctggccctcagggcagcaagggtgacaagggggagatgggcagccccggcgccccgtgccagaagcgcttcttcgccttctcagtgggccgcaagacggccctgcacagcggcgaggacttccagacgctgctcttcgaaagggtctttgtgaaccttgatgggtgctttgacatggcgaccggccagtttgctgctcccctgcgtggcatctacttcttcagcctcaatgtgcacagctggaattacaaggagacgtacgtgcacattatgcataaccagaaagaggctgtcatcctgtacgcgcagcccagcgagcgcagcatcatgcagagccagagtgtgatgctggacctggcctacggggaccgcgtctgggtgcggctcttcaagcgccagcgcgagaacgccatctacagcaacgacttcgacacctacatcaccttcagcggccacctcatcaaggccgaggacgactgagggcctctgggccaccctcccggctggagagctcagctgatacggcatcctgcgagaagacctgccctcctcactgggatccccttcctgcctcctcccagggctctgccagggccttgctcagtcccttccaccaaagtcatctgaacttccgtttcccagggcctccagctgccctcagacactgatgtctgtccccaggtgctctctgcccctcatgcccctctcaccggcccagtgccccgactctccaggctttatcaaggtgctaaggcccgggtgggcagctcctcgtctcagagccctcctccggcctggtgctgcctttacaaacacctgcaggagaagggccacggaagccccaggctttagagccctcagcaggtctggggagctagagcaaaggagggacctcaggccttccgtttcttcttccagggtggggtggcctggtgttcccctagccttccaaacccaggtggcctgcccttctccccagagggaggcggcctccgcccattggtgctcatgcagactctggggctgaggtgccccggggggtgatctctggtgctcacagtcgagggagccgtggctccatggccagatgacggaaacagggtctgaccaagtgccaggaagacctgtgctataaaccaccctgcctgatcctgcccctgcctgaccccgccacgccctgccgtccagcatgattaaagaatgctgtctcctcttggaaaaaaaaaaaaaaaaa

SEQ ID NO: 185 - DNA, 1338 bp, Homo sapiens
cccacgcgtccggttcccccatctgtctctcaggagcgagatctgatcgctgaatttgcccaagtcacaaattggtccagctgctgcttgcgtgtctttgcatggcacccccacaccaacaagtttgcagtggccctgctagatgactcagtccgtgtgtataatgccagcagcaccatagtcccctccctgaagcaccggctgcagcgaaatgtggcgtctctggcctggaagccccttagtgcctctgtcttggctgtggcctgccagagctgcattcttatctggaccctggaccctacctccttgtctacccgaccctcttctggctgtgcccaagtgctgtctcaccctgggcatacacctgttaccagcttggcctgggcccccagtggggggcggctgctctcagcttcaccgtggatgctgctatccgggtatgggatgtctcaacagagacctgtgtcccccttccctggtttcgaggaggtggggtgaccaactgctctggtccccagacggcagcaaaatcctggctaccactccttcagctgtctttcgagtctgggaggcccagatgtggacttgtgagaggtggcctactctatcagggcgctgtcagactggctgctggagcccagatggcagccgactgctgttcactgtattgggagagccactgatttactccctgtcttttccagaacgttgtggtgagggaaaggggtgcgttggaggtgcaaagtcagcaacgattgtggcagatctgtctgagacaacaatacagacaccagatggtgaggagaggcttgggggagaggctcactccatggtctgggaccccagtggggaacgtctggctgtgcttatgaaaggaaagccaagggtacaggatggtaaaccagtcatcctcctttttcgcactcgaaacagccctgtgtttgagctccttccctgtggcattatccagggggagccaggagcccagccccagctcatcactttccatcttccttcaacaaaggggccctgctcagtgtgggctggtccacaggccgaattgcccacatcccgctgtactttgtcaatgcccagtttccacgttttagcccagtgcttgggcgggcccaggaaccccctgctgggggtggaggctctattcatgacctgcccctctttactgagacatccccaacctctgccccttgggaccctctcccagggccaccacctgttctgccccactccccacattcccacctctaagaataaataagttttccttttgttttccaaaaaaaaaaaaaaaaaaaaaaaaaaaaaaaaaaaaaaaaaaaa

SEQ ID NO: 186 - DNA, 813 bp, Homo sapiens
gaagaaggtacgctgcaggtaccggtccggaattcccgggtcgacccacgcgtccgccaaaagcagacatagcttcagatgcagcttgatccagggctcagatgccatgatcagaatccaattcttgcatctgtttctttgggttggcttcattttcaggcagcccccttcctcatatcctcaagatggcagagacagcccatggtctttcccttgcagagacagatcaccaggaaacaatacctctatccctagccatgaaacagtcttgaactttattctgacttgatcagccaagtccctgttggaaccatcactgcctagcttaggcctgagacagtgctgcacctctactaccaaaggccgggctggccttccctaaagtgtatgtgctgcgtgggggagaggtacggatctgaaccaaaacgagggctgtccagcgtcagcaaatatctcccgcagtcccagtgcctccagcaggaggcaaagcatcaacccctccgtctggctcctctactgaaaattccctcagcagcctcacaggccttaggcttgtcttagctacttcttcatctacttttttgctttcttaattatttttcttttcttttttcttattttattttattttattttagatggagtttcgctccgtcgcccaggctgaagtgcagtggcgtgatcttggctcgttgcaacctccacctcccgggttcaggagaatcgcttgagccccaggaggcggaggttgtgggaagccaagatcgcaccactgcactccagcctgggcaacaagagcagaacgccatctca

SEQ ID NO: 187 - DNA, 2081 bp, Homo sapiens
  misc_feature (538)..(538): n equals a,t,g, or c
gggttctcaatggaaaaatattggtagacatcagcaacaacctcaaaatcaatcaatatccagaatctaatgcagagtaccttgctcatttggtgccaggagcccacgtggtaaaagcatttaacaccatctcagcctgggctctccagtcaggagcactggatgcaagtcggcaggtgtttgtgtgtggaaatgacagcaaagccaagcaaagagtgatggatattgttcgtaatcttggacttactccaatggatcaaggatcactcatggcagccaaagaaattgaaaagtaccccctgcagctatttccaatgtggaggttccccttctatttgtctgctgtgctgtgtgtcttcttgtttttctattgtgttataagagacgtaatctacccttatgtttatgaaaagaaagataatacatttcgtatggctatttccattccaaatcgtatctttccaataacagcacttacactgcttgctttggtttactccctggtgttattgctgccattctacaactgtaccgaggncacaaaataccgtcgattcccagactggcttgaccactggatgctttgccgaaagcagcttggcttggtagctctgggatttgccttccttcawgtcctctmcmcacttgtgattcctattcgatattatgtacgatgragattgggaaacttaaccgttacccagscaatactcaagaaggagaatccatttagcacytcytcagcctggctcagtgattcatatgtggctttgggaatacttgggttttttctgtttgtactcttgggaatcacttctttgccatctgttagcaatgcagtcaactggagagagttccgatttgtccagtccaaactgggttatttgaccctgatcttgtgtacagcccacaccctggtgtacggtgggaagagattcctcagcccttcaaatctcagatggtatcttcctgcagcctacgtgttagggcttatcattccttgcactgtgctggtgatcaagtttgtcctaatcatgccatgtgtagacaacacccttacaaggatccgcagggctgggaaaggaactcaaaacactagaaaaagcattgaatggaaaatcaatatttaaaacaaagttcaatttagctggatttctgaactatggttttgaatgtttaaagaagaatgatgggtacagttaggaaagtttttttcttacaccgtgactgagggaaacattgcttgtctttgagaaattgactgacatactggaagagaacaccattttatctcaggttagtgaagaatcagtgcaggtccctgactcttattttcccagaggccatggagctgagattgagactagccttgtggtttcacactaaagagtttccttgttatgggcaacatgcatgacctaatgtcttgcaaaatccaatagaagtattgcagcttccttctctggctcaagggctgagttaagtgaaaggaaaaacagcacaatggtgaccactgataaaggctttattaggtatatctgaggaagtgggtcacatgaaatgtaaaaagggaatgaggtttttgttgttttttggaagtaaaggcaaacataaatattaccatgatgaattctagtgaaatgaccccttgactttgcttttcttaatacagatatttactgagaggaactatttttataacacaagaaaaatttacaattgattaaaagtatccatgtcttggatacatacgtatctatagagctggcatgtaattcttcctctataaagaataggtataggaaagactgaataaaaatggagggatatccccttggatttcacttgcattgtgcaataagcaaagaagggttgataaaagttcttgatcaaaaagttcaaagaaaccagaattttagacagcaagctaaataaatattgtaaaattgcactatattaggttaagtattatttaggtattataatatgctttgtaaattttatattccaaatattgctcaatatttttcatctattaaattaatttctagtgtaaaaaaaaaaaaaaaaagggcggccgc

SEQ ID NO: 188 - DNA, 312 bp, Homo sapiens
aattcccgggtcgacccacgcgtccgtgatgagtggatttgtactcttacccaggtcctgagggccagcccacccagcatccccacccctgatgacgctgtccctacaactggctgaactggtgcattttgtgtgtgccttccagagccagtggactggtgtgtatccaatgatgccacctctgaaacctacagaaccactatgctttgcatgtgtaccctgcagggtctgagggccaggctgtctggtagctctgctcctgggtgacagagcaagactctgtctcaaaaaaaaaaaaaaagggcggccgct

SEQ ID NO: 189 - DNA, 864 bp, Homo sapiens
ggcacgagcggaccgggcccgcggggctgctgcggggcgatcgggccgggccgctgccgcgccatggactcccgtgtccagcctgagttccagcctcactgagtggccacccccaaagtgctgccagccgaggaagcccccagcactgaccatgtctattatggaccacagccccaccacgggcgtggtcacagtcatcgtcatcctcattgccatcgcggccctgggggcctttgatcctgggctgctggtgctacctgcggctgcagcgcatcagccagtcagaggacgaggagagcatcgtgggggatggggagaccaaggaacccttcctgctggtgcagtattcggccaarggaccgtgcgtggagagaaaggccaagctgatkamtcccaaacggsccggaartycacggstgavccaggatgcaaaggccycctggtccctgtttgcaagccggccaagarggggctgggaggggcaaaamccatacggatgcgctgctgtctgagaggaagggctgacacttgctggcatggcctctgcgggtttcgtccatcgcatgcactgatgcccggggacttggctgtcctgggcttcccctcggcctccaggtgaggctgcccattgcaggcactgggtaggcctgaccttgctggggctcatggccctgtagcgcttttgttacttgaatgtctagctgagcctgtttttgatggagctactactgtaatgcgtgaactaacaaacctgtgaactgtaaataggcccctggaagcacgtgcttaagcccttttgctgatttttaaaaatatcatctagcgcaaaaaaaaaaaaaaaaaaaaaaaaaaaaaaaaaaaaaa

SEQ ID NO: 190 - DNA, 1267 bp, Homo sapiens
ggcacgagctgcaggggcggggcggcgccaagcgcagggagcccggctgagtggcagcccagattgaagatggatacgtgacaatcccagggaccgctgcactgacttcatttccttagacaagacacagtgtagggcccggcccgtgttggccccaggactcctttggaatatagctgtggacaatgaatcctgcgagcgatgggggcacatcagagagcatttttgacctggactatgcatcctgggggatccgctccacgctgatggtcgctggctttgtcttctacttgggcgtctttgtggtctgccaccagctgtcctcttccctgaatgccacttaccgttctttggtggccagagagaaggtcttctgggacctggcggccacgcgtgcagtctttggtgttcagagcacagccgcagctgtgggctctgctgggggaccctgtgctgcatgccgacaaggcgcgtggccagcagaactggtgctggtttcacatcacgacagcaacgggattcttttgctttgaaaatgttgcagtccacctgtccaacttgatcttccggacatttgacttgtttctggttatccaccatctctttgcctttcttgggtttcttggctgcttggtcaatctccaagctggccactatctagctatgaccacgttgctcctggagatgagcacgccctttacctgcgtttcctggatgctcttaaaggcgggctggtccgagtctctgttttggaagctcaaccagtggctgatgattcacatgtttcactgccgcatggttctaacctaccacatgtggtgggtgtgtttctggcactgggacggcctggtcagcagcctgtatctgcctcatttgacactgttccttgtcggactggctctgcttacgctaatcattaatccatattggacccataagaagactcagcagcttctcaatccggtggactggaacttcgcacagccagaagccaagagcaggccagaaggcaacgggcagctgctgcggaagaagaggccatagctgctccagccggggctccggggcggcagcagagctggcacaccgattctgggaagccccgcgaatgatggcttttgaattaatgaggcagtgaatgttttgtgtttacttctaagggaaatactaactttctttcgcattagtattaattttgaagtagctacaaagtatttttaagaaattataattttatgactgtcaaaaaaaaaaaaaaaaaaaaaaa

SEQ ID NO: 191 - DNA, 1258 bp, Homo sapiens
  misc_feature (1)..(1): n equals a,t,g, or c
  misc_feature (1196)..(1196): n equals a,t,g, or c
  misc_feature (1200)..(1200): n equals a,t,g, or c
  misc_feature (1237)..(1237): n equals a,t,g, or c
nagatggcgctacgtctgctgcggagggcggcgcgcggagctgcggcggcggcgctgctgaggctgaaagcgtctctagcagctgatatccccagacttggatatagttcctcatcccatcacaagtacatcccccggagggcagtgctttatgtacctggaaatgatgaaaagaaaataaagaagattccatccctgaatgtagattgtgcagtgctcgactgtgaggatggagtggctgcaaacaaaaagaatgaagctcgactgagaattgtaaaaactcttgaagacattgatctgggccctactgaaaaatgtgtgagagtcaactcagtttccagtggtctggcggaagaagacctagagacccttttgcaatcccgggtccttccttccagcctgatgctaccaaaggtggaaagtcctgaagaaatccagtggtttgcagacaaattttcattccacttaaaaggccgaaaacttgaacaaccaatgaatttaatcccttttgtggaaactgcaatgggtttgctcaattttaaggcagtgtgtgaagaaaccctgaaggtcgggcctcaagtaggtctctttctagatgcagtcgtttttggaggagaagactttcgagccagcataggtgcaacaagtagtaaagaaaccctggatattctctacgcccggcaaaagattgttgtcatagcgaaagcctttggtctccaagccgtagatctggtgtacattgactttcgagatggagctgggctgcttagacagtcacgagaaggagccgccatgggcttcactggtaagcaggtgattcaccctaaccaaattgccgtggtccaggagcagttttctccttcccctgaaaaaattaagtgggctgaagaactgattgctgcctttaaagaacatcaacaattaggaaagggggcctttactttccaagggagtatgatcgacatgccattactgaagcaggcccagaacactgttacgcttgccacctccatcaaggaaaaatgatctgttaaatgaagctgtcatcaggctaaagggtattgaagctgcagagggatcaacttgtgcttgccagaggacgccaatgaagtttgaaacaccaacaatcagagattttgtttctgttcctcattaaatcatgagcttttgtgcccgagactctggacggactgttncttnaggaatttaaccggatgggaagttttttaaacttttncaaccaacttttttaaggccc

SEQ ID NO: 192 - DNA, 883 bp, Homo sapiens
  misc_feature (19)..(19): n equals a,t,g, or c
gtcaccgtgggcgtttaantatgatccccggctcagattcgcagactgcactgaacttcggctctacgttgatgaagaagaagtctgatcctgagggtcccgcgctgctcttccctgagagtgaactttccatccggataggtagagctgggcttctttcagacaagagtgagaatggtgaggcatatcagagaaagaaggcggcagccactggccttccagagggtcctgctgtccctgtgccttctcgagggaatctggcacagcccggcggcagcagctggaggaggatcgcactgctcatcttggccatcactatacacaacgttccagagggtctcgctgttggagttggatttggggctatagaaaagacggcatctgctacctttgagagtgccaggaatttggccattggaatcgggatccagaatttccccgagggcctggctgtcagccttcccttgcgaggggcaggcttctccacctggagagctttctggtatgggcagctgagcggcatggtggagcccctggccggggtctttggtgcctttgccgtggtgctggctgagcccatcctgccctacgctctggcctttgctgccggtgccatggtctacgtggtcatggacgacatcatccccgaagcccagatcagtggtaatgggaaactggcatcctgggcctccatcctgggatttgtagtgatgatgtcactggacgttggcctgggctagggctgagacgcttcggaccccgggaaaggccatacgaagaaacagcagtggttggcttctatgggacaacaagcttctttcttcacattaaaacttttttccktcctctcttcttcaaaaaaaaaaaaaaaaaaaaactcgag

SEQ ID NO: 193 - DNA, 1465 bp, Homo sapiens
ggcacgagcgagccaagtttgcaccactgcactccagcctgggcgacagagcaagactcagtctcgaaaaaaaaaaagttggaagcagaagtaaaaaacatggtaaagaatgagaactaaataaatataataattgagaggtctgcattagatgtggcagggagaacaagcaaaaagagatttcagagaagatcactggaattggcagaggccttgaagggcagagtctagcatacagaagatgtaaagccacattctgtgaaggtaagtagatgtgtttacctcttttgcactgtactggtgcattatggggtaaatrtgtattacttttcctgtattgcttagcacagagttttgcctatagcaggcaccagactgtgggcttggtagtacatgactattggtgattacagatcaaaaaggacttgaaatgatcagtttaaggtcttgatgggtattgaagactcaaaggatgatggcaccctgggagtgatccacagaaggacagattatttgaagatgttaataactaaagacaacatggatgttaaatgatgaaaaaaagttggatggaaaataaaccattggatctgcytctggagtccaagaagaatattattcttcctacctcccccttactctggctcttcctattgtagccacatgggtcagtaatgccattgaaaaacaaaattttagactaagtggggtcgcagaaattttggtctatcttaaattgatgacatcttattaaagaatytattgtataaagtgtgcttattctggcatttttttaatgaagaaaaagtgtaattcagtgcacatttatgaatttcaaagatcaataaaaatgggcaaagtatatgaacgcataatccatagaagaagatatctgacaaatgcagttcaataaatatttttttaaataaaaattagcctgtggtaagaattgaaatggagaaagaaatagaaggtagccaggttacctacagctttgtatatgacactatagagctaggactttattccatagatgagggaagtctgctaaagtgtctacattgaacccattattttgctagcattgtagttgatgtacctaaaacagacttgagccggtagagtaagtaggcagacttgtccaagtgagaaaaagatgaaactgtggtgaggataaagagagaaaaggagcagatttaagaaatattaaaacttgaaagtactaagacttgatgatgaactagatgtgttagataagagatagcatggagtctagtaaaagttctgtttttctcactcgtgtgactgcctcaataacacaaagcttgataggaaataaacatgagatagcacatggatctattacaagtttttgaaattgagcttgaaaagctacttcaaaaaataaattctaggccaggtgtgagyccatgcgcttgattaaaaaaaaaaaaaaaaactcgta

SEQ ID NO: 194 - DNA, 996 bp, Homo sapiens
  misc_feature (834)..(834): n equals a,t,g, or c
  misc_feature (996)..(996): n equals a,t,g, or c
gaattcggcagagggaatctgggctctgtggaagaatagcacttatctggattctggccttgtgccatgaacctaaagcacatccgtttggtctgccagtaggctggtatggcatgctgtaacccctataaatattatttctatttatcctgctcagtgtgtttcctgtaacaaatcgttcaagaaactctggtcccttcatgaacatatcaagatcgtccatggatatgcagaaaagaaattttcctgtgaaatttgtgagaagaaattctataccatggctcatgtgcggaaacacatggttgcacacacaaaagacatgccattacatgcgaaacctgtggaaaatcattcaaacgcatatgtcactcaaggtgcactccktgcagcattctrgagagaagccctttagatgcgagaactgtgacgaaaggtttcagtacaagtaccagctacgctcccacatgagcattcatattgggcacaaacagttcatgtgccagtggtgtggcaaggatttcaacatgaagcagtacttcgacgaacacatgaaaacacacactggagagaaaccctttatctgtgaaatctgtggcaaaagcttcaccagccgccccaacatgaagagacaccgcagaactcacacaggcgagaagccctatccatgtgatgtgtgtggccagcggttccgcttctcgaacatgcttaaggcccacaaggagaagtgctttcgggtgaccagccccgtggaatgtgccacctgctgtccagatcccacttacaacttccccagccaccccagttccttctgtggtgaacacagccacaaccccnaccctccaatcaatatgaatcctgtaagcactcttcccctcgggccatcccccaccccttctcacaccgcacatccacccacaccctcaccacccacaccamcttcccatccctccaktccctcacctcccgccacctccagctctctttaagagtgagccn

SEQ ID NO: 195 - DNA, 413 bp, Homo sapiens
  misc_feature (1)..(1): n equals a,t,g, or c
  misc_feature (248)..(248): n equals a,t,g, or c
  misc_feature (328)..(328): n equals a,t,g, or c
  misc_feature (357)..(357): n equals a,t,g, or c
  misc_feature (372)..(372): n equals a,t,g, or c
nggcccattcgctgttgggtcttctgctagggaggatgtcgggttcgtcgctgcccagggccctggccctctcgctgttgctggtctctggctccctcctcccagggccaggcgccgctcagaacgtgaagagtacaatctggacaggatcagaagtagagaatgaagttgtaaagagaaaggggaaagacagaagaaaggctgcagtagtacaaggagaaaagcaggatgcaagattgaaggaatgnaatctttgtttgaggagcattccggaaaattataagctgttcagaaagggttaattagaccagggaccttttaagttaanttcacactcaaagttaaaataatgttggngattcactcctgtgnaaaattgggttagttttcatttgcccttttaaacaaaactt

SEQ ID NO: 196 - DNA, 1369 bp, Homo sapiens
cccacgcgtccgcccacgcgtccggctggcaagatggcgggaggggtgcgcccgctgmggggcctccgcgccttgtgtcgcgtgctgctcttcctctcgcagttctgcattctgtcgggcggtgaaagtactgaaatcccaccttatgtgatgaagtgtccgagcaatggtttgtgtagcaggcttcctgcagactgtatagactgcacaacaaatttctcctgtacctatgggaagcctgtcacttttgactgtgcagtgaaaccatctgttacctgtgttgatcaagacttcaaatcccaaaagaacttcatcattaacatgacttgcagattttgctggcagcttcctgaaacagattacgagtgtaccaactccaccagctgcatgacggtgtcctgtcctcggcagcgctaccctgccaactgcacggtgcgggaccacgtccactgcttgggtaaccgtacttttcccaaaatgctatattgcaattggactggaggctataagtggtctacggctctggctctaagcatcaccctcggtgggtttggagcagaccgtttctacctgggccagtggsgggaaggcctcggcaagctcttcagcttcggtggcctgggaatatggacgctgatagacgtcctgctcattggagttggctatgttggaccagcagatggctctttgtacatttagctgtggtgtgtgcttcagaaaggagcagggcttagaaaaagcccttttgtccgtagagttgatgtggtgtgagtgatatatttctatgtttttaatgtacagcatctgtactttgtttgccttgataaaggtaagataaatgaaacgctgaactatgctaatctggaatttgtttttatttgcctgaaatatatttttttctgtgaaaaaattaaaacgtacttaagccaggagaatgaattatacagtgattgaaaatccatttaattcctatgacttttgttttgtattgcccaagtcaaactacatcacttgtatctccagcccaaatgtagtctgccttgaaaagtctttcagctgtgactgcaggaagtgggagtgtttttattgttagctaattgctgtgactgcaggaagtgggagtgtttctgttgttggctaattgaagttattaggctcagcttcagtcatgtgtaagttttgcagtgtaatacatatgtagtctggtctgtatatatgaaaatttgaattaaactgcagaatgtttatgtctagttatggtttaaattttcttagtagtatataaaaggtaagagtactgaaaaattaataaaattgcaagttaaraaaaaaaaaaaaaaaaaaaaaaaaaaaaaaaaggagggggggc

SEQ ID NO: 197 - DNA, 596 bp, Homo sapiens
  misc_feature (4)..(4): n equals a,t,g, or c
  misc_feature (8)..(8): n equals a,t,g, or c
  misc_feature (28)..(28): n equals a,t,g, or c
  misc_feature (57)..(57): n equals a,t,g, or c
  misc_feature (61)..(61): n equals a,t,g, or c
gganaccngctttgccccttggtttccncaaagctcgaatttaccctcactaagggnaccnaaagctggagctcccaccgcgttggcggcccgctctagaactagtggaccccccgggctgcaggaattcggcacgagtcctgacctcaggtgatccacccacctcggcttcccaaagtgctaggattataggcttgagctactgtgcccggcccatggtgtttttctttagggctcttcctacagccttgagaagtagataggcatcagagtatggtactataggaatcagaaaaattcaaaacaaatgtggattaagtgtttaggctctatgtggctcacgcagccagaatccttaagtctgtgtgtttctgtgtctcaagactgggctcacattctggctttgtccataacaatgctctgggatttcagggagttccctcatttgtaaaatgagggggtcagagcaggtgatatccatgtttcttccctttctgatattgttgtctgtggcatattctttgtatggcgaatttaataaattatattaatgtgtctctttgaaaaaaaaaaaaaaaaaaaaaaaaaaactcgta

SEQ ID NO: 198 - DNA, 629 bp, Homo sapiens
ggcacgagaacctttggggctgacacaagatcctttagtgtttgggatgacctctttcctgcagacttcttcccctatccctaactcatgcatggaaaacgtttgtcaggctggtttcccgagcctcctgcacctcaacatcacgctcacccttttgggtttagcccagtgttatttagcaaatttctccagctgcagggaaggatcagagcactatctttttttttttttttttctcctggagccaggactgcacaaggcaatggccaaatttagttgaattcagcctaccatcctttgctgatgactcagctctatgccaagtactggagccacagagatgggtcagtcccagcccctgtcctcaggaagcccatggtcagggaaacgttgtagggataagtaatagagggcagttgccttcagggctcctggtggctgctggtccctatggtgccttgatgtgaattagaagacggtgccctttccaggtggattcagacctacactagaacgcacagctttgggagtgacacacaggttggattttagcaccccttgccccttggccagaggtgccctgctgcacggccatacgctgcagcctcgagggacacacaggccaaagt

SEQ ID NO: 199 - DNA, 2497 bp, Homo sapiens
ctgagccactgtgcccagcctcggctcaggtttttcaatacagtcttgaccttggcattcagtatcctcacagcatggttctaattaactttctagctctatttcccttttcctgctccctctctctacaactagtctttctctgattgccccgccctcaacccatctaaactagaccccagggaagcaccttggtccccttcctctctcccactcaccatccaaccaatcaccagagcctgtacattctatattttcaacatcgattcaattgtctacttctttctagcctgccctctctgactgggactccttgagccagcctgatcaccccaatccatccctcacactgtgcccatctttctgaagtaggaatctgatcacaccaccctgctaaaaacactctggttctccccacggcatgtggtgcccttgtatagctggcaaagccttgcatggcacggccccagcctgtgcttcaactcaattgcccgactctctccagctctgctgagccacctaagtcacagatggtttctcctctcatctctgctctcttccatgtgccatttctgtggcttggaatgttcttccctcattctctttctggccctttcccgtcacaccttagacgtgcatcttcctctcgaaaacctctagtgaagcctcccagggccaggcagtaccctcctctggcttcttctggatacagaggaagaatctgagcatcgattctccatctcagcaggcctctgtgtgcctgctgactccgactagaccagagatccgtaaggacagggatcgagttttttttcttttaattcactgcctcaaaaatcctctgtgcattacctattcatcctcttctctcccttaacctgaaccagtgatcttactgtctccatcattgtttttttcttttcttttcttttcttttttttttttgaggtggagtctggctcttcacccaggctggagtgcagtgatgcgatctcgactcactgcaacctccatctcctgggttcaagcgattctcctgcctcagcctccccagtagctgggattacaggcatgcgctaccatccccaactaatttttgcctccataattttgccttttctagaatgtcatacaggtggaattactcagtatgctgcctttttcagattggcttctttcacttagtaatatgcttgttttttgagacagggtcttgctctgtcgcccaggctagagtgtggtggtgcgatcttagctcactgaaacctccacctcccaggttcaagtgactctcctgcctcagcctcccgagtagctgggactacaggcacgtgccaccatacccggctaatttgtggatttttagtacagacggggtttcgtcatgttggccagggtgttgttgaattcctgacctcaagtgatccacctgcctcagcctcccaaagtgttgcgattacaggtgtgagccactgcgccaagcctcatttagtaatatgcatttaaactttctccatgtctttaatggcttgatagctcatttatttttatcatggaatatttcattgtctggatggaccacagtttatttctccattcacctactgaaggacatctcggttgcttctaagttttggcaattatgaataaagctgctataaccatcaagtgcaggtttttgtgtggacctattatcaactaattcgggtaaatctcaaggagtgcaattgctggatcacacagtaagagtgtgtttagttttaagtggctgtgccattttgcattcccaccagcaatgaatgagagtttctgttgctccacattctcactaccattcggtgttgtcagtgttttgcattttggccattctagtaggtgtttacatggtatctagtcatttgaatgggcatatgatgtggaacatctttttttttttaattttattattattatactttaagttttagggtacatgtgcacaacgtgcaggtttgttacatatgtatacatgtgccatgttggtgtgctgcacccattaactagtcatttagcattaggtatatctcctaatgctattggaacatcttttcatgtgtttatttgccatctgtatatcttccctgatgagttggggatgcattctttccatctcagagtccccagaaactaacatagcagttggtacagagttggtgctcaacaaacatcagcttaggaactatgtcctatgtttttttgtttttttttttttttaaaaaggaatgtgagctgttcccaaaacgtatgtccttcccccatgcctctaccctgcccttccacaaactttctgatcttcagcacacactacccaaccatcaaggctgagacttcccgtggccagcagtgtctcatgctggcttcaagccccacagcactgcttttttcaacttctcttgtggtttagactgtctttagcccagcaagagaattcgatatcaagcttatcgataccgtcgac

SEQ ID NO: 200 - DNA, 1217 bp, Homo sapiens
tctggaacctctctcttaattcatatttcccgtaagtctgtccatctgttgtgtggaatctcagtttgtgatattggatagatgcaaataagcaaagctgttacttttcatagtttcaaatgaaaaactcaacatcactactgtataaattattttctagtctatctgtgtttatttttaaattccttttactattctatacattgcacattgctctgggggtaaaaatccartataaaccattagctcattttattgaccattcttgtattcagcaagtatcccaagtacagtggtccataccttgaattttttttcactttttaagtgagatataatttacataccataacaacttagtgggtttcagttatttcaaatacaaggttgtwcatatatcatcactgtctaattccagaacattttatttttattttttttcagcagtggggtcctgccatgttgcccaggctggtcttgaactcctgggctcaagtgatcctcctgcctcagtctcccaaagtcctgggattacaggtgtgcgccaccacacccaccctcaaaacatttttatttcctaaaaaagaaaccccacatccataggcagttccacattccgttcttcctatgatccagctcttggcagctactatagttkgtttyctgtttctgtggatttgtctattctggacatagcatgtaattggagtcatacaatatatggctttttgtgcctggcttctttcacttagcataatgtttttaagattcattcatgttgtagcattatcagcactttgtttcttttatggctaaataacactgcattgtgtgsacataccacattttgtttatccgttaatcagttgatggatatttgggttgtttccacttcggggctattatggatgatgcttctctgaatatttgtgtacaagtttttgtgtggacatttgtttttagttcacttgagtatgtacctaggatggaattactgggtcatgtggtaactgttttaatttcgtaggaactgccaaattgtttcctaaagtggctacggtattttacattcccatcagtactgtatgacagttccgtttatccacatccactccaacacttgttgttatctgttttgattatataatagctattttagtgggtatgaagtcgtatttcaaaaaaaaaaggaattcgatatcaagcttatcgatacc

SEQ ID NO: 201 - DNA, 1563 bp, Homo sapiens
  misc_feature (14)..(14): n equals a,t,g, or c
aattcggcacgagncagaaacctgcggaaaatggtagcgatggcggctgggccgagtgggtgtctggtgccggcgtttgggctacggttgttgttggcgactgtgcttcaagcggtgtctgcttttggggcagagttttcatcggaggcatgcagagagttaggcttttctagcaacttgctttgcagctcttgtgatcttctcggacagttcaacctgcttcagctggatcctgattgcagaggatgctgtcaggaggaagcacaatttgaaaccaaaaagctgtatgcaggagctattcttgaagtttgtggatgaaaattgggaaggttccctcaagtccaagcttttgttaggagtgataaacccaaactgttcagaggactgcaaatcaagtatgtccgtggttcagaccctgtattaaagcttttggacgacaatgggaacattgctgaagaactgagcattctcaaatggaacacagacagtgtagaagaattcctgagtgaaaagttggaacgcatataaatcttgcttaaattttgtcctatccttttgttaccttatcaaatgaaatattacagcacctagaaaataatttagttttgcttgcttccattgatcagtcttttacttgaggcattaaatatctaattaaatcgtgaaatggcagtatagtccatgatatctaaggagttggcaagcttaacaaaacccattttttataaatgtccatcctcctgcatttgttgataccactaacaaaatgctttgtaacagacttgcggttaattatgcaaatgatagtttgtgataattggtccagttttacgaacaacagatttctaaattagagaggttaacaagacagatgattactatgcctcatgtgctgtgtgctctttgaaaggaatgacagcagactacaaagcaaataagatatactgagcctcaacagattgcctgctcctcagagtctctcctatttttgtattacccagctttctttttaatacaaatgttatttatagtttacaatgaatgcactgcataaaaactttgtagcttcattattgtaaaacatattcaagatcctacagtaagagtgaaacattcacaaagatttgcgttaatgaagactacacagaaaacctttctagggatttgtgtggatcagatacatacttggcaaatttttgagttttacattcttacagaaaagtccatttaaaagtgatcatttgtaagaccaaaatataaataaaaagtttcaaaaatctatctgaatttggaattcttctggtttgttctttcatgtttaaaaatgatgtttttcaatgcatttttttcatgtaagccctttttttagccaaaatgtaaaaatggctgtaatatttaaaacttataacatcttattgttggtaatagtgctttatatttgtctgattttatttttcaaagttttttcatttatgaacacattttcattggtatattatttaaggaatatctcttgatatagaatttttatattaaaaatgatttttctttgcttaaaaaaaa

SEQ ID NO: 202 - DNA, 756 bp, Homo sapiens
  misc_feature (230)..(230): n equals a,t,g, or c
  misc_feature (755)..(755): n equals a,t,g, or c
gaattccaatgtccacaggtgatgggagagatgctgagaaagggtggccagtgagtgaggaggaaaaccagaggagtgtgtatcctgggtaccctgaatgtgatgagcgacaagctgtcccccagcactgtgccattgcttctcccagttctcttcaaagtcaccatcctgcttcagcgtgtgtgcccagaagatagcccttcctcttctgtgcttccagaatccgtagncagggaataggaatacatggacaagtagcatgcagtgcagtgagaatgtataacaacagatgactctggggaccaaaatcaaatggggccagctacaaagagggcaggaaatccccacaggtgattttactgtgaggaattttatgaggttcagcatcatatattgttaggagaaaatgctgttttgataagcagagatatgagaaaagtaaacgggaactatgatttagagatctcatctgrttactttgtcctattcycagtttwattactaaagagcagtaaagccaaggagaaagtagtaaagattagatgaatggttagcatgtgaaacctgaaaggaaccagagtgatttccctcgaggaacaaatgcacttctcttacatatgaaagatgatgtgttctgtgttcccatagaatctagggaaagaaaaagtgagcagatactctgatatgagcaatataacttaggtgtaaaaaaaaaaggaattcgatatcaagcttatcgataccgtcgacctcgna

SEQ ID NO: 203 - DNA, 1402 bp, Homo sapiens
ccagtgtcggtctatccaaaaaatgtactaacagatatgtaaaccctgatgaatacagtatgtgttatgagaagtggcccaacgaagcagctcatccaagtgagattctgaagttgggctggcgagtacacgaatggctttcttactagagagaagtgggaccctgctaatctgtagcatgtggtggcatcatggttactcaaatatcactggaacagaaggtgaaagaagaaatctgaagagaaataaaacaaattttcggcggttccaagatggccgaataggaacagctccagtctacagctcccagtgtgagagatgcagaagatgggtgatttctgcatttccaactgagcaaacggcacaccagaagattatatcccatgcctggctgggagggtcccatgcccacggagcctcgctcattgctagcacagcagtctgagatccatctgcaaggtggcagtgaggctgggggaggggcacccaccattgctgaggcttgagtaggtaaacgaagcagccaggaagctcgaactgggtggagcccaccgcagctcaaggaggcctgcctacctctgtagactccacctctcggggcagggcatagccaaacaaaaggcagcagaaacctctgcagacttaaatgtccctgtctgacagctttgaagtgagtagtggatctcccagcacggagtttgagatctgagaacggacagactgccccctcaagtgggtccctgacccctgagtagcctaactgggaggcaccctccagtaggggcagactgacacctcacacagctgggtacccctctgagatgaagcttccagaggaacaatcaggcagcaacatttgctgttcagcaatatttgctgttctgcagcctctgctgctgatacccaggcaaacagggtctgcagtggacctccagcaaactccaacagactggcagctaagggtcctgactgttagaagaaaactaacaaacagaaaggacatccacaccaaaaccccatctgtaagtcaccatcatcaaagaccaaaggtagataaaaccacaaagatggggaaaaaacagagcagaaaagctgaaaactctaaaaatcagagcacctctccccctccaaaggaacacagctcctcgccagcaacggaacaaagctggatggagaatgactttgacgagttgagagaagaaggcttcagaagatcaaacttctccaagctaaaggaggaagttcgaacccatcgcaaagaagctaaaaaccctgaaaaaagattagacgaatggctaactagaataaccaatatagagaagtccttaaatgacctgatggagctgaaaaacatggcgcgagaactacatgacaaatgcacaagcttatcgataccgtcgac

SEQ ID NO: 204 - DNA, 1417 bp, Homo sapiens
tttttttttgattaaaaaaatttaaaaaattataaaatgatgtcctatatgagtttaatacatgacgttggaggagcatagagatagacctagactaggcatgtgtatgtgtgtgtgtgcatgtgtgtatgcatgcatgcttatgcatgtgtgtgtgcatgcatgcttgtgtgtgtgtgtgtgtgtgtgtgtagagccttggtcatcccgacagagcaaagacacaggagggtggcacatggaagaacaagtgactccaccctcccttgcacagttaaaatctggccaagtgagaggggagatgggagaggggagaggggagaaaggagaagaggcactgactggaggggctgaagctttgtccctcctgggcaggcgttctccatccacacccctcttcttggatagagaggataagcaggccaaagatgcacgaaacctgagttccactgtagctccagacttctagaaaagtcaacagcccctgtatctctagctgatcctctgttgttcaatgtctgcattaccgcactgggagacacttgacagattgggcctgccgcaggccatagcagacattgggcagccctagaacgaagctgactgtccttggaatgtgccacaggggtgtgacgccccggccaactccagtgctgcctaaaatggcctcttgcaacattcccctctcttcatcttaaatcagggacttgaagccacaaaatggcaaatacacagttctggcagtcgttttgagtattggagaaatcgctctggccatctgttttgtctccagcatgtttctcacggaatatccacggatatatccatggatataacagacatcctgccaaggcagagcttggctcttgagaactcggcaagctcagtgcttgcctggattcctgcctcatgtcccatccagtgtttggagaaaagctctgagagaaagatgaatgtctgaggccacacagcctagaagtagtcaagagcacaggctctagaactagccccacgtgggctgaaatcccagcaccagcgcctgccggctgtgtgatgtaggagagcttcttaccagctctgtgcctcacttgtctcacttgtaaaatgagaataagaattggccgggctcggtggctcacgcttgtaattccagcacttcgggaggctgaggtgggcggatcacttgaagtcaggagttcaagaccagtctggccaacgtggtggaaaccccgtctctgccaaaaatacaaaaattagccaggcgtggtggcgggcacctgcagtctcagctactcaaaaggctgaagcaggagaatcgcttgaacctgggaggtggaggctgtcagtgagccaagatcacaccactgcactgcagcctgggtgacagagcaagactctgtctcaaaaaaaaaaaagg

SEQ ID NO: 205 - DNA, 1965 bp, Homo sapiens
  misc_feature (333)..(333): n equals a,t,g, or c
  misc_feature (1961)..(1961): n equals a,t,g, or c
ggatcctcgcggcggcggcggtgcttacagcctgagaagagcgtctcgcccgggagcggcggcggccatcgagacccacccaaggcgcgtccccctcggcctcccagcgctcccaagccgcagcggccgcgccccttcagctagctcgctcgctcgctctgcttccctgctgccggctgcgcatggcgttggcgttggcggcgctggcggcggtcgagccggcctgcggcagccggtaccagcagttgcagaatgaagaagagtctggagaacctgaacaggctgcaggtgatgctcctccaccttacagcagcatttctgcagagagcgcancatattttgactacaaggatgagtctgggtttccaaagcccccatcttacaatgtagctacaacactgcccagttatgatgaagcggagaggaccaaggctgaagctactatccctttggttcctgggagagatgaggattttgtgggtcgggatgattttgatgatgctgaccagctgaggataggaaatgatgggattttcatgttaacttttttcatggcattcctctttaactggattgggtttttcctgtctttttgcctgaccacttcagctgcaggaaggtatggggccatttcaggatttggtctctctctaattaaatggatcctgattgtcaggttttccacctatttccctggatattttgatggtcagtactggctctggtgggtgttccttgttttaggctttctcctgtttctcagaggatttatcaattatgcaaaagttcggaagatgccagaaactttctcaaatctccccaggaccagagttctctttatttattaaagatgttttctggcaaaggccttcctgcatttatgaattctctctcaagaagcaagagaacacctgcaggaagtgaatcaagatgcagaacacagaggaataatcacctgctttaaaaaaataaagtactgttgaaaagatcatttctctctatttgttcctaggtgtaaaattttaatagttaatgcagaattctgtaatcattgaatcattagtggttaatgtttgaaaaagctcttgcaatcaagtctgtgatgtattaataatgccttatatattgtttgtagtcattttaagtagcatgagccatgtccctgtagtcggtagggggcagtcttgctttattcatcctccatctcaaaatgaacttggaattaaatattgtaagatatgtataatgctggccattttaaaggggttttctcaaaagttaaacttttgttatgactgtgtttttgcacataatccatatttgctgttcaagttaatctagaaatttattcaattctgtatgaacacctggaagcaaaatcatagtgcaaaaatacatttaaggtgtggtcaaaaataagtctttaattggtaaataataagcattaattttttatagcctgtattcacaattctgcggtaccttattgtacctaagggattctaaaggtgttgtcactgtataaaacagaaagcactaggatacaaatgaagcttaattactaaaatgtaattcttgacactctttctataattagcgttcttcacccccacccccacccccaccccccttattttccttttgtctcctggtgattaggccaaagtctgggagtaaggagaggattaggtacttaggagcaaagaaagaagtagcttggaacttttgagatgatccctaacatactgtactacttgcttttacaatgtgttagcagaaaccagtgggttataatgtagaatgatgtgctttctgcccaagtggtaattcatcttggtttgctatgttaaaactgtaaatacaacagaacattaataaatatctcttgtgtagcacctttaaaaaaaaaaaaaaaaaaaaaaaaaaaaaaaaaaaaaaaaaaaaaaaaaaaaaaaaaaaanaaaa

SEQ ID NO: 206 - DNA, 529 bp, Homo sapiens
acgcgtccgattacttacgtgctcctggctgggatggcactgggcattcagaaaaggttctccccggaggtgctgggcctgtgtgcaagcacagcgctggtgtgggtggtgatggaggtgctggccctgctcctgggcctctacctggccaccgtgcgcagtgacctgagcacctttcacctgctggcctacagtggctacaaatacgtgggaatgatcctcagtgtgctcacggggctgctgttcggcagcgatggctactacgtggcgctggcctggacctcatcggcgctcatgtacttcattgtgcgctctttgcggacagcagccctgggccccgacagcatggggggccccgtcccccggcagcgtctccagctctacctgactctgggagctgcagccttccagcccctcatcatatactggctgactttccacctggtccggtgaccccctggccccagatggcactgagtttttcattcattgaagatttgatttccttgaaaaaaaaaaaaaaaaaaaa

SEQ ID NO: 207 - DNA, 1146 bp, Homo sapiens
cccgtccacaatgcagcagactcttcccaaggccacctagcaagcaaggttgatcggatcatctaaactggccgcctcctgaatatttcactgaatcctggcgttcatgttgaagcagacaaaatgagaaaggaggagggcattgctcacctctcaatagcttttttcgttcaagttctatgtctttatcagctcttgcctgtgattttaccccaattcaaccttgggagtgggaagaatatgaacagataacccttggcctaacagctccatcaaacctccttgagagcaactacctaggccaggctagtgagtgctttgtgaggaagctggtcagaaggttccctcaactccttcctggtcctcctggacactgcagaaaagacttaggggatccccagcagaggccaattgctctccttccttccctgccccaccaggaaaggaataacgtccacagacttgaagcagatagtgaagtagatctgtgagaggttctaggtacttagtgtgtagactttgacgaatatttctcaagttgggagcccttgttaaaaatgatgtttaagggagtggttggggggaagatgaaggcatggaggaggaagaagagaaggaagcccttgccatataaaattcatgcagactaaacagtttccctgacagaataaataaagtggatgctaccccactccagaatcaaaagcaatttaattaaagtctcttaagttgtaaagagttttaaatgatccgtgttgaaggcgaatsctgcyaaatgcagtgggtctgacgtcagctgccgggcctgggctgggaggccatttgctattctgtttaaggcaggctggattgtcttattttggaaccagcttggtggggggtttgctttgctactgcttctgagccctgagcttcaaaggctgaaattaatggtgaacaaaattgtgcggctctggccatcccatgcgggcaagcccattgagggttatcattaagtaaagaaataaagagggggaaaaaagcctgcctgttccaaaaacctcatcagataatgacctcagtgattgggttttcattaccaaacagcatccagagattatcaacccatagaagaagggaggggaaaaaaaaaaaaaaaaaaaattc

SEQ ID NO: 208 - DNA, 1346 bp, Homo sapiens
  misc_feature (537)..(537): n equals a,t,g, or c
  misc_feature (880)..(880): n equals a,t,g, or c
  misc_feature (1115)..(1115): n equals a,t,g, or c
ggcagaggcttgtgaagggtaaagtttaaacccctctgcttagcccctgcctccagcctctgccaggagtaatgtgctcccatagtactctgatccacttgtatttggtgcttccttttttttttcttttccttccttcctcctttcctttcccttcctyttcctsttcctccattcttccctccctccgtcttcctccattcttccctccctccctattcctccattcttccctccctccctccctctcacatcctttaggactcagcatcacctcctctaggcagtctttcctggaytaccaccayttatgcacaaaacacctaagcaytaccttatgtggcctcatttatcactgcttaaatattttttawacacgtgctgtgatgtggcacatgcaggtgtcattcttgakgatccactggttattgccttgaggggatgacaactgcccggtagggtwacctggtgtgactgcacctaaaacagcaataccaaagggcccattgccagttctgtcactgaccagctggggcntctgagtatatcccttaaccactttggaccttaatttggcatctgtcaaatgagatggtggaacttgaggaactctaaggcccctactgtgcaggtcttattaatgattacaacagcagcagcagccagtgtttactgaggacttacaaagcaccaagcactttgcctatcctaatccttacatcaactctacgaagttagtatggttactatccctattttacagatgaggagactaaggctaagagaggttatatgacttgaccacaaggtcataataaagaaacagatttgaatccaggcattctgactttactgttcttagccacataatgggcacasnttygacacacrgttttgtgtactgtttggtggtcactcacagactccatcccagactctgcatgaaccatccctgttctacatttttaaggctcaaactggagtctgggtgaaacctggggacagaagactgctatagtcacaattattagagggaaatgggtgaggaccagtggccagctctgttcatgaacctttgacaattctcacagagagtcttgctttggacagagacnacttacgttgctgttttcagttaccctctttaggaggggagagtaggcctgagtcatgcttcagacacagattaaaatcagatttggtaccaggtgcagtggttcacgcctgtaatcccagcactttgggaggctgagttaggagtatcacttgaggccagaagtttgagagcagcctgggcgacatagtgagacatcctctctctttaaaaaaaaaaaaaaaaaactcga

SEQ ID NO: 209 - DNA, 1974 bp, Homo sapiens
ggcacgagttgggagcagctctgcgtgcggggcctcagagaatgaggccggcgttcgccctgtgcctcctctggcaggcgctctggcccgggccgggcggcggcgaacaccccactgccgaccgtgctggctgctcggcctcgggggcctgctacagcctgcaccacgctaccatgaagcggcaggcggccgaggaggcctgcatcctgcgaggtggggcgctcagcaccgtgcgtgcgggcgccgagctgcgcgctgtgctcgcgctcctgcgggcaggcccagggcccggagggggctccaaagacctgctgttctgggtcgcactggagcgcaggcgttcccactgcaccctggagaacgagcctttgcggggtttctcctggctgtcctccgaccccggcggtctcgaaagcgacacgctgcagtgggtggaggagccccaacgctcctgcaccgcgcggagatgcgcggtactccaggccaccggtggggtcgagcccgcaggctggaaggagatgcgatgccacctgcgcgccaacggctacctgtgcaagtaccagtttgaggtcttgtgtcctgcgccgcgccccggggccgcctctaacttgagctatcgcgcgcccttccagctgcacagcgccgctctggacttcagtccacctgggaccgaggtgagtgcgctctgccggggacagctcccgatctcagttacttgcatcgcggacgaaatcggcgctcgctgggacaaactctcgggcgatgtgttgtgtccctgccccgggaggtacctccgtgctggcaaatgcgcagagctccctaactgcctagacgacttgggaggctttgcctgcgaatgtgctacgggcttcgagctggggaaggacggccgctcttgtgtgaccagtggggaaggacagccgacccttggggggaccggggtgcccaccaggcgcccgccggccactgcaaccagccccgtgccgcagagaacatggccaatcagggtcgacgagaagctgggagagacaccacttgtccctgaacaagacaattcagtaacatctattcctgagattcctcgatggggatcacagagcacgatgtctacccttcaaatgtcccttcaagccgagtcaaaggccactatcaccccatcagggagcgtgatttccaagtttaattctacgacttcctctgccactcctcaggctttcgactcctcctctgccgtggtcttcatatttgtgagcacagcagtagtagtgttggtgatcttgaccatgacagtactggggcttgtcaagctctgctttcacgaaagcccctcttcccagccaaggaaggagtctatgggcccgccgggcctggagagtgatcctgagcccgctgctttgggctccagttctgcacattgcacaaacaatggggtgaaagtcggggactgtgatctgcgggacagagcagagggtgccttgctggcggagtcccctcttggctctagtgatgcatagggaaacaggggacatgggcactcctgtgaacagtttttcacttttgatgaaacggggaaccaagaggaacttacttgtgtaactgacaatttctgcagaaatcccccttcctctaaattccctttactccactgaggagctaaatcagaactgcacactccttccctgatgatagaggaagtggaagtgcctttaggatggtgatactgggggaccgggtagtgctggggagagatattttcttatgtttattcggagaatttggagaagtgattgaacttttcaagacattggaaacaaatagaacacaatataatttacattaaaaaataatttctaccaaaatggaaaggaaatgttctatgttgttcaggctaggagtatattggttcgaaatcccagggaaaaaaataaaaataaaaaattaaaggattgttgataaaaaaaaaaaaaaaaaaaa

SEQ ID NO: 210 - DNA, 890 bp, Homo sapiens
aattcggcacgagattcactaaacactgcaatacaagcttggcaacagaacaaatgccctgaggtagaggagttggtcttcagccattttgtgatctgtaatgacacacaggagacactgcggtttggccaggtggatactgatgaaaatattctgctggcgagtctccacagtcaccagtacagctggcgctctcacaaatccccacagctgttacacatctgtattgaaggttggggcaactggcgttggtcagagcctttcagtgtggaccatgccgggacttttattagaacaattcagtacaggggtcgaactgcttctctcatcatcaaggttcagcaactcaatggagtacaaaaacagattatcatctgtggaagacagatcatctgtagttacttgtctcaaagcatagaactaaaagtcgttcagcattacattggtcaagatggacaagctgtagttcgggaacattttgactgcctcacagccaaacagaaattgccttcgtacatactagaaaacaatgaactgacggagctgtgtgtgaaggccaaaggagatgaagactggtcaagagatgtgtgcctggaatccaaagcccctgagtacagcattgtcattcaggtgccatcttcaaacagttccattatttatgtctggtgcacagttttgactttagaacccaactctcaagtgcaacaacgaatgattgtgttcagccctctttttatcatgaggagtcatcttccagaccccattatcatacatttggagaaaaggagtctgggattgagtgaaacacaaattattccaggaaaagggcaggaaaaaccactgcaaaacatagaacctgaccttgtacatcacctgacattccaagcaag

SEQ ID NO: 211 - DNA, 1043 bp, Homo sapiens
  misc_feature (987)..(987): n equals a,t,g, or c
gaagctggagctccaccgcggtggcggccgctctagaactagtggatcccccgggctgaggaattcggcacgagctttcccctaagttttcttatcttcaggctacagaattattgagattactctcaaccattcctcatgttagaaactctttctcaatttatttccatcctctttgtccttctctggataatctcagatttgatactgtgttttcttaaatgtggtaatcccggaactctagatatggttcttcctatttggactaatcagtatacacattccagtagatccattttgtcctttatctagatacagtatttctagtagcttgaaactcatttgccttttaaaagttgttttaggattaaaaatcacaaaccaaatatccactgtcctcaagagaatcacctaacacccataaggattcttgtagactcatggtaaaggggtagctattgttttatatcagatagcaggagtagctattcttttatatcagataaaacacattaaagcaacatgaataggcatttgttaaaagaagatatacaaatagtcaacacatataaagaaattctcaacatcactaatgatcagggaaatacaaattaaaaccacgatgacatacaccttatcccagccagaatggccattatgaaaaagtaaaaacaaaacaaaaaaaacagatgttggcgtggatatggtaaaaagggaattgcttatacactgctggtgagaatgtaaattagtacaagctgtgtggaaaacagtatggagagttcaagtagatctaccactttatctggcgttctcactactggctatctattaaaaggaaaataagtccctatgtcaaaaaagacacctacatgtctatgtttattgcagcacaattcacaattgcaaagatatggaaccagcctaagtccacatttaactgatgagtggataaaggaaatgtgtgtgtatsmtcaccatggttgncaaaaagagacccgttgcctcctgtaaccagacactcaggctttccaggagcccag

SEQ ID NO: 212 - DNA, 1079 bp, Homo sapiens
ggcacgaggtgttagaaagttttcgaagcagtgtgagtcttgtacctttgtggtcctgtctcacagacacctgtctattccctgacccttttaaatgctaactttctgcctgtaggaaatcttccctttgtgcttaggtctttttcttctgtgagctttagataaacaacctagtgtttaaactttttaataagggattcattttttaatacatgagaattcatttcaaaattttggttttagttatttattttattctacttggctctttttcagacagatgttctctcctggattgtaaaagtcgaattcaaaggatttttatttgtaatatacttaacctttctcttgtaagttgccatctgtgtagatacagctttgattgcctgacaagaggaaaatgtttcccattatcttttcctgcctgaactatacggtcacttgtgttccagcatagtggttcttaaccctcatagtgtgtcagaatcactttgcagagcttttaaaaactctagatgcctggggaccaccccaaagactccattttgttgtcatgggtcaaagcacagtcttctagtttgcagctagtgttgagtacaactagagtttaacccagttgaattttagtttaatcttggctggtcttgaagatgttagtaatctctattcatttttttkgaaaagtaccaatgaratcagaaagttaattagaaaacatctagttgaatcccctgtttttaatagatggggaaaccaagacccagagaatataatccaaagctacctgtcacataggccacaatttcttttccaatattctgttcttcgctgttcttctaatttgcagaactcctctttaaaaaacctttggagaatgtattggcctcataccctcttccttcagcctgaaagacatgcacctgtcacttatttatgatatttaaatgcaacctctagaacaggggtgtccaatcttctggcttccctgggccacattggaagaagaaatgtcctgggccacacataaaatacactaatgatagccgatgaacttaaaaaaaaaaaaaaaaaaactcgta

SEQ ID NO: 213 - DNA, 2103 bp, Homo sapiens
  misc_feature (2101)..(2102): n equals a,t,g, or c
ttcctcgtagcgagcctagtggcgggtgtttgcattgaaacgtgagcgcgacccgaccttaaagagtggggagcaaagggaggacagagccctttaaaacgaggcgggtggtgcctgcccctttaagggcggggcgtccggacgactgtatctgagccccagactgccccgagtttctgtcgcaggctgcgaggaaaggcccctaggctgggtctgggtgcttggcggcggcggcttcctccccgctcgtcctccccgggcccagaggcacctcggcttcagtcatgctgagcagagtatggaagcacctgactacgaatgctatccgtgcgagaacagctattccacgagaggatccgcgagtgtattatatcaacacttctgtttgcaacactgtacatcctctgccacatcttcctgacccgcttcaagaagcctgctgagttcaccacagggtgtcctgggccgggtctmtgagacagtggtgatgttgatgctcctcactctgctggtgctaggtatggtgtgggtggcatcagccattgtggacaagaacaaggccaacagagagtcactctatgacttttgggagtactatctcccctacctctactcatgcatctccttccttggggttctgctgctcctggctgctggaagacctggaggagcagctgtactgctcagcctttgaggaggcagccctgacccgcaggatctgtaatcctacttcctgctggctgcctttagacatggagctgctacacagacaggtcctggctctgcagacacagagggtcctgctgggtatgtggcttcgtagggcttgggatacctgggtttccccaaggagagtagcccctggttccaggtgcttgctgacagcctcccatccctgcacagagaagaggcggaaggcttcagcctgkcaacggaacctgggctaccccctggctatgctgtgcttgctggtgctgacgggcctgtctgtgctcattgtggccatccacatcctggagctgctcatcgatgaggctgccatgccccgaggcatgcagggtacctccttaggccaggtctccttctccaagctgggctcctttggtgccgtcattcaggttgtactcatcttttacctaatggtgtcctcagttgtgggcttctatagctctccactcttccggagcctgcggcccagatggcacgacactgccatgacgcagataattgggaactgtgtctgtctcctggtcctaagctcagcacttcctgtcttctctcgaaccctggggctcactcgctttgacctgctgggtgactttggacgcttcaactggctgggcaatttctacattgtgttcctctacaacgcagcctttgcaggcctcaccacactctgtctggtgaagaccttcactgcagctgtgcgggcagagctgatccgggcctttgggctggacagactgccgctgcccgtctccggtttcccccaggcatctaggaagacccagcaccagtgacctccagctgggggtgggaaggaaaaaactggacactgccatctgctgcctaggcctggagggaagcccaaggctacttggacctcaggacctggaatctgagagggtgggtggcagaggggagcagagccatctgcactattgcataatctgagccagagtttgggaccaggacctcctgcttttccatacttaactgtggcctcagcatggggtagggctgggtgactgggtctagcccctgatcccaaatctgtttacacatcaatctgcctcactgctgttctgggccatccccatagccatgtttacatgatttgatgtgcaatagggtggggtaggggcagggaaaggactgggccagggcaggctcgggagatagattgtctcccttgcctctggcccagcagagcctaagcactgtgctatcctggaggggctttggaccacctgaaagaccaaggggatagggaggaggaggcttcagccatcagcaataaagttgatcccagggtttgctttgtttttttaaaaaaaaaaaaaaaaaaaaaaaaaaaaaaaaaaaaaaaaaaaaaaaaaanna

SEQ ID NO: 214 - DNA, 1212 bp, Homo sapiens
gccaagcttggcacgargttggtggcggcgtccggaggtgctggtttgttctcggtgaacggcgcgcggggtctctcctgagtgcgagctacgggaccttcgccatgccggggatggtactcttcggccggcgctgggccatcgccagcgacgacttggtcttcccagggttcttcgagctggtcgtgcgagtgctgtggtggattggcattctgacgttgtatctcatgcacagaggaaagctggactgtgctggtggagccttgctcagcagttacttgatcgtcctcatgattctcctggcagttgtcatatgtactgtgtcagccatcatgtgtgtcagcatgagaggaacgatttgtaaccctggaccgcggaagtctatgtctaagctgctttacatccgcctggcgctgttttttccagagatggtctgggcctctctgggggctgcctgggtggcagatggtgttcagtgcgacaggacagttgtaaacggcatcatcgcaaccgtcgtggtcagttggatcatcatcgctgccacagtggtttccattatcattgtctttgaccctcttggggggaaaatggctccatattcctctgccggccccagccacctggatagtcatgattcaagccagttacttaatggcctcaagacagcagctacaagcgtgtgggaaaccagaatcaagctcttgtgctgttgcattgggaaagacgaccatactcgggttgcttyttcgagtacggcagagcttttctcaacctacttttcagacacagatctggtgcccagcgacattgcggcgggcctcgccctgcttcatcagcaacaggacaatatcaggaacaaccaagacctgcccaggtggtctgccatgccccagggagctcccaggaagctgatctggatgcagaattagaaaactgccatcattacatgcagtttgcagcagcggcctatgggtggsccctctacatctacagaaaccccctcacggggctgtgcaggaytggtggtgactgaaattagctggacatggttgcacacacctgtaatcacagctactcgggaggttgaggcgggagaatcgcttgaaccagggagttggaggttgcagtgagtggagatcacaccattgccctgcagcctaagcaacagagcaagattctgtctcaaaaaaaaaaaaaaaaaaaaaactcgag

SEQ ID NO: 215 - DNA, 616 bp, Homo sapiens
  misc_feature (17)..(17): n equals a,t,g, or c
  misc_feature (580)..(580): n equals a,t,g, or c
cmgctrctragcaactnagtgggatsccccgggctgcaggaattcggcacgaggagaacggctgcacgtgggagatgctccgtggatgtttgtagaacgctggcttccgtgtttcctcgttgtggctgtggtggtgtgggtctttgcctgtggacccgtggaagacaaagaagacagttttggatggtcaagctattttcttgcttcagggctccctcccctgctttttgaagcctcacaaaccaggactgtgagggcaggaaggcttggggtctttgtgtgctgagcctcattagggttttaagaacctccctcctttcatctctagcttacgagagggatgattcattatcttccctcctcaggctgcagtagaagcagacagtctctgcctccctgcttgcctttcctccctcccattcactgttgattattgccctcaagaataacaggttgcccagctactcgagargcttaagtgggaggattgcttgaccccaggagttcgaggctgcagtgagctatgatcgcttcactgcgctatagcctggcagacacagagagaccctatctcaagcanacagacaaacaaaaaaaaaaaaaaaaaaaactcgag

SEQ ID NO: 216 - DNA, 1144 bp, Homo sapiens
gcacacatacgtatgcatataaggattatcatatataaatttatataacaatttttatgcatgagtgtgaataaatatatgcatatatatgtctgtatatgtaaacataatgcatatagtaatttacatatatctgtgtgtatatatgtgtgtggcacagtcacacacacacacacaaatatgtatacagatgcttcctggcttacaataggatttcatcctgataaattcatcgtaaatcaaaagtattgcaagttgaaaatgcatttcataccccagtaagttcatcatttgktcaaaagtattgtaagtcagaatacatttgacatctggataagtccattataaagtcaaaacattttaagtctaatcattgtaatttgggtaccgtctatgtagatacgtaaatcatacattaagggtgactaggtgccaggttgaatgttatgaaaatgaatttcaagtctcacaggcacattcacccattacaaatatgtaccacattcacctattacaaatatgtacacatgtatgtgttcatgttcatactacaatggcagagttgcataattgtgacagaaatcaaatggcttacaataactaaggcatttctacatagccttttaaagtaaaaagtttattcattgttggtctacataacgtggaggaatttgtagcggacaggctattacagtcagtgaattgaaaggaagggagaagttgggggagactagtagctttttgaaggtattattttagagatttatgaakttttggagaacaagggatgaggaaaaagtattgaagaatttgggagagcaggatatcaattagtttctgactttattgggaatgcagatcagagaaaggctgggatagaaaactgaaataataattatagccttcggtgaatatcagcaggactgatgggactatagggagggtagactaggtgatagagcccattgtggcagtttcggtaggacatcattggtgtatacgtatatgttatttgtgattttgtttatctttttttaataagcaaaaggaaaagtgtcctgatatgttttggctttgtgaccccatccgaatctcaccttgaattgtaacaaagttttaccatgttaaacaggctagtctcgta

SEQ ID NO: 217 - DNA, 1649 bp, Homo sapiens
  misc_feature (1249)..(1249): n equals a,t,g, or c
agctccaccgcggtggcggccgctctagaactagtggatcccccgggctgcaggaattcggcacgagggatctgtgtggcatggtatgtgtgtttatgtgtattgtgggtgtctgtgtggcatgctgtgcgtgtgtgtattgtggatgtttactgtcccgggcagtagaaaggacgtcggggaagcagccccagcatcagggacaggccaggagtgcagaatgcatggaagctggtcaggtcggagcctgggatgaaggaagcacagagatgcaagggtgccagggcccatggaaccaagagccgatgatcaaggccacagtgcacacagccctggaggcaaaggacatattcatttcacaaggattaaaaagcatgggccaaggctgggccccaggccaggactggggatacagagtggatcagtccccatccctgcccccaggtgcttacccacacccattcacctcacaggtttccccaccccagccccttggcgagctcctcctcattcctcaaarcgtcgctkaggtcacgctccttcccgaggcctctccccatcctctaaaacaccctctccctgctgcccacttgcagcacagtcagagagctccgtggcctgtttccactggactgagtcttctggggggtgctggtgcagagcagarccctgggctgggagtcccggcacctcgttccactccctcacccacagcctcgctgtttaacctcaggcaggccgtgtmcctcctcagcctcactttccccttgtgtaaaatgagggaagggactgcgccttctaagccatctttcagcttaaaacctctttgaccttctatctggctaatggaggtgctgaccaggggcaagaagggatttgaaaaacgctttgaaaaattcatagcaggaggcaaaggagaaagagtctttattttcgtagagcgggaggcaggaggagttatggacagaggctgtcgatgaaaaggacagcatctcagagcactttgtggcatttaatgtctaatgcctcctcccattaaagcagtggcatcaaatatttaccaaagcagcattaaaaattaacctttaccatggggatgtataaaggccctaagttccctgagaagtgaccgaacatcaggagggtaaagtgacaggaaggaaggctacaagcgggttgtgaataatggaagcccccaaaggtcccccaacacagctccctgttgaccccactcccaaagccagggcancctccggccgtgtctctgcagaggctcccagcccttcggagactcccagagggcctgcaggataaggacaggccctcagctgggcatccacagccttccatggcctggccctgcctctctgggcagctgggatctgtaggatggaaaggaatgagtctgtcggagttggaagagaccaggggaggaagtggggagtggtccgggcactggaaatagcacgtgcagaggcactgaggcagagacagctgcacatcaatccatcagaagagcagccaggtggcatgagtgtgggggaggaaggaagcgcaggaggggacaggtgggagatgcaggtaggtctgactgtgcagggccatggtaagatgtgggcttctcggtccagggacaggggtgccctcga

SEQ ID NO: 218 - DNA, 520 bp, Homo sapiens
gagaaggactttatgcagggaagtgacgcaggacacggagggactcatatttaccgagctttggtgcagtggcccctggcctgggtattctatttaagccatgcaaaaacccattggggagaagagttaaggttttccttccgcaggaaaaacttgaggctcagagaggctatgagacatgagacatgccaggtcacacagctggtagctggcaaagctgactccaacctgtgtctgagggactctgaaacctggttctggcccccactctgggcagcctgctcctctctacaagccactgcctgcagattaagcagtcctagcaaaggcctgggagcatccagagagtgcccctggctggcgagtggtagagcagccttggtttccttcctttgaccctcaaggatcacaggagtgtcacccagaagtaacttaacttatgagtgttttatgaacaggaaaagcaggaaaaggggtaaagtcacatgatttcacaaccaaacagcctgtaaactcgtgc

SEQ ID NO: 219 - DNA, 1042 bp, Homo sapiens
  misc_feature (222)..(222): n equals a,t,g, or c
gaatcggcacgaggaaatattactgaattttcttttattatcaaatacaaatttagcatatcctatgtaaaatgctgattgcccttttctgcatattatttcagatcttgttttctatacccacaaggattttctatatatttctcataaacaagagagtccacatatttactacttaccttatgagtgaacaaaaaaatcacgattgggttcgcagaactncaaagttgcaccgtgtgtggctcattagtggaaaaatgctgctggttgcagatataaaggctctgatcaggtggctgtggggccctaatccagaatgagcacagttattttgatcaatggagtctaacctagtcctcccccaaggttcaaaatgtcctctggtgcttgcaattttcttacagtatttttttctaattgataccaagctgggactctcctggtatatcatatttggaaatgaaaagtgaaacaaatgagaattttccttttgcgttggtgaatgcatacagtgatttaagtttgggtgcatttctttcagtctgttgattgttctaggaatcgatgctcacagatcaatgagtcatgtccaatttcataaacaactgcctggggtgagtgtggcctcataaatgtgaacaaatagtaatggagtggcaatcaaacctaaagtgttactgcaaatcatgccatgctgaaagaagaaacatctcaaaaagagaataaacatttttagggtcgggtgtggtggttcatgcctataatatcagcactttgggaggccaaggcagaaggattgcttgaggctaggagttggagaccagcctgagtaacatagtgagaccccagtccttacaaaaaaaaaaaaaaattaacaaaggattgtggtgcatgcctgtagtcttagctactcgggaggctgaggagggaagacaactttaacccgggagttcaaggttrcagtgctatgattgcaccatcgcgttccagccttggtgacagagcaagactctgtctcaaaaaaaaaaaaaaaaaactcgaa

SEQ ID NO: 220 - DNA, 536 bp, Homo sapiens
  misc_feature (536)..(536): n equals a,t,g, or c
ggacgagtggggagctggaaggaggatggagtgggaagataatcttcccttggagttcagctgtcccgtgaccaaactcctctctgtccccagctggactcctctagatgctcagatgctccttctcttctttccttctctgtcacaccattcttctgttccttggctcttctgctcatctccttgtggagscawaggtttggggtttatatgagtacaggataggtgacatggtggatcaaaaggcaacattttgtgtgcaaaaacaggaatgcctgttcccattagggtcatgggttkccagggttgagggtggggcctttgctagggaaccaccctcttctacccagtattttcctgtctcctgtctgtatcaataggtacacaatatwtattaaattaatkaatgactatacattatgaaatgggaaatgcaaggtataaaggagaattgctgtccttgaaaagaaatttagtttgtttttttgttgagatggagtcttgctctaagctagagtgcagaatgtaatcaaggn

SEQ ID NO: 221 - DNA, 796 bp, Homo sapiens
ggcacgaggtgacgtgtttctgcatctgttgccatgacaagctccctgcttcacccattgctgtatccccagcacctctctcactgcctggcaagggaaagcactcagaagacgctgaatgaccargtagagtgatgggttgtacagcactgttactccttttccatctctgtgtcccatgtgaaccttatggcacccatgagaaggagcttgtaccaggtttatactttctagtttacagatgagaaaacaggatcagagtggtacagatattggtctaagtcacagagaaagtgaattgtaaaagcagaaacagagcacaggctgcctgacttctagtccagtgctttttgctcaaattgcctcttatttctcaggttattcttgaaatggcagatggggattctgtttaatgaaacaaaagtgacaattctttctttcttggagagaaggtggagacagggtctcactctatcacacaggctggagtgcagtggctcaatcatggctcactgcagcctcaatctcctgggctcaagtgattcttccaccttagcctccttgactcactgggactacaggtgcacaccaccatacctggctaatttttaaagttttttgtagagacagggtctcactatattgtgcattctggtcttgaactcctggtcccaagtgatcttcctgcctcggctttccaaagtgctggaattacaggcatcacccccatgcctagcctgaaaattctttctatgtccttaacatcttctttcccagtatttctccatccactcga

SEQ ID NO: 222 - DNA, 1037 bp, Homo sapiens
ggcacgagctcgtgccraattcggcacgagggtcatagtccacagaggtaaaagttaacaattctgatgctcttgtatgtgcataccagaggctctagggaagaattccctctttctttcttccaccttcttgtggctgctggcattctttggcttgtggtcacatcactcctatcttgaaggccagcatcttcaaatctgtttcttcttcacatagccttctgtgtgtgcagtgccctctacctctctcttataaagacatttgtgattaaatggagggtttaggataatctcgtcaagatccttaacttaatcacaactgcaaaaacctctttcccaaataaggtaacattcacaggttccagggattaggacctattatctttggtaagtattattcagcctaccacaatagctaaaacaattctgaaaaagaagaataaagtgagagaaatcagtttatctgatttcgatacttattgtatagctatggtaaataaggctgcatggtattaaagaaaggacatatatgaatgaaacagaatagaggacccagaaatagacccacacaaaggagcccaaattatttttaaccaaggtagaagacaatttattggaggaaagacagccttttcaacaaatggtactataacaattagatatccataggcaaaaaaaaaaaaaagaatcttgatctaaggctcacaccttatataaaataatattaaactcatggccaggcacagtgactcatgcctataatcccaatacactgggaggctgaggcaagagtatcacttgaggccaggggttcaagactagcctgggcaacacagtgaaactctatctctacaaaaaaattataaactagctgggcatggtggcacatgcctgtagtcacaactactcacgaggctgagaagatcacttaagctgagttgttcaaggttctaatgagctacaatcgtgccactgcactccagcctaggtgacagacaaagaccccatctcaaaaaaaaaaaaaaaaaaaactcgta

SEQ ID NO: 223 - DNA, 1110 bp, Homo sapiens
gaattcggcacgagcttggttcgggggggagcaaaatccagaatctgctaaacaccaatgctgtcactcagagtttgtgtatctgctgtctgtggagctctggaccaggcttgagggacgcctggggtttccacccacatctggggcaaaccagacccccaagtcactgacatgtcggtttttctactaatcacgttggctttggcaattctgtatataataagaagtattgtgttctcacttgcacttkggcagaacggttcactccaaggctgaatgactgccacggaccatcccccagcaggggtcctggggtttagtggtttgattctgagcacctctamgcamagagccccttagtgggttccctaactggacggctaaccctgstgtggaatctgactkkwtctggaccgaagaggacaggctgctctggagaaatccttgggccttgtgcctgatgctggctcgggccaccctggccaccctcccttcatgccccatgggaccaggcagcagcatgggagggggcagcttccagaacacccttctgctaggggctkctggcctccctgctggcacggccacatccatggtctgagtgtgtggttggaatgttttatcaacaccagtcctcacagcttccccagatgagcgaaggggaaggggatggtgtgtggggggattgcctcccttgaggccccccagctcccaggatacttgctggcggagctctgcctgcggtggaggccctatgacttgacctccatcttctccctgggcccctcgctggccctcactggcaggggctcctgcacgcctgcaaggccagagcctcccgccaggtgcaggagaagtaaatgcaggccagagataaatcgtatttccctctaactcggatgtggagtgagaggaaggaagcaggagtggagctgagtgttagtgagaggtggctgagaaggcggggtcccgcttcttgcttccttgggcatttgctgtaggtgctgggtttcagcctggaagggtgcagcctctgcactaagtctggtttggtgaacgttcatggcccccaatataaacagtgttctgggcgttctttgtgactctcga

SEQ ID NO: 224 - DNA, 841 bp, Homo sapiens
gggctgcaggaattcggcacgagctcgtgccgactctcagagcagggaacagcgggggaaaatgtttacactccatgcacaatctgtgcttccagtccctcaccctatgtggcccaatagctggctggatttcacacttaattggtatttttttctgccttcttcccctgcccccactgactcctctcctctccctttgattgtactcaaggttctggggcctgggccctgggtgggtaccaacagctgctcgctgttcccatgtcctctctccagctttgctgtgtttctctgctacctaatctcagtgactgtgaaaggacattgtgtctgagccatggccagccgctggctggccccctgatctgccccccttctattgtttggatggccatctcctgctgggcctccctgactgtaaaatctctgtactgtttgttaggtttttggtgggaggctgtgataagttccaatgagctgccacttccctggatatgtcaagaagctgatggcaacttggccaattctggcagatatcaggcccccagttcagccccagtcaccctcttttacacatgtgggtcaaccactgtgtgctcagagggtcagtcccttcctctgctgtgtttttcttgagtccttgcactcacttcccctgccccagtcacgatgacccctaaagcttcctttgcccttgctttctagggcatccctagtgaaggggcaaacctgagatttctccgtggacctgacagccaaggcagggcactgtctcctgaggccagtgccagcacgtgcatggttcacagaaaaggatcctgggctcagaatctcgaggggg

SEQ ID NO: 225 - DNA, 2128 bp, Homo sapiens
gtctacctccgggctgaaacgtcaccatgcctccccacagacagacggatggacagatgggcctccctgcacctgctctgtgggtgtgggggctcctgctcagcagcagtttccagacccttctccctgctttccccaagccacccgccttgaatctggggtgctctaccagacccatcccctcatttctaaagatttgagccactagtcgtgtccctctccctcagaaatgccttggtgacacttggctgctttcaactcttccacccatctgcctcttggtctcatctttaccttctgctaaaggtcctgacccccacccccgccacgccatggggcaccccatggtggtgcgtccttgggagcagctctgtccctttccccgtggcctttgccccgcctcctatgacttcgattcccacctgtccccgacccctgggaccactgaccgggcccgatcaccctgtcactgccctgtcatctgcttaccccacacggtgctctgctgacccaggtcttgctgtctcccaacagccccacgaggcttcccgtcgctcctggacactgcaggctgagcccgctgccccgccgcctccatgaggaaggcttttcctctgtgagccccaggccaccctttccctcctttaagtaattacttaagtcccttgccagggccctcccagtaccctttctaaagacacccctgccccagcatgctgcaggctcctgctccactttcctctcaggccctcgtcgctgtggtgctgcctttgttttctgtctctgccacggcagggggtcagctccttggaggtggggcttctgcccttgctgtaccactgcctggcacacagtaggtgctcaataaagacttgcagggtgagctgcctgaagaatagtcaccagaggccagaaatgtctagagctctgccggtagggtgactggccgaggagcctggcctgcatgtgtgcgtgtgtgtgtgtgtgtgtgtgtgtgtgagtcagggtttatatgcaggtgtctacaggagacatgctgggttctgtgctgggtgtgaggaatatgggagcagaaccccagggaggtggcagagacttgggggccaaagggctggggtgcaggggggcaacagccaggtgccactggccaccccagccgcagggagccctgcccaccctccaggtgcctggatgtccaacctcactgctattcccacctcaagccaggcctggagatggaggccccatgactcagccagggccggtttgcagctgcggctgacccagacgggcgggcagcccccagcccccgggcctgcacccaggacagggccgccctccctccctcccccgcttctggctcctaggacaggattctctgaattcagctcccctgaggctggggccaggttggaggccaggcctgggggctctgggctggggtcccagataggggctgggcggccaggcttggaatctggaatccagccccattcctggcatctgcaggagcctcgtggggagggagacttgggatggacttcaaccagccagggctggattcttgccccggaacctgcattcctggggcagccaagggatccttcccacttctgggcccagcttggccctgcctggcattcgaggcccatctggggcttgggggtgtctccccaactctcagacataaggacacccttccaagcttgttccttcacctggcggggccctgagccccacacccctcccctgtcctttctccatccgacatcaagcgcctccctgcctctgctcgcacagtctctgagatggggaactcagcacctcacaggtgggcccagctctggtgctgtctgtgttgggggagctggggcagcccccaaaagaccttggagacagaccctcagaggcaggagcagaggctggcagtggatgctgtgcctggaggccttgagggcgaggtgtgatgatgaggcccaggctgcagggctctttctggctctccagctccggagaacaagggatttcctcctgctctgcccaccctccccagccagtgcatgctcagcctcagcaccgcacctgggcgccctccatgatctgccccacctggacacatggctcgagg

SEQ ID NO: 226 - DNA, 956 bp, Homo sapiens
gggctgcaggaattcggcacgagcagagacccccaccccccagctgtcctgatgccccaagccaaaacataattcctggcagctcccccactccccctccccctcactcttctgccacccagagcttggcccgcctccaacagcccatgttctaattctgcagtttccagaagcccaccctcaaacccaggtcacttccccagcccctccagcttctagtccccgggtcgtgcccatcctcaccttcctgggctgaaacaccacattaggcacccagatgcctctgcatctgaaaatctcacaagcctggatgtccctgacgccacccactccggttctctttctctttctcagcctcctgtgggctcggttttttctgtccaggcttaaatgcccaggtggctgtctctgctggcccttacttctctcacggggatcctcagcggcaccctgggcttcagtccccatggatggagcagcccacgccgccatctcagccccaggcctgagtgtccagctgcttcccagacaacttgcaagtccctcggccaacactgagctcagagtcctcctcctccctgccagggtgcgccactaccttccctccagttttcaccaggtcttgggttcatcctgactccctccttcttctctccccgtccctgccacacctcactgctcacaagaaagacatcactgtgtccgttctccttttttcttttcttttcttttttttttttttttttgagacagggtttcgctctgtcttccaggctggagtacagtggtgcgatcttggctcactgcctcccaggttcaaaaaattctcatgcctcagccttccaagtagctgggactacaggcacgcgctaccacacccagttacatttttttgtgtatttttagtagagatggcttttgccatgttggccatggctggtctcaaactcctggcc

SEQ ID NO: 227 - DNA, 742 bp, Homo sapiens
gaaacctcaggcaagttcctggccatccccaggcctcattttcccatcaggaagaaggaaataagcacacctgtctccccagtctccctgcctggctcactgggcaggcaaatgtgtgggaggtgattgcaaaggtaccagatttgccaaatatacgcttgcaattaaatccaaaggcctgtcccacagttgcttgactttttttaaaggccaatttatcctcctttcttaaagactaaacaatttttccacttcatttattaaaataaagctctttaacttgcacgcttttagacaaaagcaacagtactctgaaatgaccccatcacttctcagtgagaagctgtgctccctgttctttgtgcttcttgggattgcaagtgcggcctttgtgagtgctctgtgggcctggagcagccacacggaaaggctcacagctgaacccagcagtagcatcacctgcctttccccaccctggttttttttccctttctaatttggggtcctcttatagctcctcaaatacaatgtactcgtgtccctcagagccactgcacagactgtcccctctccctaaagagaccccgctcttatcctccccctcccctacccmacccagtcagccagctgaactctggttcatcttctgcatccgggtgaaaggtcaccttccttgccagtcaacccccaccctcccactgcagtcatcagagatgagcagcctctaaaacctgccctcgag

SEQ ID NO: 228 - DNA, 1298 bp, Homo sapiens
ggcacgagctgagcccagcccggcctgccatcctggcaagccagggcagcatggaggtagcacagagtggcacccagccagcgtgaatgcataagaatctgcacgtgacacagaagaaagtctcttcatgaagtaggtttcactggtcccagccaaaccctgtggcatgtggccctttctgcacctgctgaacatgccattcaccttgacccaggtagtggcctcaccctcctcttgctcaaactggaaacctcagcatcctgaaatgcctcctccccaaatccattgcacacatgtgtgcctgtgtatgcgtgtgtgtgcacgtgtatgaacccagcccccagctgcccactccattgcccctaaacaggcccctccttggtgtcacctggcacatctccactggaagccaaatggatatttctaaactgaaatctggtcccacctcagaaccccttccacagttcccttaaagttcctttcctcatttacatcaggatcttcacaatggggacccctggtcacctcccaacccaacaaacgctccaaatgagccgccactgcagaaactcattatggcccgggcaggactggcacatccaagtatctgaccaggctgttccatctgccaggcaggtcctgccctctctccacccacctgtctaacccctgcatcctcaagaccctacttagctatggccctgtgtgaaaggtccctccccatgtacccacagccatttgttctctctcatgtggccctaacaggctggggttcctggagactccatggggagccaggcatgaagatggcatatacccatgtgtcactccccagaacgtgagctgcctgccctggcaccatacacaaagggactgacagccccagaatcccaaggggtgcacctatgcatatgggaaaggcatgtttacgggtgagaatggtccatcgttgggcttcaggaggcatctgacctgacgcacgcctttgtcactttgtccttgtggcctgttgaaatgccactcctgctttacaaattcaccaactgttgcatgagtcatttccacctcaatgagtaccaggtccttgaggatggggaaaagtaagccaccactgtgggggtcctgggctcctaggtgcagaagaggctccagaaacaggccaggtcgtgggccatgaccccacactagccctctggtccctcacacgggtggattggggggctgtgtcacgggatcttaggatcttcaagacaaagacccaggacaagaacacaagcccactcccattcttcacaggc

SEQ ID NO: 229 - DNA, 748 bp, Homo sapiens
ggcacgagcgaaactgttttccaatgtggctgaaccactctgcatttccaccagtaatgagaatgagagttgctgttgctccacggcctcaccagcatttggtggtgtcagtgtcttggattttagccatcctaataagtgttagtggctatcattgttttcatttgcaattctcttacatggtgtkgaacatctttccccatgtttatttgtcatctgcatatcttcttcggccagttatctgttcagatcttttgcccgtttttgtttgcttgcatgtttgtttgtgtttgattttttaaagaaagctttttttattattgagttgtaatagtgcttgtatagtgtggataacagttctctatcagataggtcttttgcaaatattttccccaatctgtggactgtcttctcattcttttgataaatggctttaaaataataatctggccgggcgcagtggctcatgcctgtaattccagcactttgggaggccaagggcagatcatctgaggtcgggagttcgagaccagcctgaccaacatggagaaaccccatctctactaaaaatataaaattagtcgggcgtggaggcacatgcctgtaatcccagctacttgagaggctgagacaggagaatctcttgaacccgggaggtggaggttgcagtgagccgaaatcgtgccactgtattccagcctggacaataagagcaaaactccatctcaaaaaaaaaaaaaaactcgag

SEQ ID NO: 230 - DNA, 297 bp, Homo sapiens
ggcacgaggtgtgtttgtgtgtgtgtgtggtgtgtgtatgtgtgtggtgtgtgtatgtgtgtggtgtatgtgtgtgtgtggtgtatgtgtgtgtttgtgtgtgtgtggtgtgtgtatgtgtatttctttgaatgagaaattggctcccatgattatggagctgacaactcccaaggtctgcaggcagcaagctggaggcccaggagggccggtggtgtggctgcagccagtgtctgaaggcctgagaaccaggagggcgggtggtgcagctgcagtgtgaaagccggcaggctcgga

SEQ ID NO: 231 - DNA, 699 bp, Homo sapiens
gattcggcacgagaaacttttaaatctttagttatttcttaatacttagaacacttaaacaaaactttacaaaacaaaagagcagaataattagatcctttcaggagaatatgacttttttttcctaagcacactggaccatagaggaagaccaaaggaatgtacagttgcctgctccttcctgacttgctgtatttgactctgtccccactggtggtggcaatgctattaaccccacactttaacgtggcaaatccccagaatctgttggctggtctctggctagagaatgagcacagtttcacccttatggctccagaaagagcaagaacacaccactgccagccagaagagagaaaagtcttgttctgtctctttcccattgtcccaaatagccaagcacaggttcaaccaccccaaatgccacccttctgctgtgcagcagccaaggaaaagacccaggaggagcagctccaagaacctctgggcagtcagtgcccagatacttgccccaattctttgtgtccaagccacactcagctgacaaaagccaacactttgtctctctttttttttttttctttttttttgagcagagtttcactcttgtcacccaggctggagtgcaatggcaggatcttggctcattgcaacctccacctcccgggttcaagcaattctcctgtctcagcctctcga

SEQ ID NO: 232 - DNA, 1894 bp, Homo sapiens
ggcacgagcagtctacctggaaattgtcacattatacaaatgtcaacttttgtgtgtgtgtgtgtgttttgttttgttttgcggtcagaggcaagggctaaaagaaagcaagatcagagaaataccaagaggtgtttactgactaaagggcaaagggatctatcagttaaccaaagcaagataaatagaactgccaattaactttatattctcagaagcagtgagcaaagaacgctgcctgaacaatgaaagtgttgctgcaactttcatatttgctgttgtctgcatgtaatttgtttccttttacatagaaatatgtggtattaacagagggatgtgattagaataccagcggaagctctctttgataggagacacacaggcaggtgcctaacagcctatggagatcaggacagtttctctccagtaaactcacaaattgtggggaccatgatctgcttaataagtaaaagggcaatggggccaagattacaatgttgaaaacatccaggcttcccacctggagtcctggcctcacagtaataataagaataaagatgtattgagatatatctagacctaactatataaatagacagatagatatacacacatacacacactgtgctaagatgcttcacatgaactccctcatttcaccctcaaacaaccacagggtagatggtttatcaccgttttagagataagaaaactccagttagtacgtcactgaagatctacacagtgacgtagatgttgtgatagacatttcttaaaaatattccaattaatcctcagaacacctgtgagaagtatactaaatatactaagctccattttatgaatgaggaatcagagtcaaggagacgagataacatgtcccaggtgacggtattagcggtcatagcaggatttgagcccagctctgtctgtcttcaaaactcatgtttaggagactcttctgctttccaccaaagcccttgatttgaacctttgctctctcctgaatccacacttctcctgaaggaggagcaaggtggagatgggatagggcacaggatggctgactctctgactggagggcctaagaaaccccactttgacacacacacagaaaactgtgccctgggtgggggtgtggggcttcatgagaaaatcaagtagcaagagagagtcttaacatgcttagatggcatgtgcctgttctcctgatttaatggatgagaaaactgagatccagggcaagggcagtgagatagtgagggtctcttagaatgagtacagccttcagggacccaccccatgtacccgtgggatcaagacgagccagaggatacctcctaagtaagaacagaaggaacagaaaacccttaaggtttgttgttgttgttgtgacagaatctcgctctgttgcccaggctggagagcagtggcacagtctcggctcactgcaacttctgcctcccaggttcaagcgattctcctgcctcaccctcccgagtagctgggattacaggcacccgccaccatgcctggctaatttttgtatttttaatacagacgaggtttcaccatgttggccaggctggtctcaaactcctgacctcaagtgatccacccaccccggcctcccaaagtgctgggattacaggcgtgagccaccgcacctggcctgaaaacacgtatcatacttgctatgtgccagacacaattctaaccacttttccacagattaactcagccttcaaacaatcctaaaaagtaggtatgattatttcctgcattttacagccaaagaaactgaagcacagagagattaagaggacttgtgcaaggtcatggagggctatagtcctaccctctgaagtaagttaaaccctctccagaaaaagcc

SEQ ID NO: 233 - DNA, 1355 bp, Homo sapiens
  misc_feature (1327)..(1327): n equals a,t,g, or c
gcccctgctggatggcactgtgggtaacctgcatcctttcactgtgcacatggttctcatgcctttacggagcagactccttggcaaataaatgcctcagtgcaggagccacacgcaaggcatttcccttctgtgtcctctttcgtgatcttgaggtgggacttgggtttgaaggctttgtcactcacctggcatgcaaactcttttgttattgtgaactctctgacagtgctttaagtctggggcacgaataaataattttccacacagctcacaactgtagggcttacatccagtgtgtgtgcgttatgtctgtgtgtgtatccttatttttttgagacggagtctccctctgtcacccaggctggagtgcagtggcgcgatctcggctcactgcaacctccgcctcctgggttcaaacgattctcctgcctcagcctcccgagtagctgggattacaggcacccaccamcacgcctggctaatttttgtatttttagtagagatggggtttctccatgttggtcaggctggtctcgatttcctgaccttgtgatccgcctgcctcggcctcccaaagtgctgtgattataggtgtgacacaccacacccggtcctgtgtatgttttgagacggagtctcactctgtcacccaggctgaagtgcagtggcaggatctcttctcactgcaacctccacctcctgggctcaagtgattctcctgcctcagcctcccaagtagctggtatttcagacttgcaccatgatgcctggctactttttatatttttagtagagacggagtttcaccagcctggtctcgaactcctgacctcaagtgatccacccaccttggcctcccaaagtactgggattacagacatgagccatcacgcccggcccctaagtggatttttaggcattctttcaggtgggcctctgtggtgaaaccttttgtgcacatttcacaaacggcttctccgctgtgtggcatttctcagctttctccactgccttcacaggaaacttcttcccgcactcctggccgacgtcgctccctaggtgactgtgcggcaaaagctcagacctcaggacactggtggctgttgtccagcctagtgtctgcttaccccgcactcatcccgtagtcacacgtgaaggcttgaggggtctggaacttcctggccgtagcaatggactttctgaactttcttgctctttcagaattgcgttttgaccctgagtgtggtcgtgggtgactcgccggcctcccgccccggggtgtggtgcctttgttctgagtcatcacaagtgccatcatcctgancctagcwtctttcagatcaccctctcga

SEQ ID NO: 234 - DNA, 802 bp, Homo sapiens
  misc_feature (23)..(23): n equals a,t,g, or c
  misc_feature (40)..(40): n equals a,t,g, or c
  misc_feature (56)..(56): n equals a,t,g, or c
  misc_feature (59)..(59): n equals a,t,g, or c
ctcacttaaaagggaacaaaaanctggaagctcccacgcnggttggcggcccgctnttnaactagtggaatccccccgggttgcaggattcggcasgagagaagaccgaggtggccgaggcgctgaccaaggtgggtccctgtctgctgcacaaccacaaacctacctctgacccccagccccaagccttgtcactctggcacagactggtcccagtgtcaggcagacctctgagcctggtcacagactgaccccttccttctggatacaggctgatctttgtcacaggccacagacctctggacctctggtcccagccataagtggactgacctctctttatggctgtatccctgctgttctggatgctcctgggggcagtgcctatagctcagggtcatcctgagattcagctcctggagtctgagagttgtggccacagcgcagagggtccttggcgggggggcctgcgctgtccgctgcagcctgggctctgagcagtgctatccctagaccttactcaggggatcctctgaactctggccctgccctgcagcttgagctatttttgcacagctttgcggtgcatggcttttaaatggctccataagcagcaggctttctgcggtgatttttttttccatctcacaccgtatcccctccttgtctcccctcccctgtctccgagggtccatctctctgggtctcttcttgtctctcctcacctcctcccgacctttctgcccttcctcatctcttggggcctgaccctgcaggctgaggctggccgcatggagctcga

SEQ ID NO: 235 - DNA, 1382 bp, Homo sapiens
cccacgcgtccgctgaattgcggccgtatgcgcggctctgtggagtgcacctggggttgggggcactgtgcccccagccccctgctcctttggactctacttctgtttgcagccccatttggcctgctgggggagaagacccgccagctgcttgagtttgacagcaccaacgtgtccgatacggcagcaaagcctttgggaagaccatatcctccatactccttggccgatttctcttggaacaacatcactgattcattggatcctgccaccctgagtgccacatttcaaggccaccccatgaacgaccctaccaggacttttgccaatggcagcctggccttcagggtccaggccttttccaggtccagccgaccagcccaaccccctcgcctcctgcacacagcagacacctgtcagctagaggtggccctgattggagcctctccccggggaaaccgttccctgtttgggctggaggtagccacattgggccagggccctgactgcccctcaatgcaggagcagcactccatcgacgatgaatatgcaccggccgtcttccagttggaccagctactgtggggctccctcccatcaggctttgcacagtggcgaccagtggcttactcccagaagccggggggccgagaatcagccctgccctgccaagcttcccctcttcatcctgccttagcatactctcttccccagtcacccattgtccgagccttctttgggtcccagaataacttctgtgccttcaatctgacgttcggggcttccacaggccctggctattgggaccaacactacctcagctggtcgatgctcctgggtgtgggcttccctccagtggacggcttgtccccactagtcctgggcatcatggcagtggccctgggtgccccagggctcatgctgctagggggcggcttggttctgctgctgcaccacaagaagtactcagagtaccagtccataaattaaggcccgctctctggagggaaggacattactgaacctgtcttgctgtgcctcgaaactctggaggttggagcatcaagttccagccggccccttcactcccccatcttgcttttctgtggaacctcagaggccagcctcgacttcctggagacccccaggtggggcttccttcatactttgttgggggactttggaggcgggcaggggacagggctattgataaggtccccttggtgttgccttcttgcatctccacacatttcccttggatgggacttgcaggcctaaatgagaggcattctgactggttggctgccctggaaggcaagaaaatagatttattttttttcaaaaaaaaaaaaaaaaaaaaaaaaaaaaaaaaaaaaaaaaaa

SEQ ID NO: 236 - DNA, 791 bp, Homo sapiens
cccacgcgtccggttctcctgcttgccatcaatggagtgacagagtgtttcacatttgctgccatgagcaaagaggaggtcgacaggtacaattttgtgatgctggccctgtcctcctcattcctggtgttatcctatctcttgacccgttggtgtggcagcgtgggcttcatcttggccaactgctttaacatgggcattcggatcacgcagagcctttgcttcatccaccgctactaccgaagagcccccacaggcccctggctggcctgcacctatcgccagtcctgctcgggacatttgccctcagtggtggggttactgctgtttcggaggtattcctctgctgtgagcagggctggccagccagactggcacacattgctgtgggggccttctgtctgggagcaactctcgggacagcattcctcacagagaccaagctgatccatttcctcaggactcagttaggtgtgcccagacgcactgacaaaatgacgtgacttcagggaagcctggacacccgaggcacctggaccagctatgggtagttctgtgggtggaacacattctgtgtaagagccccactgagggctctgcagcggagtgacagcaaccccagagatgaggcaccagagagtgccactgcatgagacacctgtgaccattcgaagtctgaaatgcggggggggagtttcatttttaagtgaagaccaaaagccctttaaaaataatagttttttatcattttatagtaaaaaaaaaaaaaaaaaaaaaaaaagggcggccgc

SEQ ID NO: 237 - DNA, 2163 bp, Homo sapiens
cgcccacgcgtccgaggcggcggagccccagccccacccagtgcggagcgcgccgcgagccccgccgyaagctgagcgcctccgcccgccaggcgcgccggcgccgggccatgtactcggggaaccgcagcggcggccacggctactgggacggcggcggggccgcgggcgctgaggggccggcgccggcggggacactgagccccgcgcccctcttcagccccggcacctacgagcgcctggcgctgctgctgggctccattgggctgctgggcgtcggcaacaacctgctggtgctcgtcctctactacaagttccagcggctccgcactcccactcacctcctcctggtcaacatcagcctcagcgacctgctggtgtccctcttcggggtcacctttaccttcgtgtcctgcctgaggaacggctgggtgtgggacaccgtgggctgcgtgtgggacgggtttagcggcagcctcttcgggattgtttccattgccaccctaaccgtgctggcctatgaacgttacattcgcgtggtccatgccagagtgatcaatttttcctgggcctggagggccattacctacatctggctctactcactggcgtgggcaggagcacctctcctgggatggaacaggtacatcctggacgtacacggactaggctgcactgtggactggaaatccaaggatgccaacgattcctcctttgtgcttttcttatttcttggctgcctggtggtgcccctgggtgtcatagcccattgctatggccatattctatattccattcgaatgcttcgttgtgtggaagatcttcagacaattcaagtgatcaagattttaaaatatgaaaagaaactggccaaaatgtgctttttaatgatattcaccttcctggtctgttggatgccttatatcgtgatctgcttcttggtggttaatggtcatggtcacctggtcactccaacaatatctattgtttcgtacctctttgctaaatcgaacactgtatacaatccagtgatttatgtcttcatgatcagaaagtttcgaagatcccttttgcagcttctgtgcctccgactgctgaggtgccagaggcctgctaaagacctaccagcagctggaagtgaaatgcagatcagacccattgtgatgtcacagaaagatggggacaggccaaagaaaaaagtgactttcaactcttcttccatcatttttatcatcaccagtgatgaatcactgtcagttgacgacagcgacaaaaccaatgggtccaaagttgatgtaatccaagttcgtcctttgtaggaatgaagaatggcaacgaaagatggggccttaaattggatgccacttttggactttcatcataagaagtgtctggaatacccgttctatgtaatatcaacagaaccttgtggtccagcaggaaatccgaattgcccatatgctcttgggcctcaggaagaggttgaacaaaaacaaattcttttaattcaacgggtgctttacataatgaaaaaaccacttgtggcacacgatgggcatctaacatcatcatcttctaatgtgttggagattttcatttcaaatatattttttaaattactctattttccaaaacacgtaatgcatttttctcgaaaataccttactgtaaaaataactgtcgcgtacacatgtgtgaagtagctagaacatactgaattttttttgtactgttggactctattcagtgtcatgtcctatatctgatcaagttatcaaggagataattctagaatgaaaaagaaaatcctcttgttggaaacaaaagacgttttatatgtgcagtatgacaaagaggagtttcagagacaactttgaatccttgtcagcctggagaccagcaccagaggaatctacaaggcaaactcccatatatttgcttcccccaaattgctgcccctacagactcaaagctctttttctttgttttgttgtttctctaaaaatttactgttctttgtcgatgctatataagccagggagttctaagacgccagctctttgagatttgctcattcccctgtatttcccacatatatattacatatacccgctaataaatttatgtttgttttaaaaaaaaaaaaaaaaaactcgagggggg

SEQ ID NO: 238 - DNA, 2087 bp, Homo sapiens
  misc_feature (1)..(1): n equals a,t,g, or c
ncccacgcgtccgctgttgctcaaaggaaataggagttggtgtgcttgtgaccaaggggttacacttccagcttttaaaattctcctttacatgtgctcagtgttttgttttgtgttttggtttctgttttttattttaattcccacattgggcacaagaatcagaatatggatagctagtttaagaaacttttgtgggtgcactgtagcatagatgacagaatttgatgttccccccatctccaattcagttcagggcattccacagttaaacagaaatgggaacgtggggctcttataaatgaaatgggcgctcacagttttggttttcagctcttcatgtctgtaagtgtgctttgggggaggctatgtctgtatggtcgattctcagttatcacatttgcctctcctcccactaccttcatggacattcagtgctgtttcgcactgcagttagagagaagggacggacagttggtgacactcagccacattgctacttttatctgttctggtaagaagttagatagatggtagattgaagcaattgggtagaattagttgggggaatatttatgagttgctgtgtttgttgattagttccatctctttcccattttaactgagaattgattatatatagctctaagtatataggtatttaaacaaccccacaagcggctgtatcagtaacatttattaattccactatagtgagggaggatttccattctaaataccttattttgagggatttataaaacttagttgtaaaagagaaagcccacatagtgggaataaattgcttcagccatttttagtatttgagagcactagggaagatgtttagtagctgtgtggatgccttttttcacaccctgtctattgaatgctgcatccattcacgaagttaaatgttacatgcagttagtccttaatgtggactggatctgtacttttgttttggattaaaacatttaaagatttttgaagtgcagctactccccacgtggcatttgatacacataaaagtcatactgtgtgtgcacaaagagtacatggattttccagcatattgctttaaaaaattatataaactgttaaaatattaacacctcaggctacctgctgtattctgtcccattgacccctggaattggatttactgcaagtgattgataattcaattatgtggcttttcccctttaatcttgccatttaaattacagtagaaagacaaaatcaagtaaaataaagtgttagataatagaaagagtgttaagaccagcccacttttctcatgtttatgttctttcatttggaccaagaatctccgcatggaggttgatttgccactggggactttggctaagactattaggtttgctttcaactagatgttcctgagacaagcagagggacactgcaattccccttccatgcctgctgttctcccccatgtaagtcttctttgaaattaacggatgtgtctcctttggaacagccccataacaaaagagaactactgatctgagcataggaaagtagaggctctaccacttttcagttgaaaaagcaagactttctctgtgtttctgaaacaaggcataatgttgtcacagaatcagagatccagtctcacttttccacaaatctccaaatctccagtcttatcttgtgtgctctaatggtttggttcaatccctttccaactcttgttttcaaagcatggggcctgagtgttctccactcctcctaagaaaggagcttgggtggaagggaccatgctgacctcctccatcagagggctcttccagtagtattctcggatgcaacctccatttctcagttaccattatttcctgtatcagctttgtccttcctggagggatgcacagtgatccggcccaccactgttgttgtcttgtgcttctgctctttcctatggtttcaggttattttctgggtttcccctattcttcttttatttccttttttttttatatttgctttcctttctactgcttttagatttgcaggagatgcaagtttcagctcaatgtttggcttctctcaatatggaaatt

SEQ ID NO: 239 - DNA, 830 bp, Homo sapiens
ggcacgagtaaggactgtgttctttatgcatttcttgatccaggcatggcagttcctcttttcctgtacatattcacactcctgccacttctaccctttctcttatccctctgcttttcacctctgactgtaaaaagaagtagcagttccgaaagcaagagttccctatgaacacggaagaagacattggcaacttttgagtacaacaactatatttaatagagtaatttaagaacatcagccagtgaattttatacaagatagtgaaagagaaaaggaagattaattaggggtagtttaggatgccattaaatagcctagaattaggggagtagtcgttgaatagaaaggaggccacaaatttgagggatataagctaagaattggtaagccaagaagaaggaaaaggtttgggcagtaaggataatgaggaacaaaatagagaactcagaagcaatatctgactgttatcattggaagaatttttttgcttgcttgaggctggatattgaagtggatcaggatacttgagtgactatctgatgggcttttggaactagctctcaagaggtgaaaattagcttttttttctttttctttctttttttttttttttgaggcaaggtctcactgttgttgaggctgaacctcctgggctcaagcagttgtcccattgcagcctcctcagatactctgtaagccaaggcagggggaatattttgtgctcagtagtttgaggctgtggtgagctaagatcacactgctgtgctcacttcagcctgggcaacacagtgaaaccccgtctccatctgtttaaaaaaaaaaaaaaa

SEQ ID NO: 240 - DNA, 1939 bp, Homo sapiens
gaacacaaacatgcagtctgtagcagatggtaataggctgayatattacacttgttgatgtaaatctgataggtttctttctctccaaggacagctttttaaatatttaacagtatcaataatttttcagtttctgtgagaattttataatttataatttgcagacttaatgtataatctattttgtcctaacaattacaaatatattttttatttcagattrtatatattcctaccagatggagataattacagctttaaaaatttttattttttcattttatttcacacattgacattaaatttttatggacacataataactgtacatatatatggggtagaatgtgatgttttaatacatgtactcaatgtgtaatgatcaaatcagggtaatttgcataatgatttttctgtagggagaaaattcaaaatctactcttctggctattttcaaatatataatatgttattgttaactatactcatcctactatgcaataggacaccagaacttattcctgggttctacatccgttaaggcaaccaaggattggaaatattggaaaaaaaaattgcgtctgtactgaacatgtacagacttttttcttgtccttattccttacacaatatagtacaataactatttgcatgacatttacatcggatattatgagtgatctagagttgatatgaagtatatgggaggatgtgcaaaggtgatgtgcaaatactatgtcattttatatcagggacttgagtatcctttgttaycctcaggagatcctgaaacyagtcccccatggatactgagggctgactgtatagtcctatcctcacggaactttcattctaatgrgggaagactgactataaacaaaatatatgtaataggtggtggtaagtaccgtggagaagtaacaaatggggcaaagtgagttatacagctccatycttagaaaccttggagtacttttcttagtttatactcgtggtggtttccttttgtctcctttattacatgggactctgacatgtgcccatagctagggtggcagtaggatctacccgaaaagcgtcctgctgatacaggaccaaagcatcctgttgttctcgagcctataaaaagagctaatggtcttgcttctcttaactgtggcctcctacactgtgttttggatgattggtgatgtcttggatattctgtttctttggaactttgaatatacaacactttactagggaattagcaatggaagcagagcaaagatgtacagaggaaacaatgcrtaactctgatggaattgaagtcatgaggcagcagagagcttaaattasagctttaaaaatttttattttttagagggaatttamttgggagtaacagcagtaatagttaacggagccagaatgcttgagtcatataattgcaaagcagagttgggagcaacagatgctaaagagtagttgctgtagttcctctttgggtcgtaggagcagttgtcatrttmctatayagctactgcatgaagaagagttcttagtgaggcctgggtgaacagctcttcttagtattctgtgtgaccccattygaccttttaacaaatccctaagtaaataaatagcccctmaggwaaactaagtttttctctgctgtttttttgcttgagagagctataactgtaatagacttatatttctgaacattttagtgcttgccaatatttggtaatatttatgtttcctatatttgtaatgaacattcttcttcmggtacatttyttgttaaattattgtttsatgsataaaagttcaccttttattgtataaaattgactcagattaatttatacacattgacaatgggtaaatagagtttttcagattattaaaagctgaaggatgcccatgtaagcaaaaaaaaaaaaaaaaaactcga

SEQ ID NO: 241 - DNA, 1126 bp, Homo sapiens
ggcacgagattgcctacaaatgtcagaggtataatggtttggttttcatgctggcttctcacacagtccatcacagtgattcttggagccagagggaggtatggaagactgtgtgttctccaagggaggcactgtggtctggtggataagagtgggagtcccaatcctttctccgcagatgtgctagctgtgcactctgggcaagtttctcactctcctgagcctcagcgtctttatcaatatgacgagaataaatacagcacctgcctacctcatggggttgtttcagcagtcaatgagatcatgtatatgaagcatttagtatacctagcacctaataaaagctcaacaaccagtagtcttattactaacaaaatggagctagaaggatgcattagtttaaacaaaatcttgaggcagatactgggagtacctgtctttattcttcaacttgagtctcctcccagtttgtttggataaaaactcaaatgtaatatttttaatttgggtaaaagaacttctgagaaagggttgaacatctatccacttgcctttttatgcctagggaactagagatacttgttggcggcatcgcaaatgttgctgacttatgaagtactgcagtatctgaatacctttttgtaggataatctaaagtttccaaaaaatagtatagtgttgtagtgaagaacttggactcttaagccagattattttgttcagattcagaaatcccctccactccacccactggctgtatagccttgcccaaatcactgaatctctgtgtgtctgcgtcctggtgtgtgaaatgaggacaatagtagctattgggtagggttggcctggggtctaagtgatgactgcctgtaaggtgtttagaacagtatttggtaaacaactggcactcaatcagtgttgctgtgattatgatgatttattccaaggttgcttgctttccagtacatcatagactactacttgaccaaatttactagcaatggagtacctgaaagttttacatgtgcacatttgcatgaaaaccccacaaaatttccctttgaacagtgaaggggacggcacaaagataattcttggcactaagcttaaaaaaaaaaaaaaaaaa

SEQ ID NO: 242 - DNA, 851 bp, Homo sapiens
gctcccacagataattgagaatatgcagtatttggttttctgtgtctgctttagtttgcctaggatattggcttctagctgcatccatgttgcagcaaaagacacaattttattctattttatggctgtgtagtattccatggtgtgtatgtaccacattttctttatacagtccaccattgatgggcaccagggttgattttatgtctttaaatatgtgctgcaatgagaaaaaacatattttctacaaaatgatagaagtttaaaaggacaagtttatgggttagctaattggcttcccattttattctctaattctcttatattgacacttcttgagatttaatgttgtttgccaggaacatggtactggtattgtgttggtaaacagtaagcggtagaaacaatggtgataacatagattcatacacaatgtgcttttaattctttgaaaaaatagaataaattcaggagtgaattgctttgtaagttgttatttttaaaacttacctgcaatgaaagaggactgtcctcctcgcagaactagagaagggtgacaagccatctccctattcactgattggattcccagtgctactagttttgtgttactgaaaatcacttgagataattctgttctatgtgcaaaaaagcmaaaaagtagaatttagaaatccaggcctgctaatagctattagccatctatttattgttctgatttttttttttttttttgagatggaatctcgttccagcctaggcgacagagtaagacctgtctcaaaaaaaaaaaaaaaaaaaaacctcgtgccgaattcgatatcaagcttatcgataccgtcgacctcgag

SEQ ID NO: 243 - DNA, 1462 bp, Homo sapiens
ggccatcggcggggcagtcgcgggatgcgcccgggagccacagcctgagctttagcccatgaggaggatgtgaccgggactgagtcaggagccctctggaagcatggagactgtggtgattgttgccataggtgtgctggccaccatctttctggcttcgtttgcagccttggtgctggtttgcaggcagcgctactgccggccgcgagacctgctgcagcgctatgattctaagcccattgtggacctcattggtgccatggagacccagtctgagccctctgagttagaactggacgatgtcgttatcaccaacccccacattgaggccattctggagaatgaagactggatcgaagatgcctcgggtctcatgtcccactgcattgccatcttgaagatttgtcacactctgacagagaagcttgttgccatgacaatgggctctggggccaagatgaagacttcagccagtgtcagcgacatcattgtggtggccaagcggatcagccccagggtggatgatgttgtgaagtcgatgtaccctccgttggaccccaaactcctggacgcacggacgactgccctgctcctgtctgtcagtcacctggtgctggtgacaaggaatgcctgccatctgacgggaggcctggactggattgaccagtctctgtcggctgctgaggagcatttggaagtccttcgagaagcagccctagcttctgagccagataaaggcctcccaggccctgaaggcttcctgcaggagcagtctgcaatttagtgcctacaggccagcagctagccatgaaggcccctgccgccatccctggatggctcagcttagccttctactttttcctatagagttagttgttctccayggctggagagttcagctgtgtgtgcatagtaaagcaggagatccccgtcagtttatgcctcttttgcagttgcaaactgtggctggtgagtggcagtctaatactacagttaggggagatgccattcactctctgcaagaggagtattgaaaactggtggactgtcagctttatttagctcacctagtgttttcaagaaaattgagccaccgtctaagaaatcaagaggtttcacattaaaattagaatttctggcctctctcgatcggtcagaatgtgtggcaattctgatctgcattttcagaagaggacaatcaattgaaactaagtaggggtttcttcttttggcaagacttgtactctctcacctggcctgtttcatttatttgtattatctgcctggtccctgaggcgtctgggtctctcctctcccttgcaggtttgggtttgaagctgaggaactacaaagttgatgatttcttttttatctttatgcctgcaattttacctagctaccactaggtggatagtaaatttatacttatgtttccctcaaaaaaaaaaaaaaaaaactcgag

SEQ ID NO: 244 - DNA, 2410 bp, Homo sapiens
ccacgcgtccgcttcgacgacgacacctgcagaagtgcggagcccgccatgccgcgccacctctcgggactgctcctgctgctctggccgctgctgctgctgctgccgccgacccccgccgcccccggccccctggcccgcccgggtttgcggaggctgggcacgcggggcccagggggcagtcccgggcgccgccctgtctctgctgtccccacccgcgcgccctattccggggccggccagcccggcggggcccgaggcgcaggtgtttgcaggagcaggcccttggatttggtgttcatcatcgatagttcccgcagtgtgcggcccctggagttcaccaaagtgaagacctttgtctcccagataattgacactctggacattggggcggcagatacacgggtggcagtggtgaactatgctagcaccgtgaagattgagttccatctccagacccactcagataaacagtccttgaaacaggctgtggctcggatcacacccctgtctacaggcaccatgtccggcctggctatccagacagcaatggatgaggccttcacggtggaggcaggagctcgggggcccacttccaacatccctaaggtggccatcatcgtgacagatgggaggccccaggaccaggtgaatgaggtggcggctcgggcccgggcatctggtattgaactctacgccgtgggcgtggaccgggcagacatggagtccctcaagatgatggccagcgagcccctagacgagcacgttttctatgtggagacctacggggtcattgagaaactctcctctagattccaggaaaccttttgcgctctggacccgtgtgtgcttggcacacaccggtgccagcacgtgtgtgtcagtgatggggaaggcaagcaccactgtgagtgcagccaaggctactccttgaacgccgatcagaagacgtgttcagctatcgataagtgtgctctgaacactcacggttgtgaacacatctgtgtgaacgacagaactggctcttaccactgtgagtgctacgaaggttacaccctgaaccaagacaggaagacttgttcggctcaagaccaatgtgcctttggtacacatggctgccagcacatttgtgtaaatgacagagatgggtcccatcactgtgaatgctacgagggttatactctgaatgctgacaacaaaacgtgttcagttcgcagcgagtgtgctgggggctcgcacggctgccagcacctgtgtgtggacgacgggcccgcggcctatcactgcgattgtttccccggctacaccctgaccgaagaccggaggacgtgcgcagccattgaagaagcacgaagactcgtctctacagaagatgcttgtgggtgtgaagccaccctggccttccaggagagggccagctcatatctgcagagactgaatgccaaactcgatgatattttgggcaagttgcaagcagatgcgtatggacaaatacatcgttgaattactcagatttttcacctggatatacggagagcttggtctatttaatatttttgcatacttcaatgttcctgctaataatttgccattgcaaatgctttaatattactggataagtagtatgaggatcttctagagaatcagtaggacataaacgttcacatccttaagagcaaactttagtgtctctaagctatgactgtgaaatgattcatggggaatagaatgaaaagtttggtatctctttatttaccaattgagccatttaatttttaaatgtttatattagtaagataaccattcttacaatgggaactttttatctattttctcttgatagtatttatagtataaaccagttttattattgagagtgtaaattatacaagtatttacacataaaaaagttcatataattgaggtaaatataatttagaactgtttctttaatgctttgttttttgctcactttttgctggaatatcactgaagctgtgatcaggggattataacacatatcaagatcaagtgaacactacatgaaatattgtaagaaacacataactaaagactttagttttgaattaagtgttataacttcttaccaagttttggtaaaaaatcctacattatctttactgtttcactttaggattcaatcaagaaaattatatacttataaatattgatctaaaaagttaacaacaaacccaatgtcgccattttaaagtttaagcttaacttttcttcacttacatatttagtatatgtattttatttttccgcttgaaagcttatagctcttaggagaaaaccatcctttaaattgtgactactcattttttctgtttgtattgtctttagtataataaaaagttactatctttataaaaaaaaaaaaaaaaaa

SEQ ID NO: 245 - DNA, 2131 bp, Homo sapiens
tcgacccacgcgtccgcggacgcgtgggcggacgcgtgggcgcggcctcccggcgctcggctccgaccccgccgccgccaccatgcagccccccagcctgctgctgctcgtcctcgggctgctcgctgcgcccgccgccgcgctcgtccgaatcccgctgcacaagttcacctctgtgcgccggaccatgtcggagttggggggccccgtggaggatctgatcgccagaggccccatttcaaaatacgcccagggggtgcccagtgtggcggggggtcccgttccggaggtgctcaggaactacatggacgcgcagtactacggggagatcggcatcgggacgcccccgcagtgcttcaccgtcgtctttgacacgggctcctccaacctgtgggtcccctcgatccactgcaagctgctggacatcgcctgctggatccaccacaagtacaacagcggcaagtccagcacctacgtgaagaacggcaccagcttcgacatccactacggctccggcagcctctccgggtacctgagccaggacaccgtgtcggtgccctgtaagtcgggtctgtcgagcctggctggcgtcaaggtggagaggcagacgttcggggaagccaccaagcagccgggcatcaccttcatcgcggccaagttcgacggcatcctgggcatggcctacccccgcatctcggtcaacaatgtgcttcccgtctttgataacctgatgcagcagaagctggtggagaagaacatcttctctttctacctgaacagggaccccggcgcgcagcctgggggtgagctcatgctgggcggcacagactccaagtactacaagggtcccctgtcctacctcaacgtgacccgcaaggcgtactggcaggtccacatggaacaggtggacgtgggcagcagcctgaccctgtgcaaggggggctgcgaggccatcgtggacacgggcacctcgctcatcgtgggccccgtggacgaggtgcgcgagctgcagaaggccatcggggccgtgccgttgatccagggcgagtacatgatcccctgtgagaaggtgtccaccttgcccgaggtcaccctgacgctgggcggcaaaccctacaagctgtcgtcagaggactacacgctcaaggtgtcgcagggcgggaagtccatctgcttgagcggcttcatgggcatggacatccccccgcccggcgggccgctctggatcctgggggacgtcttcatcggccgctactacaccgtgttcgaccgggaccagaaccgcgtgggcctggccgaggccaccaggctctagctgcccgcccgctggggaggacggggtccggcaggaggaggctggccgccccgccctcccggccacccctgccgcacacactcacgctcagactcacactcaaagcccagctctgcaggcgccgggctgtcgggctgccgttttgttctgtggtttccccggccttggtgtgtctgtctgtctagtagagggcggggtgcggggcagcagccactaggctgaccccgagtctggagccacgtcactgactgggaagccccagcctggctcggccgcccatcgtcttgcacgcgggaccccctcccccggcccaggtagttcccccccccccccccagcccgtgcttcgggggcctggctgcccaggcaggacttctggactgagcccccaccccaggccaggctgttctctgggcttctcctcctggggtctggtctggggtccagagcggggcactgctggcctgtcttcccgtgtggcccatcgtggaagggacccgccgaggcccaaggacaagcaggaagggcttggaagggtcgggactcagggacaaaaggcagccttgtgatgcctttggggtcctcctggggcttgaccccatctaggagggcatttgctggtgccgggttggggaagaaggggaggggggggctggtgccaccttctgtgagcttttcccctcttgagtgaccaggagccgaagtgaacgtggaaatacagtcgtctgggcctcaaaaaaaaaaaaaaaaaaaaaaaaaaaaaaaaaaaaaaaaaaaaaaaaaaaaaaaaaaaaaaaaaaaaaaaaaaaaaaaaaaa

SEQ ID NO: 246 - DNA, 2406 bp, Homo sapiens
  misc_feature (1934)..(1934): n equals a,t,g, or c
ccacgcgtccgcggcggcgaaggcaacaattaaggcccccaggtggactggcagcgcccgctgatgctactactgcagtctttattttttcccatgagctgggggtcgggtgggggagggaaagggagggatgaccttcctagggagaagcccacgacctgtcctgtctttgatcgcctctttgacatttttgccaaaataccactagtggaaagtcaggctagctgtgctcgtattggaatagcagcctcacactggcgtctggactgttctgtagatggaatgcaagcggactgtctgtctttaatctaacttattgctagagaatagggttttaagacgaaaagaaaactgaaacgggattggccctcattcagtgagttctgtggttccagtaaggatttgtatgtacatacgctcttgtcttacgttttgggtactcttgtctcatctgttttagctgtgcgtttcttttcagggtgtactcgaccagccatggactagtgtaaatcccgaacggacagacttggaacataaggcgcgttgatccttatggtttaggcctggccagtttcccgagtctcggattagctgacagtattaacactaaattgcagtttacagtatttctacatgacagccatacgtaacatcaagccattgattgtgtattttcctttgctagtttactttggctttgcatccgtagtcagccttatccaggttgggttttgctgttcgccgtctcccaggccacaaggcttgcctgaggggaatcgcagctccttttaggttttggtattaggtgcttggcaggtggctgtgggatttgtacccttcttcctcttaactcaaatccaccgcaaaaatgatgaatcactttaatagaaacgttaaacaccacaaaaatagagaaaattcaggtctgtatgtcattgattgtgttgatattttcagagaactcctgatttttaagctgccacgctccttcctcagggatcacgctgccatcactcttgagtgttccccgctggaccttctgctggtggctctcgggacggtggagacgccgttgagctggagaagctgggcagtcatcttgaggaaggttgtggtgcagtgtgtggaaatttaggtgctagaagcttactggtagaaaaacccaaaaggaagagaagagctcttctgttcataagcgctctgtccgatttcgggagcctcgtaagcatgtccgtttttcctccccggaaacactccttccctaagcagttgttgtaggaaaacgaactaaaggcattatcagataataaatcactcctatttgaccaagactttttctacattttttttttttctttttaatgaaagcatcaaagcgagagagtcctttctctcttgtacagttgacacatgctctggaatcgaaggaaactacgttgctgtttccacaaatttgttctcagtttagccttaggtccttcattcttattttggaaaaatctgtctgaaaaacgtgacctgtcgagtgtgtgttcagcctttctttacaagaccagaaacggtgtgaactcccgagatatggaggtaataacgccagactcgctttgttggttgctgcggtttagtcaaggagaggtatgaggaataattgaggaaacactgactgttgctttttgctctttaccagaatcggacttaagagttgggaaatgagtatgtgtgacaggatccaggtgaccgtgaggatgagaacagtgatgccctggagcatggcacagtctacccagcatgactttccttagaaggttccctccatacgctagagcaaaagtcccaattaactgaaccctagcagaactagaagagagctgtacagcttttgtgccatcaccggggccctaaagtcaatgccatggatgggaaattatgggggnttgggggggaggggtaggtggggctttccttaacttatcttcatgtccagtgagcagtgttttgtccttccttgtagcctttggaaatgatttactggaattacaaaacctattttttcttttaaatttcagctttggctctggctgctttttagaataatgcaagataacagttatacctgagggctaaaaatgaagagggaacgggagacttgatatttaagcagcttgaatggtttcttttcttttctttatttttaaagaaatgcacttgcctctgatactgtctctccagtgaaatgattactcctccattactctattgatacaatattgtgcatgctagtgttgtatttctatacagtagcttgaaatttattaacttatactgtaggtgttatgtattcctatgacaaaaaaaattaagtcttcaaattttaaaaaaaaaaaaaaaaaaaaaaaaaaaaaaaaa

SEQ ID NO: 247 - DNA, 1491 bp, Homo sapiens
ccacgcgtccgggagccatggcgccgtccgggccgctgctgctggtgctgctcgtgccgctggccgccgcgcgggccgggccctacttccgtcccggccggggctgccgcctgcccctgcggggggaccagctgtcggggctggggcgcaggacctacccccggccgcacgagtacctgtccccatctgacctgcccaagagctgggactggcgcaacgtgaacggggtcaactatgccagtgccaccaggaaccagcatatcccccagtactgtggctcctgctgggcccacggcagcaccagtgccatggcgggaccggatcaacatcaagagaaagggggcgtggccctccaccctgctgtccgtgcagcacgtcctcgactgcgccaacgcgggctcctgtgaggggggcaacgacctgccggtgtggaggtacgcccatgagcacggcatcccggacgagacctgcaacaactaccaggctaaggaccaggaatgcaacaagttcaaccagtgtggaacatgcacggaattcaaggagtgccactacatccagaactacacgctctggaaagtgggtgactacggctccctctccggcagggagaagatgatggcggaaatctatgccaacggccccatcagctgcggtatcatggccacggagaagatggtgaactacacgggaggcatctacgcggagtaccaggatcaggcctacataaaccacgtcatttctgtggtcggctggggcgtcagcgacggcacggagtactgggttgtccggaattcgtggggggaaccgtggggggagcacggctggatgaggattgtgaccagcacctataaagacgggcagggcgccagttacaacctcgctgtcgaggacacctgtacgtttggggaccccatcgtttaagggacaggtctccccagaagagcagtgttatcgtgaaccataatcagggggtcctatcgctctgggcactgggttggttccaccatggtctgaagggactggggactggcatcaaacgtgtctgatggctgctcgcggccccgtgcgcccagaagggagaaggggcgcctgtcagcacacagcctgccgcggcgccggccgggagcgcgctcctggggaagagtctgcaatgggacggctgagagccccgggccggccactgccctgccccagtgtctgcctggccaccgtgtgatccgcaaggcccaaacgatgtgactgccaagctcctctgtccctgatttggtgtttcctgtctggcagctgtggtccatgatgtggtgcggaagcccaggcttctcaaagctcttacgttgcctgggattcggtgggggggagtcggggggtggagggagaagacggccctgtgagattgcccaagtgatgaataaagtacgtgaccccgcaaaaaaaaaaaaaaaaaaaaaaaaaaaaaaaaaaaaaaaaaaaaaaaaaaaaaaaaaaaaaaaa

SEQ ID NO: 248 - DNA, 571 bp, Homo sapiens
  misc_feature (249)..(249): n equals a,t,g, or c
  misc_feature (548)..(548): n equals a,t,g, or c
tcgacccacgcgtccgggggcgtacgcgggcaagatggaggcgactacggctggtgtgggccggctagaggaagaggcgttgcggcgaaaggaacggctgaaggccctacgggagaaaaccgggcgcaaggtgagaagtgtggagtgagggtcgcagttgaggcgtccagcgttcggggtccgggtcgcgcttgaggagagcaaagggctaataaggaaagacagctgccgagggcgcgcatgccgggncgctaacgcatgcgcgagaagacgggcgccctcccacgatgtctggggctgcttggcgtgggactcctctggcgctggtgcggtcgtcgcgcacgcgcgggggtgggcaargcatggtcagcgacccgcagtccatctgactcctgcttcccgggtgttgctcgtgtaggtatctagggctgcctgtaggttcagatgcttgttgggttaggcgtgatttgttccgttcctctatggcctagctggtctttaacccccgccttcgattctgagtcagacagactccccagttcgggcangcaattcccttggaacaagggca

SEQ ID NO: 249 - DNA, 2499 bp, Homo sapiens
caccagcaccccgcccagagcagtgccgctgcccaaatcctcgcaggcagctcatcaacgcaattgcaactccggctggagccccggacctgcaagcctgggtgtccgtgggtccgtctgcccagccatctgctggtggcacctctccctcctgccgcctccctcggtgaaccccaccttgcagaagtgcagctcgcccggagcagcccaggagctcagcatgcgtcccccaggcttcaggaacttcttgctgctggcgtcctcccttctctttgctgggttgtcagctgttcctcaaagcttctcgccatctctgaggagctggccgggcgccgcctgcaggctgtcccgggccgagtcggagcgacgctgccgcgcacctgggcagcccccgggggccgcgctgtgccacggccggggccgctgcgactgcggcgtctgcatctgccacgtgactgagccgggcatgttcttcgggcccctgtgtgagtgccatgagtgggtgtgcgagacctacgacgggagcacctgtgcaggccatggtaagtgtgactgtggcaagtgcaagtgtgaccagggatggtatggggatgcttgccagtacccaactaactgtgacttgacaaagaagaaaagtaaccaaatgtgcaagaattcacaagacatcatctgctctaatgcaggtacatgtcactgtggcaggtgtaagtgtgataattcagatggaagtggacttgtgtatggtaaattttgtgagtgtgacgatagagaatgcatagacgatgaaacagaagaaatatgtggaggccatgggaagtgttactgtggaaactgctactgcaaggctggttggcatggagataaatgtgaattccagtgcgatatcaccccctgggaaagcaagcgaagatgcacgtctccagatggcaaaatctgcagtaacagagggacttgtgtatgtggtgaatgtacctgtcacgatgttgatccgactggggactggggagatattcatggggacacctgtgaatgtgatgagagggactgtagagctgtctatgaccgatattctgatgacttctgttcaggtcatggacagtgtaattgcggaagatgtgactgcaaagcaggctggtatgggaagaagtgtgagcacccacagtcctgcacgctgtcagctgaggagagcatcaggaagtgccagggaagctcggatctgccttgctctgggaggggtaaatgtgaatgtggcaaatgcacctgctatcctccaggagatcgccgggtgtatggcaagacttgtgagtgtgatgatcgccgctgtgaagacctcgatggtgtggtctgtggaggccacggcacatgttcctgtggtcgctgtgtttgtgagagaggatggtttggaaagctctgccaacatccgcggaagtgtaacatgacggaagaacaaagcaagaatctgtgtgaatcagcagatggcatattgtgctcggggaagggttcttgtcattgtgggaagtgcatttgttctgctgaagagtggtatatttctggggagttctgtgactgtgatgacagagactgcgacaaacatgatggtctcatttgtacagggaatggaatatgtagctgtggaaactgtgaatgctgggatggatggaatggaaatgcatgtgaaatctggcttggctcagaatatccttaacaattacatgagagaggtctggattcttattttttctgggccattagaacatataaatgcgaaggaaaccatgtatattcaccactaggacaggttaaaaagaccattgtatgtttttctatttctgaattacgaatgaaatccgagtacctattagaaatgagttatgcaaatttagatgcaaataacattagaaaaaaaagattcttccataattaacataagtggttcctaacgagagcaatttttccacccaaaagtcatttggcaacatctacagacaattttgattgtcacactgggtcgggtaggaaggtatgctgcagacatttggtgggtagaggccagggatgctgctgagcatcccgcagtgtacaggacagcccccaaacaaggaattatccagccccaaatgccaatagggctcagactgagaaacattgagttatatggctattagaaatccacattcttacacaagaaagaccatattagaatctaaggaaaacatgcatattcacattaattaatcgatcagatttttccagaattccgtatcagtcaccattttaatatggggacaatgaagacaagcacacaggaggtagaatatcagagtggggctggatcaagggcaaaaactggtcattaagtcatctgacattaaatcatttagccactaagttatttgtgtactctcactttaaactcaccaaagaagattctcttaaagaaattatgaaaaatgtacaatttaacattttaaataaatagtgacagaagttgtttaaaaa

SEQ ID NO: 250 - DNA, 3530 bp, Homo sapiens
  misc_feature (30)..(30): n equals a,t,g, or c
  misc_feature (59)..(59): n equals a,t,g, or c
  misc_feature (79)..(79): n equals a,t,g, or c
  misc_feature (3465)..(3465): n equals a,t,g, or c
  misc_feature (3471)..(3471): n equals a,t,g, or c
  misc_feature (3485)..(3485): n equals a,t,g, or c
  misc_feature (3487)..(3487): n equals a,t,g, or c
  misc_feature (3505)..(3505): n equals a,t,g, or c
gacatgaagccaaccggcacccggccccanatttgttataacagtactctaatttgaanccatgataaaaataaccatncatttgtaaatccacagaggaccctggtgaattcctaacacatattttctgtcttgttaagctgttgaattgcatcatggtggagaaatgtgtaaatagaagtaatgatcttggtgtttgtaaaaggggtatttgaaaggttcccgaaagtgtgagggggctgatagcagatctgcagcttctccccccgtgcactaaagccaatcataattctttctacctggtttgtgtcatcctccattaggagaccccatcttcagaaccaatggaggaagaggaagatgacgacttggagctgtttggtggctatgatagtttccggagttataacagcagtgtgggcagtgagagcagctcctatctggaggagtcaagtgaagcagaaaatgaggatcgggaagcaggggaactgccgacctccccgctgcatttgctcagccctgggactcctcgctccttggatggcagtggttctgagccagctgtctgtgagatgtgtggtatcgtgggtacaagggaagccttcttctccaagaccaagaggttctgcagcgtctcctgctccaggagctactcctccaactccaagaaagccagtatcttggctaggttacagggaaaaccaccgaccaaaaaagccaaagtcctgcacaaggctgcctggtctgccaaaattggagccttcctccactctcaagggacaggacagctggcagatgggacaccaacaggacaagacgctctggtcttgggcttcgactgggggaagttcctgaaggatcacagttacaaggctgctcccgtcagctgtttcaagcacgtcccactctatgaccagtgggaggatgtgatgaaagggatgaaggtggaggtgctcaacagtgatgctgtgctccccagccgggtgtactggatcgcctctgtcatccagacagcagggtatcgggtgctgcttcggtatgaaggctttgaaaatgacgccagccatgacttctggtgcaacctgggaacagtggatgtccaccccattggctggtgtgccatcaacagcaagatcctagtgcccccacggaccatccatgccaagttcaccgactggaagggctacctcatgaaacggctggtgggctccaggacgcttcccgtggatttccacatcaagatggtggagagcatgaagtacccctttaggcagggcatgcggctggaagtggtggacaagtcccaggtgtcacgcactcgcatggctgtggtggacacagtaatcgggggtcgcctacggctcctctacgaggatggtgacagtgacgacgacttctggtgccacatgtggagccccctgatccacccagtgggttggtcacgacgtgtgggccacggcatcaagatgtcagagaggcgaagtgacatggcccatcaccccaccttccggaagatctactgtgatgccgttccttacctcttcaagaaggtacgagcagtctacacagaaggcggttggtttgaggaagggatgaagctggaggccattgaccccctgaatctgggcaacatctgcgtggcaactgtctgtaaggttctcctggatggatacctgatgatctgtgtggacggggggccctccacagatggcttggactggttctgctaccatgcctcttcccacgccatcttcccggccaccttctgtcagaagaatgacattgagctcacaccgccaaaaggttatgaggcacagactttcaactgggagaactacttggagaagaccaagtcgaaagccgctccatcgagactctttaacatggattgcccaaaccatggcttcaaggtgggcatgaagctggaggccgtggacctgatggagccccggctcatctgtgtggccacggtgaaacgagtggtgcatcggctcctcagcatccactttgacggctgggacagcgagtacgaccagtgggtggactgcgagtccccagacatctaccccgtcggctggtgtgagctcaccggctaccagctccagcctcctgtggccgcagaaccggccacaccgctgaaggccaaagaggccacaaagaagaaaaagaaacagtttgggaagaaaaggaaaagaatcccgcccactaagacgcgacccctcagacaggggtccaagaagcccctgctggaggacgaccctcagggtgccaggaagatctcgtcggagcctgttcctggcgagatcattgctgtgcgtgtgaaggaagagcatctagacgtggcctcgcccgacaaggcttcaagtccagagctgcctgtctccgtcgagaacatcaagcaggaaacagacgactgagccttcctgcctccagcctggcttctagctggaagccagcccagcgtttctctaccaccaccaccatgcctccacctgactttggcttggagactgatcctctctgtgtaaattctgcccggtgctgtgaaggctggacggtggaggacctgctggggtctcctgggacccgcctgttgcttctgccctcccctgtggaaaggtctatatgacgggccgcctgaggccccagaactcgtctgtgaaccaccttttccagccagagttcccaaagctggaacgctagctgcctgctcttccttaagatggcctccccccgacccgccacggccctcagttgccagggatggggccaccactgtcacactgtggaatacaagacagtgaactctgtctgcctgaacgagtcatgtaaattaagttctagagcagctctctgagcaggataaggtcccctgacagtgagttgtgtggtgggggcagcctctgcctcaaaaattcaccaagcagaatgcctctcagcctcatgtgttggtcctctgctcctcctagctccccagggatgttggggacccagcttgtctcggcagctaagaagcagtgaccaggatgtggattttggcgacctgtgtggtggccttgagctgctttctgtgtttgtgaggactgactcccatttcctaaaggaaatgcccccggggaggacattgggaggaagatggcctgagtgtgcactttggctctgctacctgctcctgaagccccgctaaaaataattcatccaagattcctttgtagttaaagggtccagttctgactggagcctctagagagctgggcttgtatgttcttttggccttttgttcctacctaaatgaagaaaccatgcctggaggggccgtgaacacagaaccctcaagacaaggatgacagagctggaggacacatctagctgccattgcaacctcactgggctccccagactctgtgtgtgagaaattaaaccccctgcttgcttgagtcccgtttgttaaggattcttctattnccttgncagatttgtgttcngnaccccacccccccacctngtggtattcggttcagaaagggcca

SEQ ID NO: 251 - DNA, 1145 bp, Homo sapiens
  misc_feature (386)..(386): n equals a,t,g, or c
aattcggcacgaggacatattggccatttactctactaataaaagagtactatctactcagtgtcatttactgttactgtagtaattaatgcctttggaagaatcttttgaaatagttctcaaattggtaccactacttggtttggaattatttttttttcttttcataatcaatggttatataaatgtatattgtcctagtcagtattttatatatgctaaggactcactagctggcttggcactaatacctcaataaaaggaatacttcttttggaatcatgaaacaaaagtgartaaacctccaagttatttttccaaccaaccttctttgaaaaatcttggatgagtcactcaaatcaagacatgttataaaattatctgtnattttggtagaacatatacattgtyctaataataatttycaaatattcagtgkaacygtaagkatgagaatacaggttgaatatcycttatccaaaatgcttgggaccagaagtcttttggattycaaatttttaaatatttacatcatacttaccagtttaacatccctaattcaaaaattcaaaattcagaatgctccaataatcgtttcctttgascatcatgtcagtgctcaaaaagttgcagattttgaggtatttcagatttttgaattaggaagactcaacttgtactatcattctatagactttatgattgggtagactacatgagtattgaacccagaaatcattgtctagcaaaagccagtatagtgattaattaccctgtgactattatataatgttcaaaaaagctaacatattagaatgtccttagcgtgcagagagcaaacagagacaaaaagaaaagttaccctgaaaagtttgtcagaaaaatagaatatcagacgctraactactcatccagaattttgtcraaaaagaaaaataagataaaattcactggtagacaaaaagtagtaacataccagtttgtaatttctcagtttcaaaccatgaatatgtatttgtataccaaaaatcatttcaggagtcagagaaggaggatatgccttttatgtggagactttaaacataaaattggaaaaaaaaaaaaaaaaaaactcgtagggggggtcccgtacccaatcgtcctgt

SEQ ID NO: 252 - DNA, 2214 bp, Homo sapiens
gcagtcgcagcatgctttccgaggaagccggtgttgccgagattgccaaaatgctttggagtttttaactgaatctaagaaaagtccaaaatagatttgagactgtaaaaacagaaactgcagcaagggggattcagtgccaatgcatcaacaaaaaagacaaccagagttagtggaaggaaatcttcctgttttcgtgttccccacggagctcatattttatgcagatgatcagtcaacacataagcaagtgttgacactgtacaatccctatgagtttgccttaaagttcaaagttttgtgtactactccaaataagtatgttgtcgttgatgctgcaggtgcagtaaagcctcagtgttgtgtggatattgtgattcgtcatcgagatgttcgatcctgtcactatggtgtaatagacaaattccgtctccaagtttccgagcaaagccaaaggaaggctttggggaagaaaagaggttgttgctactcttctcccatcagcaaaagaacaacaaaaggaagaagaggaaaaaagattaaaggracatttaackgaaaktttattttttgagcagtcgtttcaaccaggtcttatcacaatggccatacttagaacatgagcaaggatttcaattgacttctgaagtaaatctgtcttgaaaatatgaatgtggactgccttttatctctatttcactccattaacatgcaacaaactattgaatgatttcaaataattgcaaatgtataatatatattttaaattataatttaatttgaaggactgcagaacattattttacagacagcaaggatgcttctgagtgacacctaggaaattatttgaagaaattctttttatatctayacctgttgtgtaagaaactttaaaacattkgttattttctcacctttttttctaattcactttgattgctaggggtcatgtatgcttcgaagttacaggactaaaagagcaaactgaccggcctaaaactaaaatgacatttattccctagctacaaacatcagcgttattatgttaattataccttgccctctatcattataaatggttgccatggtgtttctaaaaataagtgttttaccattaatgtgtagagggcaaacaaagcataaagtactaagggatcatgcttatcctagggtctcacagaagagaggacatatttaattaatcttgtgaattacagaacaggttgtggtccagacaccaagaatcataggggtttttttttaaaaaacctaatagaagtagggtgacctctctctttggtctaagagttctaaaggaaggtaggcatctgtttaattagttggttcaccctggctttacctctggttaatgctttgtgttaataggaaggaaaaatcactttatcttttcttccaagcccctccctgcctgacttacccagactgggattaccagataccaggtgatttatgtggagatgatttttcacctttaaactctaagccaagtgtaagaaactcttgatagctatgtctattttatatcagtcactgagacttttttttaagtttttatttattattaagacaactttgccaaaaaagtcccctaagcacaactatttacatttctttatagcctcttctgatctctaacacatatgcagttttaactgttattttcatagtaactgatcttttgtctaaggatttttacctgaaagcacaatgtattgagtctcttgaaaatcatctttcagatctttttacagaatgaacttatgcactgctactgtagtattctcaaggaatatatgtaaacacaaatgtatgcctgaggttggtttttgcagaaaacagtctctgcttctaaaaacttctatgtctagtcttccataggaaatcctcactgtttaaccatgtgaggagcctaagtcattaaacggatcatgtctgtacattgtgtaatgaatgaaaagcacataaatgtaatctactttgaactttgtaaaaatgatgtgtggaggctattcttgtttctccatctcaagtcctgtgtgtgcacgtgtgtgcaagtgcacatgtgtgtgtgtaataacacattgtaaagaacagaaattactttaaaaaataaacagaaatggagacctgaaaaaaaaaaaaaaaaaaaaaaaaaaaaaaaaaaaaaactcgagggggggtcccgtacccaat

SEQ ID NO: 253 - DNA, 2527 bp, Homo sapiens
ctcttgctaccttcccggcgcagagaaccccggctgctcagcgcgctccggggtcatggagatccccgggagcctgtgcaagaaagtcaagctgagcaataacgcgcagaactggggaatgcagagagcaaccaatgtcacctaccaagcccatcatgtcagcaggaacaagagaggtcaggtggtggggaccagaggtggctttcgtggttgcacagtttggctaacaggcttgtctggagcgggaaagactactgtgagcatggccttggaggagtacctggtttgtcatggtattccatgctacactctggatggtgacaatattcgtcaaggtctcaataaaaatcttggctttagtcctgaagacagagaagagaatgttcgacgcatcgcagaagttgctaaactgtttgcagatgctggcttagtgtgcatcacaagtttcatatcaccttacactcaggatcgcaacaatgcaaggcaaattcatgaaggtgcaagtttaccgttttttgaagtatttgttgatgctcctctgcatgtttgtgaacagagggatgtcaaaggactctacaaaaaagcccgggcaggagaaattaaaggtttcactgggatcgattctgaatatgaaaagccagaggcccctgagttggtgctgaaaacagactcctgtgatgtaaatgactgtgtccagcaagttgtggaacttctacaggaacgggatattgtacctgtggatgcatcttatgaagtaaaagaactatatgtgccagaaaataaacttcatttggcaaaaacagatgcggaaacattaccagcactgaaaattaataaagtggatatgcagtgggtgcaggttttggcagaaggttgggcaaccccattgaatggctttatgagagagagggagtacttgcagtgccttcattttgattgtcttctggatggaggtgtcattaacttgtcagtacctatagttctgactgcgactcatgaagataaagagaggctggacggctgtacagcatttgctctgatgtatgagggccgccgtgtggccattcttcgcaatccagagttttttgagcacaggaaagaggagcgctgtgccagacagtggggaacgacatgcaagaaccacccctatattaagatggtgatggaacaaggagattggctgattggaggagatcttcaagtcttggatcgagtttattggaatgatggtcttgatcagtatcgtcttactcctactgagctaaagcagaaatttaaagatatgaatgctgatgctgtctttgcatttcaactacgcaacccagtgcacaatggacatgccctgttaatgcaggatacccataagcaacttctagagaggggctaccggcgccctgtcctcctcctccaccctctgggtggctggacaaaggatgacgatgttcctttgatgtggcgtatgaagcagcatgctgcagtgttggaggaaggagttctgaatcctgagacgacagtggtggccatcttcccatctcccatgatgtatgctggaccaactgaggtccagtggcattgcagagcacggatggttgcaggagccaacttttacattgttggacgagaccctgctggcatgcctcatccagaaacagggaaggatctttatgagccaagtcatggtgccaaagtgctgacgatggcccctggtttaatcactttggaaatagttccctttcgagttgcagcttacaacaagaaaaagaagcgtatggactactatgactctgaacaccatgaagactttgaatttatttcaggaacacgaatgcgcaaacttgctcgagaaggccagaaaccacctgaaggtttcatggctcccaaggcttggaccgtgctgacagaatactacaaatccttggagaaagcttaggctgttaacccagtcactccacctttgacacattactagtaacaagaggggaccacatagtctctgttggcatttctttgtggtgtctgtctggacatgcttcctaaaaacagaccattttccttaacttgcatcagttttggtctgccttatgagttctgttttgaacaagtgtaacacactgatggttttaatgtatcttttccacttattatagttatattcctacaatacaattttaaaattgtctttttatattatatttatgcttctgtgtcatgattttttcaagctgttatattagttgtaaccagtagtattcacattaaatcttgctttttttccccttaaaaaaagaaaaaaattaccaaacaataaacttggctagaccttgttttgaggattttacaagacctttgtagcgattagattttttttctacattgaaaatagaaactgcttcctttcttctttccagtcagctattggtctttccagctgttataatctaaagtattcttatgatctgtgtaagctctgaatgaacttctttactcaataaaattaattttttggcttcttaaaaaaaaaaaaaaa

SEQ ID NO: 254 - DNA, 978 bp, Homo sapiens
ggcacgagcacttaatctcaggtgaacgcatcacttgccaaactgttggaatgctatttgtgttttgttgcactgtttttttcgtttgtttgtttgtttatttggttggctttttggagagggaaatttggaaacgggacatacacaaaagttacacacccacattccctttttatcatgacatacaagaagaaactagcagagctaagaatggagtgaagaaaggcagtatggcaggcaccagcaaagagttgagggctgttgctcttaaaaattattttttttattattattttgaaagtatggaagttttccattcactggggaaaggagggaaaagtgcatttatttttatacagagttacttaattacctccaaaacacatatgttggaaatcgcttttgctggtgcaaagtatattaatgagcaggaatacatacattgaggttatgaatagagagctcaatttgtacctttgctgtcttgctcaagcttggtatggcatgaaaactcgactttattccaaaagtaacttcaaaatttaaaatactagaacgtttgctgcgataaatcttttggatttttgtgtttttctaatgagaatactgtttttcattacctaaagaacaatttgctaaacatgagaaatcactcactttgattatgtatagattacataggaagaacaatcacatcagtaagttatagtttatattaaaggtaattttctgttggctcataacaaatataccagcattcatgatagcatttcagcattttccaaggtaccaagtgtacttattttgttgttgttgttgttgttgtattttagaaggaattcagctctgatgtttttaaagaaaaccagcatctctgatgttgcaacatacgtgtaaaatgggtgttacatctatcctgccatttaaccccacagttaataaagtggctgaaaataataaaaaaaaaaaaaaaaaaaa

SEQ ID NO: 255 - DNA, 813 bp, Homo sapiens
  misc_feature (283)..(283): n equals a,t,g, or c
  misc_feature (691)..(691): n equals a,t,g, or c
gcaggaatttctacctatatttccttccttactgtgttgtgtgtgtttgtatgtgtgtgtgtttaatttgtagcatttgccagtttctgtggtgtaaatactcccactacagctgttttcaagctaacattgtgataccacaaaaaatggaattgggaaggcacaatcaagattaacaagccagtttagaccaagacaatttttctgccctattagttgggcacaagttagaaaggctgatagtatctcatgttggaaaggtgagagagaaggccctcatgcnttattaatggcatatgcattgaagtgccctgtttgagggcatgctgttagtaacttttaaaatatgagatgtcatactttttgactgaaaatacaactcttgtaggattctattttatagaactacttaggtgcataaatatacaaaaataactgtcattgcagcattatttgtaatagtggaaacagaagacttttcattaataagagaatggttaggccagatccagtggctcacacctgtaatcccaacattttgggaatccaaggcaggaggatcgctttagcctaggagttggagaccagcatgggcaacataacaagaccttgtctctactaaaaaaaaataataataattagtctggcatggtggcacacctgtactcccagctacttgggaggctggggncaaggaggattgcttgagcccaggagattgaggctgcagtgaactgtgatcacaccactgcacaccagcctgggtgacacagcaaaactctgtctcaaaaaaaaaaaaaaaaaaaactcgta

SEQ ID NO: 256 - DNA, 665 bp, Homo sapiens
ggcacgagaaactccagttaatgccatttattttgcttcttgtttgcttaacctccctgccttctaggggttataatgagaagaaactaacagacaatattcagtgtgagatttttcaagttctttatgaagaagccacagcatcctacaaggaagaaatcgtgcatcagctgcccagtaataaaccagaagagctagaaaataatgtagatcagatcttgaaatggattgagcagtggatcaaagatcataactcttgacttataaggctagctacttaataatcactcttgttgatatctctgccgacatcatagaaattgttcaagtgtcagtaacactttattaaaatcatgttgcagaaccagcaggtggatagtatataggtttatgcctgtgtttcttttctccatgagaaagctaaacatgaaatataatgaatatagtaattattaagggattgagacaaaaactgtgattttaatacttaaattgctaaagaataaataaatctgacaaaatgggtggatatcttttaagtttattacagaaaaaaatgcagatgatctcttaaaataaaactaaagataaagcaaaaaaaaaaaaaaaaaaaactcgtagggggggcyccggtacccaatcgccctatgagtgagtcgtattac

SEQ ID NO: 257 - DNA, 1739 bp, Homo sapiens
ggcacgagagatcctcaggatatctttagccaaaggaaaagctccgcattcccacctggggggaaagctggattgccatgggcacgaagtagtggtgcagagtccctggccatcctgaatatccagaatggtgtttctgaagttcttctgcatgagtttcttctgccacctgtgtcaaggctacttcgatggccccctctacccagagatgtccaatgggactctgcaccactacttcgtgcccgatggggactatgaggagaacgatgaccccgagaagtgccagctgctcttcagggtgagtgaccacaggcgctgctcccagggggaggggagccaggttggcagcctgctgagcctcaccctgcgggaggagttcaccgtgctgggccaccaggtggaggatgctgggcgcgtgctggagggcatcagcaaaagcatctcctacgacctagacggggaagagagctatggcaagtacctgcggcgggagtcccaccagatcggggatgcctactccaactcggacaaatccctcactgagctggagagcaagttcaagcagggccaggaacaggacagccggcaggagagcaggctcaacgaggactttctgggaatgctggtccacaccaggtccctgctgaaggagacactggacatctctgtggggctcagggacaaatacgagctgctggccctcaccattaggagccatgggacccgactaggtcggctgaaaaatgattatcttaaagtataggtggaaggatacaaatgctagaaagagggaatcaaatcagccccgttttggagggtgggggacagaagatggggctacatttcccccatacctactatttttttatatcccgatttgcactttgagaatacatctaaggtcatctttcaaaagagaaaaattggacacttgagtgactttgtttttagttttgtttttgtacattatttatgtgattgttatggaattgtcacctggaaagaacaattttaagcaatgtcatttctagatgggtttctaattctgcagagacacccgtttcagccacatctaaaagagcacagtttatgtggtgcggaattaaacttccccatcctgcagattatgtggaaatacccaaagataatagtgcatagctcctttcagcctctagccttcactcctgggctccaaaagctatcccagttgcctgtttttcaaatgaggttcaaggtgctgctttgcatgcctgccaacccatggaagttgtttcttacttcttttctctcttatttattaaccatggtctgagagttgtttttgttctatgtaacagtattgccacaaaactataggcaaatcgtgtttgcagggagatttctgatgcctctgtgggtgtgtgtaagttaaagtggccacatttaagaaggccaagctttgtagtggttgcacagtcacactgatatgctgatttgctctttctcattgtatgtctatgctttgtcatcagtgctatagtaaattacaaagaaataggtagattgtatgaacatacccacaaatgcctatgatttaggttaccaatgtattctttctcatttggggttttgcttctgtctgtctgtttattggaaacttgtacttcaagtagggggaatcctaattctaataactccttagctaagttttattattcaggcaataaacatgttttcatgtaaaaaaaaaaaaaaaaaaa

SEQ ID NO: 258 - DNA, 1139 bp, Homo sapiens
ggcacgaggtcactcctaatgtaggatgggacgattgccccaagctctgtcgtgagtggttgattgacggttttcttaagggaacaatgctgggaaagatgataggcgcccgccactgacccctcccgcctccctgcccctccagtaaactcccacacaaaatagcagtatgaggtgtggggaaataatcttggcctccgtcctgggtttacttttgactctgccacctacaagctgtcacctgaacaagtcctttccgttcctgtgtcttccctggtcacaagctctaagcctgaacccacactctgggaatgaagcagggtagcggcctctgcttcagcaactctgaggggtctaccttgggtggggagttggcctcatccagagggctgctggagggccaagacaaggctctggtggggaggtgtgctgagaggggattgcttatcccaccaccagcttttctgggggaggtggggaagtgatggttaaaaaatggagttcctgctatcagccatgtcctgatgaattggaaagtccccttctttctcctttcctcttgcatctcctgcctgcttcccctgcctgccctcctgtgacatgtgccctctccagcaggtatgtcacacagcaccccaagggaagggcagtgtaacgctcttttccatgatggactaccacagccagaggaagacaggccttcccttcttttctagttctttttggtttgaaaacaaggcactcttattttccccttccaagaagctggtggttcacacgggccagcacacacattatcaaagacctagtttgtttctagtaaatgagtccattgaagtgggagccttggccgggcaaggtggctcacacctgtaatcccagcactttgggaggccgagatgggtggattgagatcgagaccatcctggtcaacatggtgaaaccctgtctctactaaaaatacaaaaattagctgggcgtggtgacacacacctgtagtcccagctactcaggaggctgaggcaggagaatcgcttgaacctgggaggcggaggtaacagtgagccgagattgcgccactgcactccagcctgggcgacagagtgagactgtctctccaaaaaaaaaaaaaaaaaaaa

SEQ ID NO: 259 - DNA, 1677 bp, Homo sapiens
  misc_feature (1012)..(1012): n equals a,t,g, or c
ggtgcagtggtgccatcacagttcactgcagccttgacctcccgggctcaagcaatcctcccacctcagccacttgagtagctgagacctcagatatgtgccatcacacccagctgattttttaaaattaattttttgtagagatagggtctcatatgttgcccatgctggtctcaaactactgggttcaaatgatcctcctgcctcagccttccaaagtactgggattacaggcatgagccaccatgccgggctgggaggcggaattttgttcagtctaaagataagctttttcatagctctggctgtagtgggagggagcagaggagtgaatgattgtcagttgggagggtgcagagtgggctcctgccctagggtgraggtragggtggcttaggtgasmcamcacagaggccctgttcagccccacgtcccctccctgtgctccctcctcctctctcctctcctgcaggcgtggraggtatcatcattcagcagatttcaccagaggcagtggaggaggcaggtacctgagccagaattcagaatgtcttattctccacttgactctgccactaacttgttgtgcaactttgggcctttccccaggccttcattttcttttcttttctttttctttytttttttttgaggcggagtctcgctatgttgcccaggctggagtgcagtggcgcagcatcatctcggctcactgcaagctccaccttctgagttcacgccattctactgcctcagcctcccgagtagccgggactgcaggcrcccaccaccacgcccggcttattttttgtatttttagtagagacagggtttcaccacgttagccaagatggtctcgatctcctgacctcgtgatccacccgcctgggcttcccaaagtgctgggattacaggcgtgagccactgcgcccggccattttcttaaatatctaataaaaaatatatagcaaatgcagtttttaaactacgacaatatgaccacgcaaaagantattatcttccaagactgctggtccaaggaaaagtcagtaataaagtggaagcattgtagcttatggaatgactggttasatttgggagaagccttagcaataatctagaatctgcatagataatacatctgaggattgggctttgtggtttacaaagcatttttttttcctcttttgatcccagccgtttgtctggactgatacaaagcatttttattagtttgtcttattcaatcctcacaccacctcaaatttacagaggatatggatctggttaatttgtatgactatgtaacctcatgtcagtccacagcactgcctggaggtgggtagaggtggtcctgggctggaatcccagccccagtgggaccttgagcaagttactttagctgtctgcacctaaatttcctcactggcaaaacaggaatactggtggttcacacctgcaattccagcactttgggaggctgaggtgggaggattgcttgagtccagaagttcaaaaccagactgggcaacatagcaagaccatctctacaaaaattaaataaataaaacatttacaagggttgtggtgaagattaaatgagatcactcacgaaaaagctcagcagaccctgatgtgcagtaggtgctcaataaatgttagccagcaaaaaaaaag

SEQ ID NO: 260 - DNA, 2648 bp, Homo sapiens
ggcacgagcttgtaggtactcattgaggtttattgtgtaagatgaatgaatgttgcaaattcctaaacatgtgattcagatgcccaatcttactctgttactttatgaaaattttttaaagctatatgatgttatatcaaaatatgttgttatactttaggataatcggtgtgttagccctgaatttcagcataagtcccatttttttccatgggagtctaggaaagctatatgtttattcagcagcaaaatacagtttggaacttaaataaactattgatcaatttctggtcttatgctagaaggaataaagcatcaagaaaaagaaaagatttgctgtcaagaccaggaaaatttgacaatagagtattagaatgcaggaaatgaggggaagtggaaaggcagcaagtaggagagaaaaagtgcagggacagtagaaagtgaatgtaggagctttctgacccatgcacttcaggaacgcaattcatccctaaaatgctgtttgctgtcttaggttgcaagtaaccaaattaaaaccagtttgaaagtagagtgagacagctgtcatcataagagtcatttgatctgtttaaaggtggctgcttgtatgcagggaccaacagtcatgtccagggcagcagctggtgcacacttcaagcacagaccataagagctaccccaggcagcacctgctaccaatagtgcaaacaactcagagagacctcgttggcataagggaatactctctcctttctgagtaaagagcaagtagaactaaaggtttcacattttaaacatactttacattcctcctcttctggggctcaagcctacttttgggccaaagcggatgttatatctgacatagagtcctcggagcagcagttgttcctgaaagttcctttttgcatctttgtgcctcatgcagtggcttacaggtcaaccagacttctcccctgacttttgatgtgtaagagcttgtgtttcaaatgggtttggttttcttaatgtcaccctaggttggtggaaaggagagtaaatggaaatggggggagcagggtcccctggggaggtttaaacagatggaagtcaattgtctcttgagaatagaggaggctattgagttttcattccacactctgctcctgttctgtcagcaaagaacaaggactactctccagcaattgctttccactggactcccccaccccggctcccacaaaaacctagggatcaacttagttcactccaaattagaaaatttaatagtcatttgtttcttcttgtccacagggagaaccattttctttccttctttcaaaattgcccaggtcttgtgaagggttattaacaccagaaagaaatacattttaataagcttaaatctcatttctacatgaaaccatcagattttagtactgcaatattttgatccctctgtcttttaggctctgacaccaaaattgccataatgaaggtgtttcacttcttctcatttatttttatgggatcttttattcccaaatgccttttcatcccagccaaagggagaaatgttgatagatctgccatcaagaaggttccaaagctggcctgtcaggttttctgtttccttgtttattatctttgaacttttgttttaaatgttttaaacacttatttaccatgtaactaaatgcctgatagcattgaaagtactttatgggttttaatttatttaatgctcatgaaaccctatgaggtaggtactgatattatttttattttactgatgaggaaagtgaagcaaagagaagtgaaatgaaaggtagtgagtgatgggaccagggtttggacatgggcagtctggctctaaaatgtatgcttttaactactatgtaatgctgcctcaccaacaacttgtctcacaaattgatattctggatcagaggatgtcgactggcctgcaaatgtattttgtatggctcatacacagttcagaagttttaaaaatttacatagaaatctgcatttcctgacttcttttgaaaatgggaataccaaacatcattaggcttgaattcccaatacggcaacaacagctgagcaacaagcagctgtttagactaggcaccttccgttcattccagcccacaatgcagatcatagtatcgacttaaatttcctgcctgccttagagaagcttctgagcttgtgacctctattctagctgctctatgaatggacgctgccccagtacagcgaggacctgctgcaaaatgcatttcttagtcttcaatacttattcctccttgtaactggatttctggtaagttatgtctcatggtggatctgccccaaagatggagactgaatggcagtgagtcactcgccctggcctccattgttctggagaaggttccagccacatggttgatgtcagctggttttccagagccagagctgggttgcaggacagacacacctgcatctaatagtgaaaggcaaagttgaaaggccaagaccagcctgaggtctgagggaccaagggcttcacagaggccagaagttcagaggtggacataaaaggtgttaggagaataaggaagtgaaaagaacatagtacagtgtatcagaggaggagctccaggctggcaaatatcactccc

SEQ ID NO: 261 - DNA, 1084 bp, Homo sapiens
ggcacgagccaccatgcccggcctagattaaaaatttgaagacatattctctactatgagccaatgaaattactcattttgtttctatcccatttgctgtcccttgcttttggaattttgtgtcttagtgtgactgtgattctttctctccttttgtctttcagcaaacggggattcagcgtccgatcctttggaacagggactcacgtgaagcttccaggaccagctcccgacaagcccaatgtttatgatttcaaaaccacatatgaccagatgtacaatgatcttcttaggaaagacaaagaactctatacacagaatgggattttacatatgctggacagaaataagagaatcaagccccggccagaaagattccagaactgcaaagacctgtttgatctgatcctcacttgcgaagagagagtgtatgaccaggtggtggaagatctgaattccagagaacaggagacctgccagcccgtgcacgtggtcaatgtggacatccaggacaaccacgaggaggccaccctgggggcgtttctcatctgtgagctctgccagtgtatccagcacacggaagacatggagaacgagatcgacgagctgctgcaggagttcgaggagaagagtggccgcacctttctgcacaccgtctgcttctactgagcccagcgcccgcatggagccgcctctggagcttcctgttgttcatactttttccttcctgacatttgtttttacttacaggtgttctgctggtgacggtagcattacccaaataaactgtgcatatgaaatgggagaggagatgccaaaacgccagatgaaagcaatcaagtttcttcttttccacttttacttatgagcgggatattgattacaaagtttttcttctttaaccaaaaaggaaagacaacggtttgtgtgcacttcccgacatacctgtgtcttcgtgtgcctgccttccctccctcctccccaccgggccggactgtacagagccctgctgcggcgtgttaggaatgacctggaattgtcaataaacagatgctgctgtcaaaaaaaaaaaaaaaaaaaaaaa

SEQ ID NO: 262 - DNA, 1217 bp, Homo sapiens
cggcacgaggttgaatgttagccctggaggagatccatgtcttactcgctctttctggcccttctgtcttttgcctctgcaattctttttgtagctggcacgatagcagggactgggggtctatcctttcatggtattgctacaatatttgtccttactggaaaatggtaacatccgggtctgatttaattggcattacacttacacagggactctgagcacccccgtcaccacaccagacagtggaccagttttcacagctacaaagagctagaaatgtgtttaacatcatccagtgcatcccctaattcaaaaccatcctcactaatcaatcatattcacccataaatattacaaatgagattgattccatctcaagacaatttgtcaaatacttaattttcttcctggatgattctacttactggatattttagaaagagaaatgtctgagataaaatccctcacatttactcaatataacaaattactgtttctactcctattctgagtagtgcttctgaagattgtttgctgtagtgttgtctttgataaaatgaatgtcagtagtgagccttttagagataccatgctcagaaatcctctttgggatcagaagatacctaaaattctccccttttgcccacttggttagatgagtgatatattctttggatcctgcaaagaagagattggtttcttttcttttctggtggtggtagtggttgtatctgtggctgtgatggttgttgttacttgtctctctctctctctggctctggcttttgctttcctgctagtgttctttctctttccaaacaaatagttaaattaaacgtgagcttctgaattgtacttgttcatactttcaaaacataacagattaataaaaatagatgtgtcctgatttaaaacatgccccctggaaaggcatgctgtattatgaaatcatgataatataactgcattattacatggcagtataaatattagtctgttgaattcatttgtccaattgtataactttgtggagcagtgttttgacctttgatacataattctggagcaagtggagtggttgcaggcagatgagacagtgttatatcaggatttttcaatcaactttagttggaggcctggcaattacaaacatcttcagatgtttctgtaaccattataaatatgaaaaaaacctcttcaaaaaaaaaaaaaaaaaa

SEQ ID NO: 263 - DNA, 2072 bp, Homo sapiens
cccacgcgtccggcgttttacgcaggctgtggcagcgacgcggtccccagcctgggtaaagatggccccatggcccccgaagggcctagtcccagctgtgctctggggcctcagcctcttcctcaacctcccaggacctatctggctccagccctctccacctccccagtcttctcccccgcctcagccccatccgtgtcatacctgccggggactggttgacagctttaacaagggcctggagagaaccatccgggacaactttggaggtggaaacactgcctgggaggaagagaatttgtccaaatacaaagacagtgagacccgcctggtagaggtgctggagggtgtgtgcagcaagtcagacttcgagtgccaccgcctgctggagctgagtgaggagctggtggagagctggtggtttcacaagcagcaggaggccccggacctcttccagtggctgtgctcagattccctgaagctctgctgccccgcaggcaccttcgggccctcctgccttccctgtcctgggggaacagagaggccctgcggtggctacgggcagtgtgaaggagaagggacacgagggggcagcgggcactgtgactgccaagccggctacgggggtgaggcctgtggccagtgtggccttggctactttgaggcagaacgcaacgccagccatctggtatgttcggcttgttttggcccctgtgcccgatgctcaggacctgaggaatcaaactgtttgcaatgcaagaagggctgggccctgcatcacctcaagtgtgtagacattgatgagtgtggcacagagggagccaactgtggagctgaccaattctgcgtgaacactgagggctcctatgagtgccgagactgtgccaaggcctgcctaggctgcatgggggcagggccaggtcgctgtaagaagtgtagccctggctatcagcaggtgggctccaagtgtctcgatgtggatgagtgtgagacagaggtgtgtccgggagagaacaagcagtgtgaaaacaccgagggcggttatcgctgcatctgtgccgagggctacaagcagatggaaggcatctgtgtgaaggagcagatcccagagtcagcaggcttcttctcagagatgacagaagacgagttggtggtgctgcagcagatgttctttggcatcatcatctgtgcactggccacgctggctgctaagggcgacttggtgttcaccgccatcttcattggggctgtggcggccatgactggctactggttgtcagagcgcagtgaccgtgtgctggagggcttcatcaagggcagataatcgcggccaccacctgtaggacctcctcccacccacgctgcccccagagcttgggctgccctcctgctggacactcaggacagcttggtttatttttgagagtggggtaagcacccctacctgccttacagagcagcccaggtacccaggcccgggcagacaaggcccctggggtaaaaagtagccctgaaggtggataccatgagctcttcacctggcggggactggcaggcttcacaatgtgtgaatttcaaaagtttttccttaatggtggctgctagagctttggcccctgcttaggattaggtggtcctcacaggggtggggccatcacagctccctcctgccagctgcatgctgccagttcctgttctgtgttcaccacatccccacaccccattgccacttatttattcatctcaggaaataaagaaaggtcttggaaagttaaaaggcatcagtcttactacctgtcccaccacccccaccttagggaaatgtcctagaatcctgggaaattgagggcttctttgatggtgagtggagaaaagatagaggagaaggttgcccctgaagtgctgttaggagaaggaggatagaggaatcagccttaggagggttccatgccagctgtcatttggcaaaggaccctggacagatgacttttgcctctgaacttcactcttctctttcctcaaatgggcttcataatgctttccactcaggcttaacatgagaattaaatgag

SEQ ID NO: 264 - DNA, 2543 bp, Homo sapiens
  misc_feature (2538)..(2538): n equals a,t,g, or c
ctccgttggaaacttgggctgagtaccgcggcgggcgcgagcraggcgccctagacatcttctccctcccttgcctcagatttattgctaaacatgggtgcatttttggataaacccaaaactgaaaaacataatgctcatggtgctgggaatggtttacgttatggcctgagcagcatgcaaggatggagagtggaaatggaagatgcacacacagctgttgtaggtattcctcacggcttggaagactggtcattttttgcagtttatgatggtcatgctggatcccgagtggcaaattactgctcaacacatttattagaacacatcactactaacgaagactttagggcagctggaaaatcaggatctgctcttgagctttcagtggaaaatgttaagaatggtatcagaactggatttttgaaaattgatgaatacatgcgtaacttttcagacctcagaaacgggatggacaggagtggttcaactgcagtgggagttatgatttcacctaagcatatctactttatcaactgtggtgattcacgtgctgttctgtataggaatggacaagtctgcttttctacccaggatcacaaaccttgcaatccaagggaaaaggagcgaatccaaaatgcaggaggcagcgtgatgatacaacgtgttaatggttcattagcagtatctcgtgctctgggggactatgattacaagtgtgttgatggcaagggcccaacagaacaacttgtttctccagagcctgaggtttatgraattttaagagcagaagaggatgaatttatcatcttggcttgtgatgggatctgggatgttatgagtaatgaggagctctgtgaatatgttaaatctaggcttgaggtatctgatgacctggaaaatgtgtgcaattgggtagtggacacttgtttacacaagggaagtcgagataacatgagtattgtactagtttgcttttcaaatgctcccaaggtctcagatgaagcggtgaaaaaagattcagagttggataagcacttggaatcacgggttgaagagattatggagaagtctggcgaggaaggaatgcctgatcttgcccatgtcatgcgcatcttgtctgcagaaaatatcccaaatttgcctcctgggggaggtcttgctggcaascgtaatgttattgaagctgtttatagtagactgaatccacatagagaaagtgatgggggtgctggagatctagaagacccatggtagccttaaaaaccttctaaaatgcttttrattctgaaaattgggggaaaaaacttttaatcacaattttcttcaatacaaggggaaaatattcttgcggattcccaacgttttgtgatatgagcagaaaatcattagcatttcccatcatttgttcatatttgtgttttctgacagttgccacttgtagcattgcctgtactacagtattttttgccaacctcaggcatactcgttacatctgtattgaactttcggccctagaaaccagtggagttatttcaccacaaatcaacaatgtgcctgaggtgcatgggaaatatagttagctatactctgaaaatacattatgttttttttctttaaacaaaacacacaacatgtaagcatgtaagagtaaagaattgtatgatatgttccttttttcagttcaccaagttggaagccttttgcagctctgtggcttggaatttcatttgagcaatttctataggatatgtatttattattgattgttatttaawwwwwttccamttttacctgtattaccaaactgggttctccaataatgtccaaattgtaatgttgccttgcttcaagataaagtgtatttgggaataatattataaacccttmcaaattttatgcatgtatctactgcatccttcaactctcactagaaaatcttttgaaaccaaatggattaatttatggctatttataatttgctttgacatctcactgttggaaattttttaaagatgagatttgcctttataatgtaaattgtgatttttgttttacatgtgggtttctatagttttaattttttcagcttttaagatacgagttttgtgtaatttggtatttttaatcatttatgttattttaaaagctcagaatatcacattgaaattactataaatacatttaaaattatctattttagatctaaggaaatactacagagatattttcatgggttcagtaacttttcattttataacattgggcacggtacagagtgattgtcacataaggtacttgaagatttattagtttaattctatttttacagtaaccttgaattcttctgagttttgcatgtattaaattcaattaatgctgaacatgaagagtaaagtatttatctgaaagaagtttctgggttaggagaagtaatgaatgtatccatttgtacatggtttacatgttgtggatgctttgtaaacattttcctgtatgtttaaattgtgtttcagcaggatgtagttgcccttgtgnaggtt

SEQ ID NO: 265 - DNA, 559 bp, Homo sapiens
gattcggcacgagctgaagccctgggtgccactgctggcccagcagggaggaggttgctgctgctcgggctgaagtgaggtgtgggtctggctgggcctccagtttcccacctgggccttgattgtgaggaaggcctggcctggctgcagaagcccagaagcacctgagtaggagagttcctttgtcccacctgcagctcattcaagcctgtgcatgggggttggggtcctcaggatcttgctttcctgtttaggggaggcagccccaaagagtgctgggaccagtttggagagtgctaaggaatgctggtctgcagcgaccctacttgtgctctgcgtcctctgccaactgcagcatgggtgaacatctgtacatctgtccccataatgaaaatggcctcagcaaataacaaaaatattaccatttagcaatcaggcacttattaaaagcctggcccaataaacttaaaaaaaaaaaaaaaaaactcgagggggggcccggtacccaattcgccctatagtgagtcgtattacgcgsgstcamtggccgtcgtttaca

SEQ ID NO: 266 - DNA, 1676 bp, Homo sapiens
ggcacgaggggacttcagaaccacagaactgagatgataaatgagtggtgtttcaagttgctaagtttgtggtcatttgcttacagtaattgtaaactaatacacaagtgtaagtttgttttcttaaagaagaaaaaaacggggaaggaggtaagtgttaaaggatcaaaactctgacaaaaggctggttgcagaacatgacaggttgttgcactggaaactatttgtcatgcaagtttatgttaaaataagtagcttttgaggactttcatttttggtcttgtaaacatgccatttaatattgtccmactgataatactttttgcaaacagaaactgttaaaacctttaaagcaaatattactgtagagaagaagtaatgtgttatgaaactgtgaggatactaagaaggatcctacttaagtttcttcagcataaataaacttgagcgtttcgaccactgttactgagaatgaaattatttcttaatcacttttaatgaggtaaaatttacatacgataaaatgcaccaattttaaagtatagtttaatgagcttgcacagatgtaaatatctgtttaacttctacttaatcaagatatagaatatttccacaatgccaaaattgccattgacccccttccccttctttcacccaactgcagaccccaggtcaccaccaacctactcttgctcaatatagatttaatgtgatgtgtcttttctagagttttatgtcaatagaattgtacactatgcactcttccatgcctggctttctttgctcagcagraggtgtttagattaattcagtagttcatttctttctagtaatgaataggatcacattatacattataccacagagtgtgcatccattactttgtkgattgatatttgggtcatttccaggttttggctattgtgaataaaactgccttgactattcctgwacaagtctttgtattaaggaacatacgttttattttctcttgaggaagttcctagcaataagattgctgggtcatatggtaggtatatatttagctttaaaagcaactaagtgctttccaaagtgactgtacaatttaacattcctacctgaaatgtaagagaattccagttgctccacattcttgtcaacccttggtagcatcagtctctttaagaattctaatggatatgtaatatggactataggtttaatttgcatttctctgttgactaatgatgttgcacaacttttcatatgtctatcaaccattcttgcatcttcttttatgaaatgtctgttcaaatcatttgtccactttttattgtgtcattttattcagttgtaagagttctttacatattctggaaacaagtcctctgtcacatatataggtactttgaaaatctgtgctttgcctttacatttttttaatggtaactttttaagagtagatagttttggttttgatgaaattcaacttatcagtttttcagttatagtatgtatttttatgacccatctaagaagcatctgtctacccagagttgcaaagatatcccttttcttactagaaatattatagttttatttaccattgcttctatgatacattttaagttaatttttgtgtattaaatgaataaaaagttgaagttcaaaaaaaaaaaaaaaaaactcgtagg

SEQ ID NO: 267 - DNA, 1747 bp, Homo sapiens
ccacgcgtccggctacctgtgcatcgtgctgctcatgctgctgctgctcatcttctggatcgcgccggcccatgggcccaccaacatcatggtctacatcagcatctgctccttgctgggcagtttcaccgtgccttccaccaagggcatcgggctggcggcccaagacatcttgcataacaacccgtccagtcagagagccctctgcctgtgcctggtactcctggccgtgctcggctgcagcatcatcgtccagttcaggtacatcaacaaggcgctggagtgcttcgactcctcggtgttcggggccatctactacgtcgtgtttaccacgctggtcctgctggcctcagccatcctcttccgggagtggagcaacgtgggcctggtggacttcttggggatggcctgtggattcacgaccgtctccgtggggattgtccttatacaggtgttcaaagagttcaatttcaaccttggggagatgaacaaatctaatatgaaaacagactagattgcaataggagcttggatggttcgaggaataggcattggaggtggtttctggccgtgattggatgtgaagtagaagaggtcctcgatcatggtgttagaattgactggatagtaacaggtggtctggtggatagcggggagcatggctcagcaccagagcagaggcccagcagcctctgcagcccaaacgtcccaacggtgcctggaccatctcttctgatgagacgaatctcattttcatttccattaacctggaagctttcatgaatatttcttctttaaaacattttaacattatttaaacagaaaaagatgggctctttctgggtaggtggtacatgatagcagagatatttttacttagattactttgggaatgagagattgtgtcttgaactctgcactgtacaggatgtgtctgtagttgtgttagtttgcattaagcatgtatacattcaagtatgtcatccaaataagaggcatatcattgaattgtttttaatcctctgacaagttgactcttcgacccccacccccacccaagacattttaatagtaaatagagagagagagaagagttaatgaacatgaggtagtgttccactggcaggatgacttttcaatagctcaaatcaatttcagtgcctttatcacttgaattattaacttaatttgactcttaatgtgtatatgttcttagattagaataatgcaacttcgagtatgctttaatatttcaatattcaagttacaaatgtataaggcagttagaaataatacagtcacatgtcacttaatgatagggaaacattctgagaaatgcattgtaaggtgactttattgtgtgaacatcatggagtgcacttatacaaacctagatgggacacctatgacccacccaggccagatggtacagcctgttgctcctgggccacacacctgtacagcatgtgactgcactgaataccgcaggcaattgtaacacagtggtgagtatttgtgtttacaaacataggaaaggtacagtaaaactatggtattacaatgttatgggaccaccgtcatgtaagtggtatgtctttgacagaaacatggttacgtggttcatgactgtatattcactggaagatagtcaagactaaagacacattagagcaaattgacccctttaacatgtgattattgtccaattaaagacagttgatttaagtagcaaaaaaaaaaaaaaaaa

SEQ ID NO: 268 - DNA, 1251 bp, Homo sapiens
gacccacgcgtccgagcaaacccaggaaggtgtggcgtccccgcttcgcgccaagatggtgctggtgctgcgccatcctttgtgtgcccgggaaagggcgttccgggagccgggtcgggggctcctgactcgcactgggcagcatgacggtgcgccggctgtcactgctgtgccgggacctctgggcgctgtggctgctgctgaaggccggcgcagtacgtggggcgcgggcaggtcctcgcctccccggaaggtgttgtggggcgacatgcggggacgccgggcgggggtggacgttctgggcccagccctgtcctcagaggctgctggggcagaagcccggggctgggggatgccggggatgggtgttggggtgggtgcctccgagaccagaggagccctgttccttggcagggaaggtgtgcacgggccttgcccgatggatggtttagggccatggccctggggtccctggtgagcagtggggccgcctctgcccttggcctgtgagggactgtctgtgctggtcccagaaggctgggatcacctttccactggctcctttgttcgaggtttttcatagacaggctatgtggacaaatgagggcagcgcccacgtctggctggtggaggggctgcggctcctccttggaggggacgcctggccactgctgtccccacaatggggccacccgtggtgcaaggcgtgacaagctgccctctctaggtaagcaggacttgggaggcccctggccaagcctgtggacccggctgggcggcctctgtggtctcaggtttgggtgtgtttggtctggtcagggctcaggggctgctggtccacactggccccatcctgacaattggagctttggggcaaggtccctggagaaggggtcacgtcgggaggaaacagcctgggttttgttgatgcttttctaagaatggagtactcgttttcaagagatttgtcctaattatattttccagcgggtacttatgccaagtattgatgaataattcataaaataagcatctttgtgaattttagtgaatcagaccttaactatcaacggcaatgaatgaacatctaaagtttccaattttaaagtaaagaactggctgggtacagcagttcacgcctgtaatcccagcactttgggaggccaaggctagaggatcgcttgagcccaggagtttgagatcagcctgggcaacataccaagacctcatctgttaaaaaaaaaaaaaaaa

SEQ ID NO: 269 - DNA, 1539 bp, Homo sapiens
cgatggccccgcggccgctctagaaagtcccgttttttttttttttttttttttttttttttttagagtacgttctgcattttatttytgcaggcaacactttgctcaccagcaagaacacagcccraggaagggacccaataacctttcaaaacscaaactgctkcctgcggtgagggcccagggtcctccacggagaggacaggcatcttcctttcccaccaggaaggagtcagcccggagcctctgctatgtgcaaggcggtgtgcaagcaccggctgcrgctytttgctgtctcttctttctctttggggctgggctgggtgtgcgttctggtgctgatgctttggcctgtgaggctgagcttggcacctcgacccgttcaattacagcaacgaagaagccactgctgagtgtggtctcaggggaggcccggaggcagtgctcggcacccgggaacgtgctcaggcctcggtggggccaggcaggcagggcgggagctagcctgaaggcgcccgggttctgctgcagcgcatctcgcaccacgtcttcattctcctcctggcagagggagcacgtggagtagacgagccgctgcagggaagggaaagtgagcgcgtggcacagggctcgctgctggaaccctgccagggcatgcagacgcaccgggctaggtgtgcctgccccgggctcctccagctgtctgctcggcatacccgagccactgcaggaaggatccagcaggayrtagtggacctcaygrtagcgyggatcyragggggagaccgccaggaagtcctcctcagccagytcacagcargagacgccagcccrggccagcagcgtggccatggatgccagccgcttggcatccaggtcaaaggcaaagatcttcccttggttcttcagaagagcagccaagtgactggtcttattgcctggggcggcacaggcatcgatgacatgggagcctggcggggggtccagcagcatggctgggagacagctggccctgtcctgcagaatgaggtgtccggcccggtacagtgggtgttcatgcagatctgtctgggcgggaaacaccagcagctccggcatcaaggggtccaggagaaaatgcttccccttgagggctcgtaagtcatcgaggctggaagcccgaccctgataggagaaaccttgtctcttgaaataatcaactacatcatcggagcaggtcttgagagtgttcacacgcacaaatcgaggcagctgggaggctggaccaggcctggatcccacttccaacaggtcctcattccggctcacaccccgatgaaccttgagccgagccaactcagccttgagcctcgcctggtgccggcccaacagagccttccatcggcccccaccccctcgaaagccctttcccaacaacaactcatacactagcaccttggccaggtgcggccgctctagaggatccctcgaggggcccaagcttacgcgtgcatgcgacgtcatagctctctccctagagtgagtcgaatgaggttcata

SEQ ID NO: 270 - DNA, 2077 bp, Homo sapiens
cccacgcgtccgcggacgcgtgggcggacgcgtgggtaggccgcgagcttagtcctgggagccgcctccgtcgccgccgtcagagccgccctatcagattatcttaacaagaaaaccaactggaaaaaaaaatgaaattccttatcttcgcatttttcggtggtgttcaccttttatccctgtgctctgggaaagctatatgcaagaatggcatctctaagaggacttttgaagaaataaaagaagaaatagccagctgtggagatgttgctaaagcaatcatcaacctagctgtttatggtaaagcccagaacagatcctatgagcgattggcacttctggttgatactgttggacccagactgagtggctccaagaacctagaaaaagccatccaaattatgtaccaaaacctgcagcaagatgggctggagaaagttcacctggagccagtgagaataccccactgggagaggggagaagaatcagctgtgatgctggagccaagaattcataagatagccatcctgggtcttggcagcagcattgggactcctccagaaggcattacagcagaagttctggtggtgacctctttcgatgaactgcagagaagggcctcagaagcaagagggaagattgttgtttataaccaaccttacatcaactactcaaggacggtgcaataccgaacgcagggggcggtggaagctgccaaggttggggctttggcatctctcattcgatccgtggcctccttctccatctacagtcctcacacaggtattcaggaataccaggatggcgtgcccaagattccaacagcctgtattacggtggaagatgcagaaatgatgtcaagaatggcttctcatgggatcaaaattgtcattcagctaaagatgggggcaaagacctacccagatactgattccttcaacactgtagcagagatcactgggagcaaatatccagaacaggttgtactggtcagtggacatctggacagctgggatgttgggcagggtgccatggatgatggcggtggagcctttatatcatgggaagcactctcacttattaaagatcttgggctgcgtccaaagaggactctgcggctggtgctctggactgcagaagaacaaggtggagttggtgccttccagtattatcagttacacaaggtaaatatttccaactacagtctggtgatggagtctgacgcaggaaccttcttacccactgggctgcaattcactggcagtgaaaaggccagggccatcatggaggaggttatgagcctgctgcagcccctcaatatcactcaggtcctgagccatggagaagggacagacatcaacttttggatccaagctggagtgcctggagccagtctacttgatgacttatacaagtatttcttcttccatcactcccacggagacaccatgactgtcatggatccaaagcagatgaatgttgctgctgctgtttgggctgttgtttcttatgttgttgcagacatggaagaaatgctgcctaggtcctagaaacagtaagaaagaaacgttttcatgcttctggccaggaatcctgggtctgcaactttggaaaactcctcttcacataacaatttcatccaattcatcttcaaagcacaactctatttcatgctttctgttattatctttcttgatactttccaaattctctgattctagaaaaaggaatcattctcccctccctcccaccacatagaatcaacatatggtagggattacagtgggggcatttctttatatcacctcttaaaaacattgtttccactttaaaagtaaacacttaataaatttttggaagatctctgatttttatgtgttcatttatgaacattaaatatgaaaatattatggtttatattatttattgaaggagtagaggaattactcaactttagtatgctcttaattgaatatatggaggcatttgactttctaatttgtatatttttatattatgtgaattttaaaaatgagctttggaattttttaatttatagaaaaaaaaaaaaaaaaaa

SEQ ID NO: 271 - DNA, 805 bp, Homo sapiens
ggcacgaggtccctaattgtcttgtacctagccctagggtgaccagggcaggggaatcatggcgagaagcgtaagggcctgatgaagaaggtgtgctgggtgtgggctctagcccacttggttttgtgtgagaggtggctgacagcaggttgtttgctgtatgtaggagttatccagccctgcaagggcagtccctccagtgtctgcaaagcccgaagatgtctgcatccaaaatacagaataaaaagatatggttactacaagtactcagtaagactgataatctgtcatcatcatcctcatgcccttaaagcagagctaactgatgattaatatatgcttctatgttaacagtcttggactttattaatggtgggtggaagttaacttaatgtatgtatgcaaactaaaaagtggcatccttttcattaatgacccaaccattattcaagagctatgtctagttagggacttcagacttttgaaagaaatgaagaaataatgccagatacatgggctcgcacttggaatcccagctacttgggggaccgaggtgggaggaccgcttgagcccaggagttcgagaccagcctgggcaacatagcgaaaccctgcctcagttttaaaaaagaaaaaaagaagtagtgaagaaattggaaaggattctgagaagaaatatgcaaggtggaaaagagcctagaaagaaaggtgacagatgctgggatttggtcgtcagaagagatatctaggaaatagcatggcagccctcaagtactagctccacttaaaaaaaaaaaaaaaaaaa

SEQ ID NO: 272 - DNA, 2108 bp, Homo sapiens
ggcacgagggagacctaaacacagtcaccatgaagctgggctgtgtcctcatggcctgggccctctacctttcccttggtgtgctctgggtggcccagatgctactggctgccagttttgagacgctgcagtgtgagggacctgtctgcactgaggagagcagctgccacacggaggatgacttgactgatgcaagggaagctggcttccaggtcaaggcctacactttcagtgaacccttccacctgattgtttcctatgactggctgatcctccaaggtccagccaagccagtttttgaaggggacctgctggttctgcgctgccaggcctggcaagactggccactgactcaggtgaccttctaccgagatggctcagctctgggtccccccgggcctaacagggaattctccatcaccgtggtacaaaaggcagacagcgggcactaccactgcagtggcatcttccagagccctggtcctgggatcccagaaacagcatctgttgtggctatcacagtccaagaactgtttccagcgccaattctcagagctgtaccctcagctgaaccccaagcaggaggccccatgaccctgagttgtcagacaaagttgcccctgcagaggtcagctgcccgcctcctcttctccttctacaaggatggaaggatagtgcaaagcagggggctctcctcagaattccagatccccacagcttcagaagatcactccgggtcatactggtgtgaggcagccactgaggacaaccaagtttggaaacagagcccccagctagagatcagagtgcagggtgcttccagctctgctgcacctcccacattgaatccagctcctcagaaatcagctgctccaggaactgctcctgaggaggcccctgggcctctgcctccgccaccaaccccatcttctgaggatccaggcttttcttctcctctggggatgccagatcctcatctgtatcaccagatgggccttcttctcaaacacatgcaggatgtgagagtcctcctcggtcacctgctcatggagttgagggaattatctggccaccggaagcctgggaccacaaaggctactgctgaatagaagtaaacagttcatccatgatctcacttaaccaccccaataaatctgattctttattttctcttcctgtcctgcacatatgcataagtacttttacaagttgtcccagtgttttgttagaataatgtagttaggtgagtgtaaataaatttatataaagtgagaattagagtttagctataattgtgtattctctcttaacacaacagaattctgctgtctagatcaggaatttctatctgttatatcgaccagaatgttgtgatttaaagagaactaatggaagtggattgaatacagcagtctcaactgggggcaattttgccccccagaggacattgggcaatgtttggagacattttggtcattatacttggggggttgggggatggtgggatgtgtgtgctactggcatccagtaaatagaagccaggggtgccgctaaacatcctataatgcacagggcagtaccccacaacgaaaaataatctggcccaaaatgtcagttgtactgagtttgagaaaccccagcctaatgaaaccctaggtgttgggctctggaatgggactttgtcccttctaattattatctctttccagcctcattcagctattcttactgacataccagtctttagctggtgctatggtctgttctttagttctagtttgtatcccctcaaaagccattatgttgaaatcctaatccccaaggtgatggcattaagaagtgggcctttgggaagtgattagatcaggagtgcagagccctcatgattaggattagtgcccttatttaaaaaggccccagagagctaactcacccttccaccatatgaggacgtggcaagaagatgacatgtatgagaaccaaaaaacagctgtcgccaaacaccgactctgtcgttgccttgatcttgaacttccagcctccagaactatgagaaataaaattctgttgtttgtaagctaaaaaaaaaaaaaaaaaaaaaaaaaaaa

SEQ ID NO: 273 - DNA, 1182 bp, Homo sapiens
ggcacgagcccccagcacatggaagccctgttacagtccctcgtgatagtcttgcttgggttcaaatccttcttaagtgaagagctgggctctgaggttttgaacctactgacaaataaacagtatgagttgctttcaaagaaccttcgcaagaccagagagttgtttgttcatggcttacctggatcagggaagactatcttggctcttaggatcatggagaagatcaggaatgtgtttcactgtgaaccggctaacattctctacatctgtgaaaaccagcccctgaagaagttggtgagtttcagcaagaaaaacatctgccagccagtgacccggaaaaccttcatgaaaaacaactttgaacacatccagcacattatcattgatgacgctcagaatttccgtactgaagatggggactggtatgggaaagcaaagttcatcactcagacagcaagggatggcccaggagttctctggatctttctggactactttcagacctatcacttgagttgcagtgcctcccccctccctcagaccagtatccaagagaagagatcaacagagtggtccgcaatgcaggtccaatagctaattacctcaacaagtaatgcagaagcccgacaaaatcctccacctaacctcccccctgggtccctggtgatgctctatgaacctaaatgggctcaaggtgtcccaggcaacttagagattattgaagacttgaacttggaggagatactgatctatgtagcgaataaatgccgttttctcttgcggaatggttattctccgaaggatattgctgtgcttttcaccaaagcaagtgaagtggaaaaatataaagacaggcttctaacagcaatgaggaagagaaaactgtctcagctccatgaggagtctgatctgttactacagatcggtgatgcgtcggatgttctaaccgatcacattgtgttggacagtgtctgtcgattttcaggcctggaaagaaatatcgtgtttggaatcaatccaggagtagccccaccggctggggcctacaatcttctgctctgtttggcttctagggcaaaaagacatctgtatattctgaaggcttctgtgtgacaggaaacccaagcctaagaaacaattaagtggttctcatctctaaaaaaaaaaaaaaaaaaaaaa

SEQ ID NO: 274 - DNA, 1146 bp, Homo sapiens
  misc_feature (5)..(5): n equals a,t,g, or c
  misc_feature (857)..(857): n equals a,t,g, or c
tccancattatgggatacattgatgatccagacaaatatcatcagggttttgaattgttgctgtcagccttgggtgatccctcagaaagagtagttagtgctacacatcaagtatttttaccagcttacgctgcgtggactacagaacttggaaatttacagtctcatcttatacttacactactgaacaagattgaaaaacttctcagggaaggagaacatggactggatgaacacaaactccacatgtatctttctgccttgcagtccttgatcccatctctctttgcattagtgctacagaatgcacctttctccagcaaagccaagcttcatggtgaagtgccacagatagaagtgactaggtttcctcggcctatgtcgcctcttcaagatgtgtccactattatcggaagtcgtgagcaattggcagtgctgctgcaactttatgactaccagctagaacaagagggtacaacaggctgggagagtttactgtgggttgtcaatcaattgttgccacaacttatagaaatagttggcaaaattaatgttacttcaactgcctgtgtccatgaattctccagatttttctggcgcctttgccggacatttggcaaaatttttacaaacactaaggtaaaacctcagttccaggagattttaagactatctgaagaaaacattgattcctcagcaggaaatggggtcctcactaaagctacagtccccatttatgcaacaggagtccttacgtgttatattcaggaagaagaccgaaaactgttagttggattcttagaagatgtaatgacgctgctttcattatctcatgctcctcttgatagcctgaaggnttcttttgtggaattgggtgcaaaccaggcctaccatgagttactattaactgttttgkggtatggkgtkgkccatacttcagcactcgtgaggtgtactgctgctagaatgtttgagctgttggtgaagggggtgaatgaaactctggtagctcagagggttgttcctgctctcattactctctccagtgaccctgaaatctctgtcaggattgccacaattccagcctttggsactattatggaaacagtaattcaaagagagttgctggaaagagtgaaaatgcag

SEQ ID NO: 275 - DNA, 1998 bp, Homo sapiens
ggcacgagaacaatttcccttgtacataatatacttatgtacttataccattgactctgtaagataaaagtcttagaaatggggttgccaagtcaaagggtctatgcatttaacacagggaatgagtactgtcacgtggcttctgaaactgtttacccagtttatgttcccaccaacagtgtctaattcccatacctgtgctaggtattatgtctttaatttttgtctgattatttcatttaattttaatttccattatcactggtgaggttgggcttctgttcagtttttttgtcatttatgtttcttttgtgaattgccttttcctatgctttgtgcatttttctcttggggtttgtctttttaaaattgatatacaggtgttctctataatatagatattctgccactatatgcaaatgatcttccaatttatttatttatttgaaacagagtttcactcttgtcaccaggttggagtgcagaggtgcgatcttggctcactgcaacctccacctcccaagttcaagcgattttcctgcctcagcctccctagtaactgggattacaggtgccctgccaccatgcccggctaatttttgtatttttggtagagacggggttttgccatgttggccaggctggcctcgaactcctgacttcaggtgatctgcccacctcagcctcccaaagtgctgggattacaggcctgagctaccgcaccggccccaatttatttcttttaacttagtttatggtgcctttagctgtacaaaagttactaatttttagtcaaatatccagcttttcctttagggcttcttatatgtcctgatccaaggattattttttaaaaattcttccgtattttctcctataatattcataggttactttacaattagatttttaatacatctcctaactttttcatatagtatgaggtatccatttttaaaaaatggatatccagttgtgcccatatgtcttttccactcatctgaaatgccaccattatcatattttcaattttcatgtgcacgtgggtctgttttcaaacttggagattctcttccactgatatatgtctattcttgtgccagtggtttaactgctattgctttatagtatattttgatatcttcttttcaaaaggatactcttgtgtattctttttttcatcttgtgtattctcatccattttccagaaaaccacagaatcaactttaagtttcatttcattaagtcagattagtgagagctgattttctgtgtatcatgttcattcagaaacatagtctatctctccatttaggggcacttgttttatattttctttctaacacgtattttgttgggtttattgtaccttttttttttttaacttcagattcaggggggtgcacgtgcaggtttgttacctgagtatacgatatgatactgaggttggagtatgaatgatgccattacccaggtactgggcataatacccaatagttagtttttcaacccttgcccttctccctctctcctccctctagtagtccccagtttctaatactgccatctccatgttcatgagaacccagtgtttagctcccacttataagtgagagcatgttgcatttggttttctgttcctgccatatcctttgtagggacatggatgaaattggaaaacatcattctcagtaaactatcgcaagaacaaaaaaccaaacaccacatattctcactcataggtgggaattgacaatgggaacacatggacacaggaaggggaacatcacactctggggactgttgtggggttggcggaggggggagggatagcattgggagatatacctaatgctagatgacgagttagtgggtgcagtgcagcagcatggcacatgtatacatatgtaactaacctgcacaatgtgcacatgtaccctaaaacttaaagtataatataaaaaaaaaaaagaacaaaacttaaaaaaaaaaaaaaaa

SEQ ID NO: 276 - DNA, 777 bp, Homo sapiens
  misc_feature (274)..(274): n equals a,t,g, or c
  misc_feature (278)..(278): n equals a,t,g, or c
  misc_feature (295)..(295): n equals a,t,g, or c
  misc_feature (676)..(676): n equals a,t,g, or c
ggcagagctcaggtaagargcaaaattactagaatattcactctcactgaaaatgagtaaaaacctaacttagatgaaaatccttatcttgttcatttttattcctggccttttggttgagaagaatgggccagaccatgtgtgtgtgtgtatgtgtgtgcgtgtgtgtgtgtgtgcgcacttgggtttatttatatgagccggtaaaatttcgttcaccattaatttatgttaatttaccaacttcttaaatgagaacagtgagaattttctncatngttaataatacactggncagtgcatatatgcatcacgaagagaggattttcccattgataatagatttccaaatacatcttcctgctttaagattttaatatatggatttatatataaaaactagttaagtcattggaaaagcaaactgtcawccttctcttatttgagawctcaactttagaaagtctatgttctcaactacagaaaataatttttagaccagctaactttcagatttctgcagtgcttattttctcccagttgagggttggtttttgtttgtttgtttgtttgtttgtttttcctgattaaaaagtaagaatacggccaggcgcgatagctcatgcctttaatcccagcattttgggaggccgaggagggcagatcacctgaggtncaggagttcgagaccagcctggctaacatggtgaaacccagtttctactaaaaaaaaaaaaaaaaaacttcgagggggggtcccggtacctaatcgtccct

SEQ ID NO: 277 - DNA, 600 bp, Homo sapiens
  misc_feature (553)..(553): n equals a,t,g, or c
  misc_feature (560)..(560): n equals a,t,g, or c
  misc_feature (589)..(589): n equals a,t,g, or c
gaattcggcacgagcggcacgagccgagatcgttctggggctgctggtatggacgcttattgctggaactgagtacttccgggtccccgcatttggctgggtcatgtttgtagctgtattttactgggtcctcaccgtsttcttcctcattatctacataacaatgacctacaccaggattccccaggtgccctggacaacagtgggcctgtgctttaacggcagtgccttcgtcttgtacctctctgccgctgttgtagatgcatcttccgtctcccctgagaaggacagtcacaacttcaacagctgggcggcctcatcgttctttgccttcctggtcaccatctgctacgctggaaatacatatttcagttttawagcatggagawccaggaccatacagtgatttaccattttgataattaaaaggaaaaaaaaaggaagactctcactgtaaaaacagctgtaggtataatgtatattcccagagaattgtatttaactaattaatgttttttatattcttaaatttgctcacaaattgtggtttgtnacaattnaactgggttactttatttggcaagtgttntaggcttttaa

SEQ ID NO: 278 - DNA, 970 bp, Homo sapiens
ctcgtgccgaattcggcacgaggtgcccaggctctcagggcagagggtccagtgtgatcactttgcatggcctctctcccctcctgagcttgtgccagggccccagggctgacctggagaggaaaawggcagagggtgaagatggggtgtctggtttggggaccatcctggccccccttgtcactgttggcatctcttctgcacagtggcattgctgggaggtgcttactgtgcctattcaaggggctggcagccgcagcctcactgcagatcagggacttggcttcccggttgaccacaggtccaagaacctgcagggtccagcctcccccccatccccagtcttccccaccctggcccggccctccaggtgcagaaacatgcaggcccctctccaggactgtgggaggagtgtgtccctcagactggcctgtgtcctggctcctcttaccacctcttccagaggttgtcacctgcagctgccccaggataaaggcaaggccagagaggactcctgaactcctgtgtgcctggggtggcaggggcaaacatagccaactggtggcctgagcggggccatggtgargacacccttggtggcttgtcccacatcaagctgggargtgacactgaggatgcattagtctgcagcgtatgataaaaacggcatttcaggccaggcgtggtggctcatgcctgtcaccccagcaccttgggaggccgaggtgggcagatcacatgaggtcaggactttgagaccagcctggccaacatggtgaaaactcatctgtactaaaaaaacaaaaattatgtgggttggtggtgtgtgcctgtaatcccagctacttgggaggctgaggcaggagaatcacttgaacctgggaggcggaggctacaacgagccgagattgcaccactgcactccagcctgatccgtctcaaaaaaaaaaaaaaaaaaaaaaaaactcga

SEQ ID NO: 279 - DNA, 1388 bp, Homo sapiens
ggcacgaggtaagttgcaaggtacacccacgggtgatttatcactcttacaaagatgataactaatgaagaccgcatctagaatgctcttactggagatggtttacagagcatttttaatcatcatacttagatttatattaatatttcttttcaaactaaattattccaaactgtgccctgagataccatttggcctcaagttcttttctttcgtctgtattaaggtgcaaataaaaaagactagtaggaaaagaaggccttatttatgaaggttgtctatagctctgagcttggtagctacataaaatgagtaataacctaaataagtaaaactaatgaagatctaactagattactttgcttaatattaacattttacccgccccccgccgtgaaacatttggcagatgttctgcaggactcatgaggacattggtggctacagctgcttctggcactgcccccccaaccccccagtgaggtgaacttctttacacatccagcaagctttagttatcttcttctcccatttgagataactgtggctacaagaatctcagttaaatcagatgtttaaattaggtgccaaaaaatcttacagacactgaactaatacttaaatcaaggaacacttcagttctccataaaatctggtgccattttccaaagaaacagaggatctttgtttcacacccgtggtactggaattgcaacagtgaggcattctagctctcacatgccaatgcgagtggcattcattcttgctcactcatttctgcttctcattgtcacacttggaggctctttgggggtatgtttcagttgatctgagaaactgggtgttaccaatttactagagagtttcttaaaatgtatctgaaacaaactattaatgggcattctgtggtggtaaaaccaggcaacgcctccctacactatctgtcctttcagagctaagaatctgttattttgaattgttcacgaagagtgattctgactctgcttcagtgcacactttacaaaccatcgagcctcatcaaaggagtgagttgagctgaggaattagagtaaagaatacaggtatagtgccgggcgtggtgctcacgcctgtaatcccaacattttgggaggacaaggagggtggatcacctgaggtcaggagttcgagaccagcctgaccaacatggagaaaccctgtctttactaaaaatacaaaattagctggacgtggtggcacatgcctgtgatcacagctactcaggaggctgaggcaggagaatcgcttgaacccaggaggcggaggttgtggtgagccgagatcacgtcactgcactccagcctgggcaacaagagtgaaattccatctcaaaaaaaaaaaaaaaaaaa

SEQ ID NO: 280 - DNA, 649 bp, Homo sapiens
ggcacagggaagtgtcaagcgggcgctcccccatctccgccgctattaccactgaacccggaccccctacccaggtccagggccagccgccatgacgaacgtgtactccttggatgggattctggtgtttggtttgctctttgtttgcacctgtgcctacttcaagaaagtacctcgtctcaaaacctggctgctatcagagaagaagggtgtttggggtgtgttttacaaagccgctgtgattggaaccaggctgcatgctgctgtggcaattgcttgtgttgtaatggccttttacgtcctgtttataaaatgaattccaaagcacccaagtcatcaactgccaaccaaggggacggggatgaagaacctgttggagacctgaacccagtgtaggagagttcagctgaaatcatcggtccccaggatgacaccacagcatctgcccctgctatatgtggggaaaactcatggtcacgaacattatttatgcttcaggggactacagaaagccagcttcctttgatctatgtgtaaatcagtccttggcagagtgcatataatgtccggataaattacacccctcggtgataagattacatacctccttcataaaaacctgtaaaaaaaaaaaaaaaaaaaaaaaaaa

SEQ ID NO: 281 - DNA, 1699 bp, Homo sapiens
  misc_feature (9)..(9): n equals a,t,g, or c
  misc_feature (1692)..(1692): n equals a,t,g, or c
ggcatcttntatttagcacaatgtttttaaggtttattcatgttgtagcaaggtacgcaattgtttttcatttaaagaaaaagtctcaatgctattacaattttccatattctttgcacctgtggtctgtctccctaaatatagcccctttatgaaggaggaatgcaaagctgatccaactagagactacaaattcctttatatttatatagaaaggggcacatagtaatgaattggaagccatatccaagctagaatcatctagatttagtgagattgactagtgcaacccaattttttgcactcatcccctgtccatcaggtacctggaaatgattryaawgattttgaactaggttactggtataatcatactgctgttgagattagcaggcaaattaccaagttagttttttattggagggggagaggtcaatgtgtgagggtgcatagtggagactggggaccaggctgacaaagatgaattgttttaggtagtgatgactttgaggtaatgggataagtgagtgaaaatgactggttggcgttggagatgggatggagatggagcttggagaaaaagaatagcactagtaaatggatttagctagacaaaggagatttaccctattccatttagcacagtgaggagaggctagacagctaggatgcaataaaaaaaattttaatgagaaatgtgtgtggtagattaattttattaatctcaagttatagattaaaaaatttaagtaccacataaatgccatttgcctttgctaatgttacatttttatgaagaaggagccttgcataaagaatgatataatggacttttgggacttgagggagaagcttgggagggggggtaaaggataaaagacatattgggtgctgtgtgtacactgcttgggtgacaagtggactaaaatctcagaaatcaccactaaagaacttatctacataaccaaaaatcacctgtaccccagaaactattgaaataaaaaaaaagaaggggacttggacagatagccgtattctttgccaaattatagttacattctgctcatgggggattaggaggttcaatggaagaaaggccccactcagctttctcccctcttaaaatgttgccttgtaaattagggaattttgcataaagctctgacctttacttccaaggcctttactgagaatgggtttggatacttggagatagatcctgactccctatccctcctagatctttatttatcctatttggaacccagggaaatggccttaaagctgatgaaccacagggtgtccaagtcatggagctattgaggttctccccaagtatcttttaaattgctgcatttgggatgggcgcagtggcttacacctgaaatcccagcactttgggaggctaagttgggaggattgcttgggtctgggagtttaaggccagcctgggctagatggtgagcctctgtctctatttaagaaaattagaaattagccaggcatggtgacacaccagctacttataatgctgaggcaggaggatcacttgagcccaggagtttgcggcagacagtgagctatgattgtgccactgtactccagcctgggtgacagagcaagaccctgtctcttatttaaaaaaaaaaaaaaaaaaaaaactcgagggggggcccgtacccaatcgccttncatgatg

SEQ ID NO: 282 - DNA, 1782 bp, Homo sapiens
tgccgagcctctttggtagcaggaggctggaagaaaggacagaagtagctctggctgtgatggggatcttactgggcctgctactcctggggcacctaacagtggacacttatggccgtcccatcctggaagtgccagagagtgtaacaggaccttggaaaggggatgtgaatcttccctgcacctatgaccccctgcaaggctacacccaagtcttggtgaagtggctggtacaacgtggctcagaccctgtcaccatctttctacgtgactcttctggagaccatatccagcaggcaaagtaccagggccgcctgcatgtgagccacaaggttccaggagatgtatccctccaattgagcaccctggagatggatgaccggagccactacacgtgtgaagtcacctggcagactcctgatggcaaccaagtcgtgagagataagattactgagctccgtgtccagaaactctctgtctccaagcccacagtgacaactggcagcggttatggcttcacggtgccccagggaatgaggattagccttcaatgccaggctcggggttctcctcccatcagttatatttggtataagcaacagactaataaccaggaacccatcaaagtagcaaccctaagtaccttactcttcaagcctgcggtgatagccgactcaggctcctatttctgcactgccaagggccaggttggctctgagcagcacagcgacattgtgaagtttgtggtcaaagactcctcaaagctactcaagaccaagactgaggcacctacaaccatgacataccccttgaaagcaacatctacagtgaagcagtcctgggactggaccactgacatggatggctaccttggagagaccagtgctgggccaggaaagagcctgcctgtctttgccatcatcctcatcatctccttgtgctgtatggtggtttttaccatggcctatatcatgctctgtcggaagacatcccaacaagagcatgtctacgaagcagccagggcacatgccagagaggccaacgactctggagaaaccatgagggtggccatcttcgcaagtggctgctccagtgatgagccaacttcccagaatctgggcaacaactactctgatgagccctgcataggacaggagtaccagatcatcgcccagatcaatggcaactacgcccgcctgctggacacagttcctctggattatgagtttctggccactgagggcaaaagtgtctgttaaaaatgccccattaggccaggatctgctgacataattgcctagtcagtccttgccttctgcatggccttcttccctgctacctctcttcctggatagcccaaagtgtccgcctaccaacactggagccgctgggagtcactggctttgccctggaatttgccagatgcatctcaagtaagccagctgctggatttggctctgggcccttctagtatctctgccgggggcttctggtactcctctctaaataccagagggaagatgcccatagcactaggacttggtcatcatgcctacagacactattcaactttggcatcttgccaccagaagacccgagggaggctcagctctgccagctcagaggaccagctatatccaggatcatttctctttcttcagggccagacagcttttaattgaaattgttatttcacaggccagggttcagttctgctcctccactataagtctaatgttctgactctctcctggtgctcaataaatatctaatcataacagc

SEQ ID NO: 283 - DNA, 1205 bp, Homo sapiens
ggcagagcttttgtgcagcaccctttaaagggtgactcgtcccacttgtgttctctctcctggtgcagagttgcaagcaagtttatcggagtatcgccatgaagttcgtcccctgcctcctgctggtgaccttgtcctgcctggggactttgggtcaggccccgaggcaaaagcaaggaagcactggggaggaattccatttccagactggagggagagattcctgcactatgcgtcccagcagcttggggcaaggtgctggagaagtctggcttcgcgtcgactgccgcaacacagaccagacctactggtgtgagtacagggggcagcccagcatgtgccaggctttcgctgctgaccccaaatcttactggaatcaagccctgcaggagctgaggcgccttcaccatgcgtgccagggggccccggtgcttaggccatccgtgtgcagggaggctggaccccaggcccatatgcagcaggtgacttccagcctcaagggcagcccagagcccaaccagcagcctgaggctgggacgccatctctgaggcccaaggccacagtgaaactcacagaagcaacacagctgggaaaggactcgatggaagagctgggaaaagccaaacccaccacccgacccacagccaaacctacccagcctggacccaggcccggagggaatgaggaagcaaagaagaaggcctgggaacattgttggaaacccttccaggccctgtgcgcctttctcatcagcttcttccgagggtgacaggtgaaagacccctacagatctgacctctccctgacagacaaccatctctttttatattatgccgctttcaatccaacgttctcacactggaagaagagagtttctaatcagatgcaacggcccaaattcttgatctgcagcttctctgaagtttggaaaagaaaccttcctttctggagtttgcagagttcagcaatatgatagggaacaggtgctgatgggcccaagagtgacaagcatacacaactacttattatctgtagaagttttgctttgttgatctgagccttctatgaaagtttaaatatgtaacgcattcatgaatttccagtgttcagtaaatagcagctatgtgtgtgcaaaataaaagaatgatttcagaaaaaaaaaaaaaaaaaaactcggggggggccggtacccattygccccaag

SEQ ID NO: 284 - DNA, 462 bp, Homo sapiens
gaattcggcacgagctgggctcaagtgatcctcctgccgaggcctcccaaattgctgggactgcagctgtgagccaccatgcccagccttaacttggttttaagacctctgatttgccttgcctcaattacctcctttcttattttctttcctttgttgactctcatactctgttctcctaattctcccccttttccactccctgcccaccctgaaagacacacacacacacaataagtgggtggagtaagaagtcaacggagttggatataagcattcctgcttttctgacatctccagtgtcttggagaacaaggattctagaatgagggctcctcattatgcttcctttcaacattttttctctgtgttacttaagctttcaccccaagcatgtttgacagagagccagtgcattccccttactttttacaaaaataaaaaaaaaaaaaaaaaactcga

SEQ ID NO: 285 - DNA, 809 bp, Homo sapiens
ggcacgaggagaatcatgggcctctggctgggcatgctggcctgtgtcttcctggcaactgctgcctttgttgcttatactgcccggctggactggaagcttgctgcagaggaggctaagaaacattcaggccggcagcagcagcagagagcagagagcactgcaaccagacctgggcctgagaaagcagtcctatcttcagtggctacaggcagttcccctggcattaccttgacaacgtattcaaggtctgagtgccacgtggacttcttcaggactccagaggaggcccacgccctttcagctcctaccagcagactatcagtgaaacagctggtcatccgccgtggggctgctctgggggcggcgtcagccacactgatggtggggctcacggtcaggatcctagccaccaggcactagcaaagaagcttggaaatagaaagccaggagtggctgtccccagtatgcaaacacaccacggtctgccctgcaaaaacaccaatggggtctagtgcaggtggacactttgaaccactcctcaaaaaaagaactttggctgattccttgtggtgacactcagaggggtctgaacagacttgacaattctgttctggtcaagctggagttttcttctgtgacttggactgctctacagaagacatcagccaactgcacgagtcagagtccagggattgtcactattattaataatgtaaatggcttcaaatgggacactgcagataaaatcacaaaaaccactgttatattaaagattacacatttcctggaaaaaaaaaaaaaaaaaa

SEQ ID NO: 286 - DNA, 1151 bp, Homo sapiens
ggcacgagtgtcaatgaaagtgtttctaatgcaactgcgattgactcccagatagctagaagtttgcacatcccactcacccaggatatagctggtgacccaagctatgaaattagcaaacagagactcagtattgtcattggcgtggttgctggcattatgacggtgattctaatcatcttaattgtagtgatggcaaggtactgcaggtccaaaaataaaaatggctatgaagccggcaaaaaagatcacgaagacttttttacaccccaacagcatgacaaatctaaaaagcctaaaaaggacaagaaaaacaaaaaatctaagcagcctctctacagcagcattgtcactgtggaggcttctaagccaaatggacagaggtatgatagtgtcaatgagaagctgtcagacagcccaagcatggggcgatacaggtccgttaatggtgggcccggcagtcctgacctggcaaggcattacaaatctagttccccattgcctactgttcagcttcatccccagtcaccaactgcaggaaaaaaacaccaggccgtacaagatctaccaccagccaacacatttgtgggagcaggagacaacatttcaattggatcagatcactgctctgagtacagctgtcaaaccaataacaagtacagcaaacagatgcgtctacatccatacattactgtgtttggctgaattccactctaatatgatgctccattatgcaccatactgtgatgacctttctactccgaaacctgctggagcctgcccttggccgtggggtgtcagccaatcactgcttgttccacttgttgtacattttatttttgagtctttttctttctcatatacagaaaaatagtatgaaaataaaataaatgtatgaaacagtattaatgcagaaatgtgctactaatggatgtctgagtcaccagaaattccattcttaaagaggcggttagcacctattagacgtaacagtgatgtcttttaaaaaatccaaaagcatattgcaacaataagtttgagactttgtgtgaacaaagggaaattcagcctcttatgtctttgtctttaatacattaaatactgattttgaataaaaatctaaattgatcaataaaaaaaaaaaaaaaaaa

SEQ ID NO: 287 - DNA, 308 bp, Homo sapiens
ggcacgaggcggcgctgcgaggacccatgcagctgacgctggggggcgcggccgtgggcgcgggcgccgtgctggccgccagcctgctctgggcgtgcgccgtgggcctctacatggggcagctggagctggacgtggagctggtgcccgaggacgacgggacggcctccgcggaaggccctgatgaggcgggtcggccgccacccgagtgagcgacacggccgtggggcctggcaggcgctggacagcgcccgaggactgggacattaaacctgacctcccctcctccaaaaaaaaaaaaaaaaaaa

SEQ ID NO: 288 - DNA, 1303 bp, Homo sapiens
aggttaaatgcgtacttttctaacctttgttattttgaaagttattctgatattcctatccagttgtgcctcatttactagaaatttgctcacatggccaaatgatgtatccacagaacaatttgaaactagaccttttggaagcgaactcctacaaactgtcatcaatgttagcagaacttgagcaaagacctcaacccagccatccttgtagtaattccatcttcaggtggagggaaaaggtaacatttaaggagactggttgtaatttcttgattgggcctgctgggtggagtggcttaaagtagcatcagggcaaaaaaggtgttaggaattctatgtgatattaatattcatgcagttagttaagaagataaatgttttwatttttcttttgagcacaataacaagagctagacaaaaccgaatacattctgtgtacaccaaacttctatgagaagctaaaaaacacttttgatttcttctttctcatcatacctgaatttcatcctttggatgtgcttttacagtaaaatttctattaaattgaaattttaatattcgttcagacctaaattataagattttgtggtatgtattagtctcatctgtttaagatggtgcctaatgcagataatgcatcagtacagctctgaaatgcttgtagctatttttattactgatcagaagggggaactgtaatcatcttgtgaagggacagttttctaaggctcaagagctcgaaaacaatctcaatcatttacagggttgtgatcatttcacttgcattaagccaactaaagttgtatttgtaaaagtaatgctatgaatattactatttgacctagacacataggttagaattggaaacacaggctataaagtatagtaattgtgtaattgtgaaaatattaaggcttcaactcaaaactgaaacacagtagggcttagaaatctttgaattatttatacccctcagtttaaaaacttccagtccaggcgcagtggctcatgcctgtaatcccagaactttgggaggccaaggcaggcggatcacctgaggtcaggagttcgagagcagcctggctgacacggtgaaaccccgtctctactaagaatacaaaaattagccaggcatggtggtgggcacctgtaatcccagctacgggggaggctgaggcaggagaatcacttgaacccgggaggtggaggttgtagtgggccaagatcatgccactgcactccagcctgggtgaacagggcaagactctgtctaaaaaaaaaaaaaaaaaaaactcgtagg

SEQ ID NO: 289 - DNA, 4412 bp, Homo sapiens
aacattagatctcaatgaaaaccagaatggaaccctttcactatcataaactcatttataaaagtgcccatgatgaatagcaagaagtacccagtggcccatctcattgaccaaacttagaaagccaaggtggggcatctgcagctctcccacaatctgagtttgtgttgatccttgtaccccacaacctgaaacatcttcttatatatatcgagcgagctctcagcccttctgttttcaaggccatcatggagaaactggagatgtccaagttccagcccactctcctaacactaccccgcatcaaagagactaagccagactatgggggaaagggagataagaaggatcctggaactttaaagagggaaagagtgagattcagaaatcgccaggactggactttaagggacgtcctgtgtcagcacaagggactggcacacacagacacacgagaccgaggagaaactgcagacaaatggagatacaaagacttagaaggacagctcctttcacctcatcctacttgtccagaaggtaaaaagacacagccagaaagaaaaggcatcggctcagctctcagatcaggacaggctgtggatctgtggcggtactctgaaagctggagctgcagcacaccccttttgtattgctcaccctcggtaaagagagagagggctgggaggaaaagtagttcatctaggaaactgtcctgggaaccaaacttctgatttcttttgcaaccctctgcattccatctctatgagccaccattggattacacaatgacatggagaatgggaccccgtttcactatgctgttggccatgtggctagtgtgtggatcagaaccccacccccatgccactattagaggcagccacggaggacggaaagtgcctttggtttctccggacagcagtaggccagctcggtttctgaggcacactgggaggtctcgcggaattgagagatccactctggaggaaccaaaccttcagcctctccagagaaggaggagtgtgcccgtgttgagactagctcgcccaacagagccgccagcccgctcggacatcaatggggccgccgtgagacctgagcaaagaccagcagccaggggctctccgcgtgagatgatcagagatgaggggtcctcagctcggtcaagaatgttgcgtttcccttcggggtccagctctcccaacatccttgccagctttgcagggaagaacagagtatgggtcatctcagcccctcatgcctcggaaggctactaccgcctcatgatgagcctgctgaaggacgatgtgtactgtgagctggcggagaggcacatccaacagattgtgctcttccaccaggcaggtgaggaaggaggcaaggtgagaaggatcaccagcgagggccagatcctggagcagcccctggaccctagcctcatccctaagctgatgagcttcctgaagctggagaagggcaagtttggcatggtgctgctgaagaagacgctgcaggtggaggagcgctatccatatcccgttaggctggaagccatgtacgaggtcatcgaccaaggccccatccgtaggatcgagaagatcaggcagaagggctttgtccagaaatgtaaggcctctggtgtagagggccaggtggtggcggaggggaatgacggtggagggggagcaggaaggccaagcctgggcagcgagaagaagaaagaggacccaaggagagcacaagtcccaccaaccagagagagtcgggtgaaggtcctgagaaaactggccgccactgcaccagctttgccccaacctccctcaacccccagagccaccacccttcctcctgccccagccacaacagtgactcggtccacgtcccgggcggtaacagttgctgcaagacctatgaccaccactgcctttcccaccacgcagaggccctggaccccctcaccctcccacaggccccctacaaccactgaggtgatcactgccaggagaccctcagtttcagagaatctttaccctccatcccggaaggatcagcacagggagaggccacagacaaccaggaggcccagcaaggccaccagcttggagagcttcacaaatgcccctcccaccaccatctcagaacccagcacaagggctgctggcccaggccgtttccgggacaaccgcatggacaggcgggaacatggccaccgagacccaaatgtggtgccaggtcctcccaagccagcaaaggagaaacctcccaaaaagaaggcccaggacaaaattcttagtaatgagtatgaggagaagtatgacctcagccggcctactgcctctcagctggaggacgagctgcaggtggggaatgttccccttaaaaaagcaaaggagtctaaaaagcatgaaaagcttgagaaaccagagaaggagaagaaaaaaaagatgaagaatgagaacgcagacaagttacttaagagtgaaaagcaaatgaagaagtctgagaaaaagagcaagcaagagaaagagaagagcaagaagaaaaaaggaggtaaaacagaacaggatggctatcagaaacccaccaacaaacacttcacgcagagtcccaagaagtcagtggccgacctgctggggtcctttgaaggcaaacgaagactccttctgatcactgctcccaaggctgagaacaatatgtatgtgcaacaacgtgatgaatatctggaaagtttctgcaagatggctaccaggaaaatctctgtgatcaccatcttcggccctgtcaacaacagcaccatgaaaatcgaccactttcagctagataatgagaagcccatgcgagtggtggatgatgaagacttggtagaccagcgtctcatcagcgagctgaggaaagagtacggaatgacctacaatgacttcttcatggtgctaacagatgtggatctgagagtcaagcaatactatgaggtaccaataacaatgaagtctgtgtttgatctgatcgatactttccagtcccgaatcaaagatatggagaagcagaagaaggagggcattgtttgcaaagaggacaaaaagcagtccctggagaacttcctatccaggttccggtggaggaggaggttgctggtgatctctgctcctaacgatgaagactgggcctattcacagcagctctctgccctcagtggtcaggcgtgcaattttggtctgcgccacataaccattctgaagcttttaggcgttggagaggaagttgggggagtgttagaactgttcccaattaatgggagctctgttgttgagcgagaagacgtaccagcccatttggtgaaagacattcgtaactattttcaagtgagcccggagtacttctccatgcttctagtcggaaaagacggaaatgtcaaatcctggtatccttccccaatgtggtccatggtgattgtgtacgatttaattgattcgatgcaacttcggagacaggaaatggcgattcagcagtcactggggatgcgctgcccagaagatgagtatgcaggctatggttaccatagttaccaccaaggataccaggatggttaccaggatgactaccgtcatcatgagagttatcaccatggatacccttactgagcagaaatatgtaaccttagactcagccagtttcctctgcagctgctaaaactacatgtggccagctccattcttccacactgcgtactacatttcctgcctttttctttcagtgtttttctaagactaaataaatagcaaactttcacctattcatgagttattattgaaacctcaaatcataaagacatttaaaagaattgtttttctaactggaggggctctagtgctaaataatagtactgaaaattgatattattttccttttcttatatgaaggaccttatttggcatataaaattttataaaatatgtatttaaagctttttcttattttttgtattaattggtaagtgaaaactctgttaaagatcacaccacaatgttttcaagaaacatctgaaaagataaaacaaagaacaaataacttataatacttacttaaattgacactttttgaaatgccagtctgaaaataattaagatatctctgctttgtatgagtttcttttatgaaacttgataccacgggagtccagtaatattggccacaaaagccagagaaagtaccaagcccagctttgttatcatagccacttcctgccctgcttctgttatttttagtgttttttcagatataaatcggggtccaggaaatcctcaccagaatctggcactgcagccaaaggcgatacttccagagttctagtaggctgctatggaatttctggcatgaaaattcttgacccctcacactttaccccctgtacagca

SEQ ID NO: 290 - DNA, 1907 bp, Homo sapiens
ggcacaggggaatcatcgtgtgatgtgtgtgctgcctttgtgagtgtgtggagtcctgctcaggtgttaggtacagtgtgtttgatcgtggtggcttgaggggaacccttgttcagagctgtgactgcggctgcactcagagaagctgcccttggctgctcgtagcgccgggccttctctcctcgtcatcatccagagcagccagtgtccgggaggcagaaggtaccggggcagctactggaggactgtgcgggcctgcctgggctgccccctccgccgtggggccctgttgctgctgtccatctatttctactactccctcccaaatgcggtcggcccgcccttcacttggatgcttgccctcctgggcctctcgcaggcactgaacatcctcctgggcctcaagggcctggccccagctgagatctctgcagtgtgtgaaaaagggaatttcaacgtggcccatgggctggcatggtcatattacatcggatatctgcggctgatcctgccagagctccaggcccggattcgaacttacaatcagcattacaacaacctgctacggggtgcagtgagccagcggctgtatattctcctcccattggactgtggggtgcctgataacctgagtatggctgaccccaacattcgcttcctggataaactgccccagcagaccggtgaccgtgctggcatcaaggatcgggtttacagcaacagcatctatgagcttctggagaacgggcagcgggcgggcacctgtgtcctggagtacgccacccccttgcagactttgtttgccatgtcacaatacagtcaagctggctttagcggggaggataggcttgagcaggccaaactcttctgccggacacttgaggacatcctggcagatgcccctgagtctcagaacaactgccgcctcattgcctaccaggaacctgcagatgacagcagcttctcgctgtcccaggaggttctccggcacctgcggcaggaggaaaaggaagaggttactgtgggcagcttgaagacctcagcggtgcccagtacctccacgatgtcccaagagcctgagctcctcatcagtggaatggaaaagcccctccctctccgcacggatttctcttgagacccagggtcaccaggccagagcctccagtggtctccaagcctctggactgggggctctcttcagtggctgaatgtccagcagagctatttccttccacagggggccttgcagggaagggtccaggacttgacatcttaagatgcgtcttgtccccttgggccagtcatttcccctctctgagcctcggtgtcttcaacctgtgaaatgggatcataatcactgccttacctccctcacggttgttgtgaggactgagtgtgtggaagtttttcataaactttggatgctagtgtacttagggggtgtgccaggtgtctttcatggggccttccagacccactccccacccttctccccttcctttgcccggggacgccgaactctctcaatggtatcaacaggctccttcgccctctggctcctggtcatgttccattattggggagccccagcagaagaatggagaggaggaggaggctgagtttggggtattgaatcccccggctcccaccctgcagcatcaaggttgctatggactctcctgccgggcaactcttgcgtaatcatgactatctctaggattctggcaccacttccttccctggccccttaagcctagctgtgtatcggcacccccaccccactagagtactccctctcacttgcggtttccttatactccacccctttctcaacggtccttttttaaagcacatctcagattaaaaaaaaaaaaaaaaaaaaaaaaaaaaaaaaaaagggcggccgc

SEQ ID NO: 291 - DNA, 1476 bp, Homo sapiens
  misc_feature (1)..(1): n equals a,t,g, or c
  misc_feature (69)..(69): n equals a,t,g, or c
ncctatttctgcttactgtgttaccagagagcctgggggtctggatcctatctggccccgtcaggtggnattgccaaatgagcagttctcttgccccagtccctttcctgtgctataaataagccccatgtttattttcttatgttattgaaatgagcacttgtgatttgggcctcttttgaggagtccagagagcgtccatccggtgcctggtgagggccctgcatggctggctgctgtctgaagctatttggagtcctctccctgtgttttctatgtggcttaatttcaatagaaagggttatatgcaaccctgtatctgctgattttcaggtttcaactttctgccagcgtcactgcctgcttagaagtaaagttatgtttctcattaaggggataacagccacaattgaggtaattaacgaaaattgtacattggtggcagcacctcctataggatttccaatagtctttctctagtagatcattgggggctcaccttgatctcctctcttctgtctaccctgcaccaaaataccttgtcctgttttctggatatagttccaataatttttttcctaacagcctttttgtcaccagttggtttgatatcttacaacttggccaaatgagggttccattaactccatcttgtctaatgcatggagaattcaaggattttttttttcctcttttcatagcaccttccagttgccagttgtaccctggcccttctttggaagtcataatgatgaatatccattaataagagattgatgctctttcaactctcatgtcatctataccatctcagtggagaggatgactttggatgaggttggaatagaaaggaaacatttggaagtccactgcagtgtattatatgctgtgtggaagtctgggggttaggaaatacctggagggagaacttcctaagaaatgatttttggttcttttaggccttaacagcacaataaaagtatcccatgagaccattatgagcaggacacgacattgtttcacaccttgggctgtgactatttacttctcggtacagattactctggttaaatcactcagtaaagaaatcttttcatgctcacaatctgaacctgaaggctattactgaagagaattgcatctgacaacaaaatttaatttacttccagagaaaggaccagaagaaagtaaattttcatttatgtttttaagtctattgtcttaaaaagattcttttcccttaaaaaataaaaaaacctgatgtgatgggttccttcagtcaacaaatacttattgagcagttattgtgtgccagatactgttcttggtgtgaggatatggcactgaacaaaacaatgtacctactttcgtcaagcttacattctagtgaggaagataaccaaaacaagtgactgaatataatttcaaatgtcaataaatgctgtgaagaaaataaagcagagtattatatgtaaa

SEQ ID NO: 292 - DNA, 861 bp, Homo sapiens
gaattcggcacgagcctgagtcaacttgatatccaagctttttacttcaattatctggcaagattacatagactgtcaaagtttgtgaaagtttagcaagaaaactgtcttactcacagaaccacaggactaactgactgaaccacactccaccatttgcccctatttccaggcgttatggtcaccctgtagtttctaatctgtatagatgtgtagagcatgcctcttccctcttcctttcccctccctgttttcctttcctcttgccctttcttaatgtctgtytctattggcttcttgatcttggtctttaatgttcatccttaagcttgcttctctcttcagactactgattcagcctcttgcattttctttcaacttgggccaaaaaaacaggcaacattttcttcctccactacctcatcatcatccaatttattcctttagtttatattaccacaactctcctaaacgtcccaagtctattattaagtctaacaacttagcttcgaacctcaatccaagcatctgacaacacactgaaatgtgcaagcaagagtcccwatggccgggtgcagtggctcatgcctgtaatcccagcactttgggaggccaaggtgggatcacctgaggtcgggagttcgggaccagcctggccagtatggtgaagccatgtctmwactaaaaatacaaaattagccggacattgtggtgcacgtctgtcatcccagcaaggcaggcgaatcgcttgaacccgggaggcggaggttgcggtgagccgggatcgtgccattgcactccagcctggtcaacagagcgagactccgcctcattaaaaaaaaaaaaaaaaaaaactcgtag

SEQ ID NO: 293 - DNA, 587 bp, Homo sapiens
  misc_feature (1)..(1): n equals a,t,g, or c
  misc_feature (587)..(587): n equals a,t,g, or c
natttctcacaatgacaaattctcaaatattgctaatagtactgtggattttcctacattggtaaattgaaggaattgctaaatgctgaattcagcaaccagtttgagattgttgaaaataaagattgtttctttttcaatgcaagttcacagatcactggagttctagctacagtttgttctagaccagaggttgcagatatttttgtcctataaagagacacatggttaatatttttggctttgtgagttgtatagttttccgttgtagctgttcagctctgctacatgaaagcaaccatagaccataccttaacaagtggtcacttttgagtaccaataaaactttatttagaaataacagagggctggatttggtcctagtttgctgaacccttttctagatgaaggctcctcttgccaagactggctccctaccttggctgacaaattctcactttgggacttagtcattgttgctgctctctgttattttgcatgtcttttctcatgtttaggtgctgtgtcttaatacttttttcttacatttaatttaacaatcattactgagcgctggtatgtctagn

SEQ ID NO: 294 - DNA, 477 bp, Homo sapiens
gaattcggcacgaggtgagtatggcttttgtcttccatcttgctcagggtactttggaaccgctatacattgcaggagcttagcttctggttaccatggtttgcttccagagcaacaagcctagtacttcaacatggagacaattatcttttgtttttgttttgttttgtttgttttgtcttggccatgcctttttgagtttacctttttatattttgtccatcattgccatgtgtttggagcagtgggcgttccataacatgaactcactgtaccatcacgaatgggaagtaaggggaaaccttatccatgtggattttactcttccctgattccctaaattgggtttgcaaaatactactgtgcactttcttgatgattcgggcttatctttatgactgtctgtktttgtgtcagactgtaaagaagtataaaagtctttagcttgaaaaaaaaaaaaaaaaaaaaaaaactcga

SEQ ID NO: 295 - DNA, 1930 bp, Homo sapiens
ggcacgagcagaaatgaaaaattacttgagtgggatgagtaggaaaaaaagtggtagtgtcattcaattccagaggaagagatgaatttaatggtgaggttactggcattgggactaatatcagggatgatgtctaatattactcaatcacattcaagtaaaatatcagcctttggtatcttcattggaccagaacagtttctttagatcttcttatttctctttcaagcttcaaccttaaataataggccattgtgtagcagaaaaaactttaaacttagaagtagaaatctataatcaaatcctcagccaacttaaaaacagttgtgtgaccttggataagtcccatagccggactgcattctctaaaccagcagctataacgtttcctacctcattagagtgtggtgtgaatgaaaatgtgaagaatgcctaaaacagagtcaggccttgaatgcattagaaagtttcaggcagccactcattccatcaccctgtctcactctttctagtgacccagggtcacttacctgtttttcttaatacaccccaagtctttctcttgcctctctttgtagaccagaattattcttgtgttcatcaatatggattgagtcaaaaattttcaagatctacctgacttattacttcaaggatccatcatcctctggcttccatttttttgtatttctataggcatggattcaaaggggatatctgactggctcaggctagatccagatgaactcctcctacatttgttgtccatcctggtccaatcagtggcagctaagggagctcagtcacttgtttgaagtttgcccagtcaaggggctgtggaaggaagaggaagttaatctgagacaggattgtgacaggcagaccaataaacatgtctgtttacaatctaaatattcataaaattccaatcccccaaattctcccacatatgtatgctcttgtattcccctgagataggaagggaggcatgctcataaccccattttacagatgggaagaataaagtgccaggaatactggtccctccattagggtcacttaatgagccactggtgaaacaagaaataaatccgaattgagagcttagactgcctggtctcctgttaacaattaagactgcaaaaatttcaaaccatatcgcatgcacaataaatactgcatctgaatcaattgtagagacaaagacagaggcacagggagaagacagatctatccaaggtcactcaagtgaggaaataaaccagcttaaaatagacttctgtctcagcagcattgtgctttcactcctgggcaacttcctgcctatacagcaacattaatgccagcaaggaaggaacctgagggttaaatccttggccccagccccagatagcaatacagaaccccacccccgtaattcagtcaataaatagatgtccctttcatacaagtttcagaaaacacagttaatatacaaccactactcacaaattaaataagttatcttactgtaaaggatataactattttattatctttgcaattaaaatgaaatatgctaaaggtagaagcaatacaaaacagctgctgccagaagtttcaataaaagatcactactgggcacccttataactgtgggaccattaggagatttaaatgtcttcttcactttgcccacggtagggagtgaggctgcactgagaaacatcactggcatgaggtctaattgcctgccctatgattaatgttgccaagtgaattcagaagttgtcacagttctcatcctatggtccaggctcatttataaaatagagcaaagggagcccagtgctttgagaatgccaatgcaaaattataataattacttattacatgatacagttgttaaagtattttctgtgttgttcaaaaaaaaaaaaaaaaaactcga

SEQ ID NO: 296 - DNA, 791 bp, Homo sapiens
ggcacgagctgcatttgatctcattctttagtccaatgtaagtaagagtaaaacaatgacatttaaggccaccaggctattctcatttttggaaaaatgctggattacattaccagcatattaaatgagaatatcaaggtgtaatatctccctagaaattgtctcaccttcaatactattgacatttttggacctgataattttgttgtgggctctagcctcatgttataggaggtttaccagttttcctgccctaaacttaccggatgtgaatagcacactccactacctacagcagtaaaaactaaaattgtctctaaacattgacaaattgtccctggtagtgaaaatcacccctggttgagaccgtgttgttgaaaataaaacaaaaactttcacatcaataaatatgttaggctgtgtatgttaaggattaacattaagacaatatggagcaagcactacatgaaagcagtgacgattggggaattagtggcacattatcctaatagttaatatagtgactgtaatatctaaatatcatcctatagagtttttcttagattttttcattagtataacaggatgttgtgtatgttacactgtatatactgttattttgagagacaattttgggaattttgccaaggtattttcaattataggtctttaatacattctaagcaagtgggtctcaaaaatgggaattttacaccccacattcttcttcccatccggtggacatttgtcaatgtgcgcaaatatttctgattaaaaaaaaaaaaaaaaaa

SEQ ID NO: 297 - DNA, 2425 bp, Homo sapiens
cgctgccgatcgccgggaggacccccgcctcgccgaagacgggcggggcaagccgagcctcacggggtccccggagctgggccgggcctccagatggagaaggcgcaacggggagttcttgagtaagccagagcggtgtccagcgcggtgtagccgcagccgccgctgtcaggcgcagcaacggacaaccccgtagaagtcggtcggcaggtcctctccaacccgccgctaccgcgccgctgtgggagagaccccagcaggagcccaagggcagctacgggggcgcgaaggccgctggcgccgcctcggccagcccttcccgcgcggttccactgccttaaggatgacagtcgtagggaaccctcgaagttggagctgccagtggttgccaatcctgatactgttgctgggcacaggccatgggccaggggtggaaggcgtgacacactacaaggccggcgaccctgttattctgtatgtcaacaaagtgggaccctaccataaccctcaggaaacttaccactactatcagcttccagtctgctgccctgagaagatacgtcacaaaagccttagcctgggtgaagtgctggatggggaccgaatggctgagtctttgtatgagatccgctttcgggaaaacgtggagaagagaattctgtgccacatgcagctcagttctgcacaggtggagcagctgcgccaggccattgaagaactgtactactttgaatttgtggtagatgacttgccaatccggggctttgtgggctacatggaggagagtggtttcctgccacacagccacaagataggactctggacccatttggacttccacctagaattccatggagaccgaattatatttgccaatgtttcagtgcgggacgtcaagccccacagcttggatgggttacgacctgacgagttcctaggccttacccacacttatagcgtgcgctggtctgagacttcagtggagcgtcggagtgacaggcgccgtggtgacgatggtggtttctttcctcgaacactggaaatccattggttgtccatcatcaactccatggtgcttgtgtttttactggtgggttttgtggctgtcattctaatgcgtgtgcttcggaatgacctggctcggtacaacttagatgaggagaccacctctgcaggttctggtgatgactttgaccagggtgacaatggctggaaaattatccatacagatgtcttccgcttccccccataccgtggtctgctctgtgctgtgcttggcgtgggtgcccagttcctggcccttggcactggcattattgtcatggcactgctgggcatgttcaatgtgcaccgtcatggggccattaactcagcagccatcttgttgtatgccctgacctgctgcatctctggctacgtgtccagccacttctaccggcagattggaggcgagcgttgggtgtggaacatcattctcaccaccagtctcttctctgtgcctttcttcctgacgtggagtgtggtgaactcagtgcattgggccaatggttcgacacaggctctgccagccacaaccatcctgctgcttctgacggtttggctgctggtgggctttcccctcactgtcattggaggcatctttgggaagaacaacgccagcccctttgatgcaccctgtcgcaccaagaacatcgcccgggagattccaccccagccctggtacaagtctactgtcatccacatgactgttggaggcttcctgcctttcagtgccatctctgtggagctgtactacatctttgccacagtatggggtcgggagcagtacactttgtacggcatcctcttctttgtcttcgccatcctgctgagtgtgggggcttgcatctccattgcactcacctacttccagttgtctggggaggattaccgctggtggtggcgatctgtgctgagtgttggctccaccggcctcttcatcttcctctactcagttttctattatgcccggcgctccaacatgtctggggcagtacagacagtagagttcttcggctactccttactcactggttatgtcttcttcctcatgctgggcaccatctcctttttttcttccctaaagttcatccggtatatctatgttaacctcaagatggactgagttctgtatggcagaactattgctgttctctccctttcttcatgccctgttgaactctcctaccagcttctcttctgattgactgaattgtgtgatggcattgttgccttcccttttgccctttgggcattccttccccagagagggcctggaaattataaatctctatcacataaggattatatatttgaactttttaagttgcctttagttttggtcctgatttttctttttacaattaccaaaataaaatttattaag

SEQ ID NO: 298 - DNA, 1543 bp, Homo sapiens
  misc_feature (76)..(76): n equals a,t,g, or c
cttgactgtgttttattatttcatggcttgtatgagtgtgactgggtgtgtttctttagggttctgattgccagtnattttcatcaataagtcttgcaaagaatgggattgtcattcttcacttcagcacagttctagtcctgcttctctggagtagggttgttgagtaaggttgcttgggttgtgcattgcacaagggcacatggctgtgaggtgtatcctggcggggggctgtctacctgcagtgaggggcaccttttctgttttgctcaaaggcatgtataagccaatgggtgaccttatttcctgtgtcttcaggtgtgtggcagggggcctggggtggggaggtggggcgagcgagcagtgtgtggaaagccttgttgtcacctgaagcacgccaggtccagattgaccaatggttttctcacttcagggccmacccacgccccctttctgctgaggtttgggtgccatctagtggtgggatgggacttggttgactacatttaaggtaaggtggacccagcaactcccagaaacaactccggggacaccactccccatcacactccacaccgagcctggtgcccggtctgtgcccgagctcagcgggaccaggaagggatgggccctgccagggttgcccctgcactgtgcattctcgcctgggaggcacaagttctttcatctgcttttccttcagaggtgctgagcccacgccatagcccctgtgggatggtgggggagggggcgacccgaacaacagtgcagtcggtatcgagattggggagaggagcgagtccaaggagaaggtcatgagtttctttttactcgtgttgaataataacaataacaataacaatatggaaaccaccgcaaacttggagaaaagttgtaagcacagtaaagagaagcttccttctgagtcacttgagtggttgccgttctggccctgcaccctctgtgctttgggacggcgtccaacccgcattcatgtcaggagtgagtcgcacgtggctttgtggtcatggcgacttaatctgcctggacggtggctccgtctccctgggcttagacgaccttggcacttctggagataagcccatggctcccaggttgtgttcatgtgacgtttccttgtggtaggttctgggtctgcgttttgtctaggagtgtcacaggatggacactgcctcctggcaggggctgcccaatgcagttagcctcctgctggtgttctctcttgttgcttggtgaaggtggccctggtcagcttctccactgcccagtgaacgacccctttgtaatgaatgagtggggaggtagtgtgaagcgatgccaatatcccatccctgtcaaactgcctttactttttccttccttccttgctcccacctgtgtggatcctggtcccttcttgtattcagggctgtggtctgttatgacatttactctcaggctcaggtcctgcttgtttggcccgtgggagccccttcttctgccttttgtgttkttttggtatgtacctacattatttaactgg

SEQ ID NO: 299 - DNA, 1021 bp, Homo sapiens
  misc_feature (248)..(248): n equals a,t,g, or c
  misc_feature (1004)..(1004): n equals a,t,g, or c
  misc_feature (1014)..(1014): n equals a,t,g, or c
ttcggcagagcccttgcgcgctcttgaatacctgckttctgtagcgctagttctcttcaagatttgcttagtgtcatttcatttcggtttcttttctcgccatgtttttctgtcggaattacggttcgttttggttctatgtactctctaaaatgttatcgtttttcatttgtctactaattttcgtgcatttgttactactgagtttcttaatatctgactggcctccgcccacgggctctgcagancataaaatactcaggctgatggtagtgcagagactctccctccttgatcagcgcaaacgttggtctgaggcttgagggatggagcaacattttcttggctgtgtgaagcgggcttgggattccgcagaggtggcgccagagccccagcctccacctattgtgagttcagaagatcgtgggccgtggcctcttcctttgtatccagtactaggagagtactcactggacagctgtgatttgggactgctttccagcccttgctggcggctgcccggagtctactggcaaaacggactctctcctggagtccagagcaccttggaaccaagtacagcgaagcccactgagttcagttggccggggacacagaagcagcaagargcacccgtagaakargtggggcaggcagargaacccgacagactcaggctccrgcagcttccctggagcagtcctctccatccytgggacagacagcaggacaccgaggtctgtgacagcgggtgccttttggaacgccgccatcctcctgccctccagccgtggcgccacctcccgggtttctcagactgcctggagtggattcttcgcgttggttttgccgcgttctctgtactctgggcgtgctgttcacggatctgtggagctaagcagccttagatagcagcagaaggctttttggattctcctccttgaaaagattctcagttaccaaacgtctccacctagaaaataaaaatacattaagatgttganaaaaaaaaanaaaaaaa

SEQ ID NO: 300 - DNA, 727 bp, Homo sapiens
gctggtatctccagtgtttgggtttagctccaacttacaggttaggaccagcttttctgcaggtgttgaccagcaatttcctgcggcatttacttcttgataacaagagtgagaagatagagacagggcagatagacacttaagagtaaaatgtattaacacaaaggctctggccgcccccctacaaaggaggccatggaaccgatggaactgatggaggaaatgctgggactgtgggtcagtgctgacacacccatggccatacgtttggtcttcttggccttggctgggctggtggatgggaagccagtatggatcaccttgtggatggatgcaaagagaccaaacttggcgggcactggaagtacctggggaagcaggagagactcacactgctgtcatggccccacagcctggagcctcccctgcctcctctgcctcttcagagcccagcagaaagacagagaaagaagcctccttggggttccattacccacactccaaggtggaaatctttcagatggttagatgatgaaggtagtagaaggcaaggatgattgggagtagaaggaagagtgacaggctagcatgagctgtgcagcagcaagattccatatgagcaaagttcagaaagtgrgmmaaaaggaccaagttggatctcctcctaaccctgacctgcatgatatgggtgtgagaagcttcaactgagaaagctgctgagaaagta

SEQ ID NO: 301 - DNA, 2801 bp, Homo sapiens
ccacgcgtccgcgagcccggggcgggtggacgcggactcgaacgcagttgcttcgggacccaggaccccctcgggcccgacccgccaggaaagactgaggccgcggcctgccccgcccggctccctgcgccgccgccgcctcccgggacagaagatgtgctccagggtccctctgctgctgccgctgctcctgctactggccctggggcctggggtgcagggctgcccatccggctgccagtgcagccagccacagacagtcttctgcactgcccgccaggggaccacggtgccccgagacgtgccacccgacacggtggggctgtacgtctttgagaacggcatcaccatgctcgacgcaggcagctttgccggcctgccgggcctgcagctcctggacctgtcacagaaccagatcgccagcctgcccagcggggtcttccagccactcgccaacctcagcaacctggacctgacggccaacaggctgcatgaaatcaccaatgagaccttccgtggcctgcggcgcctcgagcgcctctacctgggcaagaaccgcatccgccacatccagcctggtgccttcgacacgctcgaccgcctcctggagctcaagctgcaggacaacgagctgcgggcactgcccccgctgcgcctgccccgcctgctgctgctggacctcagccacaacagcctcctggccctggagcccggcatcctggacactgccaacgtggaggcgctgcggctggctggtctggggctgcagcagctggacgaggggctcttcagccgcttgcgcaacctccacgacctggatgtgtccgacaaccagctggagcgagtgccacctgtgatccgaggcctccggggcctgacgcgcctgcggctggccggcaacacccgcattgcccagctgcggcccgaggacctggccggcctggctgccctgcaggagctggatgtgagcaacctaagcctgcaggccctgcctggcgacctctcgggcctcttcccccgcctgcggctgctggcagctgcccgcaaccccttcaactgcgtgtgccccctgagctggtttggcccctgggtgcgcgagagccacgtcacactggccagccctgaggagacgcgctgccacttcccgcccaagaacgctggccggctgctcctggagcttgactacgccgactttggctgcccagccaccaccaccacagccacagtgcccaccacgaggcccgtggtgcgggagcccacagccttgtcttctagcttggctcctacctggcttagccccacagcgccggccactgaggcccccagcccgccctccactgccccaccgactgtagggcctgtcccccagccccaggactgcccaccgtccacctgcctcaatgggggcacatgccacctggggacacggcaccacctggcgtgcttgtgccccgaaggcttcacgggcctgtactgtgagagccagatggggcaggggacacggcccagccctacaccagtcacgccgaggccaccacggtccctgaccctgggcatcgagccggtgagccccacctccctgcgcgtggggctgcagcgctacctccaggggagctccgtgcagctcaggagcctccgtctcacctatcgcaacctatcgggccctgataagcggctggtgacgctgcgactgcctgcctcgctcgctgagtacacggtcacccagctgcggcccaacgccacttactccgtctgtgtcatgcctttggggcccgggcgggtgccggagggcgaggaggcctgcggggaggcccatacacccccagccgtccactccaaccacgccccagtcacccaggcccgcgagggcaacctgccgctcctcattgcgcccgccctggccgcggtgctcctggccgcgctggctgcggtgggggcagcctactgtgtgcggcgggggcgggccatggcagcagcggctcaggacaaagggcaggtggggccaggggctgggcccctggaactggagggagtgaaggtccccttggagccaggcccgaaggcaacagaggcggtggagaggccctgcccagcgggtctgagtgtgaagtgccactcatgggcttccaaggcctggcctcagtcaccccttcacgcaaagccctacatctaagccagagagagacagggcagctgggccgggtttcagccagtgagatgccagccccttcctgctgccacaccacgtaagttctcagtcccaacctcggggatgtgtgcagacagggctgtgtgaccacagctgggccctgttccctctggacctcggtctcctcatctgtgagatgctgtggcccagctgacgagccctaacgtccccagaaccgagtgcctatgaggacagtgtccgccctgccctccgcaacgtgcagtccctgggcacggcgggcctgccatgtgctggtaacgcatgcctgggccctgctgggctctcccactccaggcggaccctgggggccagtgaaggaagctcccggaaagagcagagggagagcgggtaggcggctgtgtgactctagtcttggccccaggaagcgaaggaacaaaagaaactggaaaggaagatgctttaggaacatgttttgctttttttaaatatatatatatttataagagatcctttcccatttattctgggaagatgtttttcaaactcagagacaaggactttggtttttgtaagacaaacgatgatatgaaggccttttgtaagaaaaaaaaaaaaaaaaaaaaaaaaaaaa

SEQ ID NO: 302 - DNA, 1341 bp, Homo sapiens
caggaattcggcacgagagtctgtggtcctctgtatctcaactttttcatcttaaaaaaacaaatagggttgtgtgtgtggctggtggtcataaggtcctttctggctctaataacctgagcttctgttatgaagctgggacccttagagcctcaggatgatcctctgtttgtttgtgaagccccaatcaggtgctaagcaccatagtggcacttagctgaagctcctctgtaactcctgtgggccctgccttgcccacccccgacagctgctgcagtgctcctgagcagcacaggcctgatggagcttctggagaagatgctggccctcaccttggcaaaggcagattctcccaggactgcactcctctgctctgcctggctgctcactgcctccttctctgcccagcagcacaagggcagtttgcaggttcaccagacactctctgtggaaatggaccaagtattgaaggctctcagctttccaaagaaaaaggctgcactactctcagctgccatcttatgcttcctgcggacagccctgcgacaaagcttttcctctgccctggtagccctggtgccctcaggggcccagccactgccagccaccaaggacactgtcctagctccactgcgaatgtcgcaagtccggtccctggtcattgggctgcagaacctcctggtgcagaaggaccctctattgtcccaggcctgtgttggctgcctggaggccttgcttgactacctggatgcccggagcccagacattgctctccacgtggcctcccagccttggaatcggtttttgctgtttaccctcttggatgctggagagaattccttcctcagacctgagattttgaggctcatgaccctgtttatgcggtaccggagtagcagtgtcctctctcatgaagaggtgggtgatgttctgcaaggtgtggctttggctgacctgtctaccctctcgaacaccacactccaggccctgcatggcttcttccagcagctccagagcatgggacacctggctgaccacagcatggcccagaccctgcaggcctccttggagggccttccccctagcacctcctcaggccagccacccctgcaggacatgctctgcctgggaggggtggctgtatccctgtcccacatcagaaactgatcctcaggacttgaaggcccagaagtggagagagaatgagacctggagacaaagggcataattgttggggaaatggatgacagctgaagctattcatatggagccatatactctattgttgaaatagaataaggaaataaaatgatacactcacataaaaaaaaaaaaaaaaaa

SEQ ID NO: 303 - DNA, 839 bp, Homo sapiens
  misc_feature (1)..(1): n equals a,t,g, or c
ngaacccagaagatgctgcctctcctgatcatctgtctcctgcctgccattgaagggaagaactgcctccgctgctggccagaactgtctgccttgatagactatgacctgcagatcctctgggtgaccccagggccacccacagaactttctcaaagtattcactccttgttcctagaggataataattttctcaaaccctggtaccttgatcgtgaccatttggaagaagaaacagccaaattcttcactcaagtacaccaagccattaaaacgttacgagatgataaaacagtacttctggaagagatctacacgcacaagaatctctttactgagaggctgaataagatatctgatgggctgaaggagaagggagccccacccctctccatgaatgccttcccggctccatctcctacttgcaccccagaaccccttggctctgtctgcctccccagcacctcagtttctctaccttctcaccctccctggcagcctgcaatgagtcctgtgccaggaaccggcggacctccctgtgggctgtgagtctcagcagtgctctactcctggccatagctggagatgtttcttttactggcaaaggaagaaggaggcagtaaaggaacagggcagcccgcatgtcttccagaagtgaacagaggccgcagctaccaccgtcacaaagttcactcatctctgggtcccggtgaccccatccccccataccctccatcctgggtcctggggccccaaagctctgaggcctaggagactgcgctgtctcgtggtttgcctactcctacacctttgtaaagagtctcttcattaaaacccct

SEQ ID NO: 304 - DNA, 1022 bp, Homo sapiens
cgctcctgccgccgggaccctcgacctcctcagagcagccggctgccgccccgggaagatggcgaggaggagccgccaccgcctcctcctgctgctgctgcgctacctggtggtcgccctgggctatcataaggcctatgggttttctgccccaaaagaccaacaagtagtcacagcagtagwgtaccaagaggctattttagcctgcaaaaccccaaagaagactgtttsctccagattagagtggaagaaactgggtcggagtgtctcctttgtctactatcaacagactcttcaaggtgattttaaaaatcgagctgagatgatagatttcaatatccggatcaaaaatgtgacaagaagtgatgcggggaaatatcgttgtgaagttagtgccccatctgagcaaggccaaaacctggaagaggatacagtcactctggaagtattagtggctccagcagttccatcatgtgaagtaccctcttctgctctgagtggaactgtggtagagctacgatgtcaagacaaagaagggaatccagctcctgaatacacatggtttaaggatggcatccgtttgctagaaaatcccagacttggctcccaaagcaccaacagctcatacacaatgaatacaaaaactggaactctgcaatttaatactgtttccaaactggacactggagaatattcctgtgaagcccgcaattctgttggatatcgcaggtgtcctgggaaacgaatgcaagtagatgatctcaacataagtggcatcatagcagccgtagtagttgtggccttagtgatttccgtttgtggccttggtgtatgctatgctcagaggaaaggctacttttcaaaagaaacctccttccagaagagtaattcttcatctaaagccacgacaatgagtgaaaatgatttcaagcacacaaaatcctttataatttaaagactccactttagagatacaccaaagccaccgttgttacacaagttattaaactattataaaactc

SEQ ID NO: 305 - DNA, 1028 bp, Homo sapiens
gcatgatcctgtggaacacagtttgggatcatagatgtgaattaagacaccaccgagatacgggctgtgaggttcataccgtgctgatagcactcgtggtgtctgtgaaatgtgggtaagacattcaaacctggttttgatactggaaactcttcctttaaaactgtgaccatgatttcattcagcccctccacacccctatgtctgccttgtttcagagtgagttttctatggagcctgtggcccttttgcagcccacctggtggcttcttaatgtaactcttcccctggtcgcctggagtggaccactcatctgcaggcctctcctgcatggggagggtaggcagggagcagcatgtctgcaggggtgaacctttgctcttctgtcaggcgaggcccaggctgcaccagccacctgccacatggtgacagtgccacgggccctgcgtatggcccctgcaaccgtgctctggcgggcacacctggctgctgcaggccaaggccgctgttcagtgaagagtcccatgtttagtatggactaaagtcccatgtttagccaytgccccagtctcccgtgaccccagaaaccaggtcactggaccacagtgccagatcctcatcacgccggtgagcacctagaagtgagaacactgtattcctacaatgtacacttggatatttctccttatttagtttctagtgaaacaaatcaagtaaggaactatctttagtttagatggaattatttgtttttaattgttgccgtattcatctatatagctaatatttcaagataagtaatgaacaaaacctgtctaaaccttttgtttccaatgaatgaaagtcatgcactttatttataggctctatgttttggcttctgcagtacttttattatctatacataatttggccaaaaataagaaattggaaagaatgaaatgtttagtttatagtagaagaaagatgatgacactaagttgtgaaaatatgttgtgatttttatgaaataaactcacggcacgtag

SEQ ID NO: 306 - DNA, 450 bp, Homo sapiens
tttttttactcgaaaaaatgtttaatagaatttaaaattttaacttcagggaatttggaagttcaatcattctcaaagaggctgtaaggatgattaaaatcctgaaggaagccattgaagaaacttccttctgctctttctggaggatctcttttcaattatctattcatcatatatttcttatcttctgtgcacaattgacaactcttctttacagcacattcctcttyattcccatctcttggtttctgattgttcctggggctgtggataaaaccattctctgagaagctgataagcaattggatgagaaagarggagargaaaactggcaggargatctggscccatgcccgcagccagcacatctctcttcagacctggtgaccccagccactgggaacctggcaggcaccagctacagtgttggacactgctcgtgccgaattc

SEQ ID NO: 307 - DNA, 531 bp, Homo sapiens
gttctaattcactgcccacagccctgctgataaaagcaaagctcatctctgccgtgctgcagggaaccctatttccttcccctgcagctcagccacctcctcctctcaggtctgccagccatgaaacttctttacctgtttcttgccatccttctggccatagaagaaccagtgatatcaggcaaacgccacatccttcgatgcatgggtaacagtggaatttgtagggcctcttgcaaaaagaacgaacagccctacctctattgcagaaattgtcagtcctgctgcctccagtcctacatgaggataagcatttctggcaaagaggaaaataccgactggtcttatgagaagcagtggccaagactaccttgagtgctggtgattaccattctcaagctctctgggcacagagacctgctgtcaacccccctcattaaaattcatgtgcctgctaaaaaaaaaaaaaaaaaaaaaaaaaaamaaaaaaaaaaaaaamamaawaamwaaamawaaaaaaaaaaactcgag

SEQ ID NO: 308 - DNA, 808 bp, Homo sapiens
tgcaggaattcggcacgagattacaacacatcagaacaaaatgttatggactaccatggagcagaaatcgtgagccttcgtttgctgtcactagtaaaagaagaatttctttttctcagccccaacctagattcacatggactgaaatgtgcatcttctcctcatgggctggttatggttggagttgctgggactgtccatcgaggaaacacttgtttgggcatttttgaacaaatttttggactcatccgctgcccttttgtggagaatacttggaaaatcaaatttatcaacctgaaaattatgggagagagttcccttgctcctggaacattaccgaaaccatctgttaaatttgaacaaagtgatctagaggccttttataatgtaatcactgtatgtggtaccaatgaagtacgacataatgtaaagcaggcttcggatagtggaactggggaccaagtttgaggtagtggaaatgagacattgctgaacaaaagagaactgggtttacctgaccctctaaagcgctaagtactgtcagcctgaaaaaaatcttctatacagaaactcttccaaatactatatcagtaatgtctgaatgatttcagatgtgaaaattgacatattttagttgaaatacctttctggactacagacttacatatcatgtgaatacttacctatttctacccgagttgcagcaagtattctgaaagcttaatgcaaataaatcccactttagatcttaaaaaaaaaaaaaaaaaaaaaaaaaaaaaaaaaaaaaaaaaaaaaaaaaaaaaaaaac

SEQ ID NO: 309 - DNA, 1898 bp, Homo sapiens
  misc_feature (1398)..(1398): n equals a,t,g, or c
  misc_feature (1428)..(1428): n equals a,t,g, or c
ggcacgaggtctccatggcgttagaagtcttgatgctcctcgctgtcttgatttggaccggtgctgagaacctccatgtgaaaataagttgctctctggactggttgatggtctcagttatcccagttgcagaaagcagaaatctgtatatatttgcggatgaattacatctgggaatgggctgccctgcaaatcggatacatacatatgtatatgagtttatatatcttgttcgtgattgtggcatcaggacaagggtagtttctgaggaaactctcctttttcaaaccgagctgtactttaccccaaggaatatagatcatgaccctcaggaaatccatttggagtgttccacctctaggaaatcagtgtggcttacaccagtttctactgagaatgaaataaaattggatcctagtccttttattgctgactttcagacaacagcagaagagttaggattattatcttctagtccaaacttgctctgagctaaaggagaaatggaaacttgaagctggtgttatgtattttgcaggaaaacagtttcattttttcatagcaaaaatatagttggtgtatatctctccttaagtctctggtttctaaaaaccctacttcagtaaaggtcctgattagttgattagtgaatgtgtatttctaaatatttgtattcagtaggggtatggctgattaatttaacattaactattaggtaattcatattatacatttaagttctttctgttctgtgtagaagattcagaaatatgtcttcaaagacaatgacttgatctaattgataagaacctccaataaatatgttctaatatttttcaggaagaataaagaatagagagagacatataaatgtgcaagaggcaaaactttgagcatagtgtaaaatttaacatattaactctcacgaaaggcaaaatccttttatgtgcagatactttaattcatgtagattttcctattaatcagtaaagttgaatcctaacaataatgccatgtgacaacctatttagattattccagaattaaattcaatttattttctagagctcaagtaaccactactttaactgaaatttgatgttaggtttcccttgttcctccgaatggttcttccacactcaaaataattgaatggttgagttggttaagcaaagagttatcctgccacctaagagcattcattaaatgattatttattaccacctactttatactatcttcctttctttaaacatggagtctaaatatgtaatatatcaaaaaatacttctgatttggtagatttcttatatcaagggtgagaattgaactgtgccattggctattcaatagcttattgaatgtatgttttggatgccacatcctcctggaagcaanttttgccaagatactgtttattattatttntaattaaagtgatactattccattttcaattaaatgctgtctgtagctgttaacttgtcagataaagaatttgaccctgtcatagtgaacatctgtctttaccagttaacatgcagctaagaggtaatacttctatgggacttcctaagggtcagaatatggtacaagtacattgcgataaattatttaatcttcttaaagagtgaaatatatcatgattatcccaattttacagataagcaaacagaggttaaatcatttgcctgagtcacataacttgttggtgttggttcaagatttaaaatagggcaatctgcctttagatctgtctctatactctctctttgtatattagccactatactctactgcttggaatcatcttaagttgctgaactttagttctctagaaaacaattgctattcaagcagttatacaactctcaataaaacttaaagttgaaaaaaaa

SEQ ID NO: 310 - DNA, 813 bp, Homo sapiens
  misc_feature (16)..(16): n equals a,t,g, or c
gaatccccccgggctncaaggaatttcggcaacgagggactacagtgaggacgaaatctaccgcttcaacagccccctggacaagaccaacagccttatctggaccacgaggaccacaaggaccaccaaagactcagcctttcacatcatgtcccacgagagcccaggcatcgagtggctctgtctggagaatgccccatgctatgacaatgttccccaaggcatctttgcccctgaattcttcttcaaggtgttggtgagcaatagaggagtggacacgagcacctactgcaactaccagctcaccttcctgctgcacatccacgggctgccactcagtcccaagcgggcccttttcatcatcatggtgtcagctagcgtgtttgtgggcctggtgatcttctacatcgccttctgcctcctgtggcccctcgtggtgaagggctgcacgatgatccggtggaagataaacaacctcattgcctcagaatcctactacacctacgcctccatttccggaatctcgagcatgccatctctgagacattccaggatgggctccatgttcagctccaggatgacagaggacagggctgaacccaaggaagccgtggagagacagttgatgacctgagtgtcccacctgccccagcccccagttactgtcacgcctctcttatgaggcccatcttgaagatgcaacctgtcacccagcccaggcctctctttctgttttgcttgatgtttacttctcgttcagactcaaataaagccttttttcaggaccaaaaaaaaaaaaaaaaaaaactcgag

SEQ ID NO: 311 - DNA, 703 bp, Homo sapiens
gaattcggcacgagtgcgcgggcaccacggcggtttttcgacgctggcggtggacgcaggcagcatggaccacggttgctgggcggatggggagcgtctatggtcagttgccttagaagtggtgagatgggaagctgcagttggaagaccctggaggatgcctgacaaggggatgtctgacacatgattggagctctttttgaaatgtttcttgcccttcctggagcagaggagccattatttatgcaggtacatcgaagtcttttgacctccatacagtgattatgcttgtcatcgctggtggtatcctggcggccttgctcctgctgatagttgtcgtgctctgtctttacttcaaaatacacaacgcgctaaaagctgcaaaggaacctgaagctgtggctgtaaaaaatcacaacccagacaaggtgtggtgggccaagaacagccaggccaaaaccattgccacggagtcttgtcctgccctgcagtgctgtgaaggatatagaatgtgtgccagttttgattccctgccaccttgctgttgcgacataaatgagggcctctgagttaggaaaggtgggcacaaaaatcttcatgagcaatacttcttagtagattgttttgttattcaaatcaagttctagtgtttttatgtgagattatataatttacagtgttgttttatatacttttgaataaa

SEQ ID NO: 312 - DNA, 848 bp, Homo sapiens
ggcacgagcactactgtaagagctggtcagtgaatgtggttgcagcatggcctttgggcaagaagtaacccatttaactaaaaccagctggttggccccactcagatttatcaaagggttactgggtccctgggggtggatattgcttatattagacttagaatagcatactgttttaatattatatgaactaaaatgtttctttaaaaaaagagtggtctgttaatggatttatgtagtggtcaagaatttagacttcagagtcaaataaacctatatcagtcctagtcctacagtttactaattgtgagatgtcaagcaagtttttgaactcctctaagcctctgttttcttatctataaattaataaatgaatgaatcgggttgagtgaatatttagtaaattcttagtacatactagttatttgtaactgtgagactggttttttggtatggttttcacatttgggagtagaaataccacttcctaaagtctgttttatctcaaattctctatccaggcatagtgtaaagtgaaatacctagatttcttgattaatatacagataatggccagacgccatggctaaaacctgtgacgctagcacttcggaaggctgaggcgggcggatcacttgaggtcaggagttggagaccagcctggcaaacatggcgaaaccctgtctctactaaaaatacaaaaattagctggatgtggtggcaggtgtctgtaatcccagctacttaggaggctgagacaggagaactccttgagaattgctccactgccctccagcctgggcaacagagtgagacacttcatctcaaaaaaaaaaaaaaaaaaaaaa

SEQ ID NO: 313 - DNA, 1061 bp, Homo sapiens
aattcggcacgagagaaggaaatacatcaaaatgcccacattggttatctgtagaggatagaatgaaagatggctttattctcttgtttgctcttattaaagcaatcagatggtgcttctcctgtactcagagccctggctgcttcctgcctggcctctcctgcgggctgctgtggaaccagaaaagccttaaacggaaatgtgggagagaaggttggattcactttcatgtctttccagggttgtgacccctcaagtcctggttgcctttgctgttctctattaccttcaaacagccagctcgtctttatttcttttttagttttgtcggggttggcttgatagatgttagtccatcatagccagatgtgtctagccttgtcttttgaatgcaagatttaggatgtgggtacttagctgttagtggacatcagagtcactagtcaggatgaaagagttcttggctttaactcccagaaattctggtaacgtcatgtatagtgacggccgcatgtctaacaggtggccaggtaagtcttttggggtggtctgtgaatcacagtttgggagacattgacttttagggagtttgttctgaattcactagataatagagatataatacagagctttgaaagctggtgtcttgatgacagagccgtggcaatggggagggttgaggaggtggctgttgggcctgtctcctggtgagagttgaaagggcctgaactcaagcagaggcctcagaaccgaaaggtggtggaaggatgcagcaagaggcgccacacaggagtactctgcgccctggcagggtctgaatacacgtgggagtggtgagagggagaactttaagtccaggttttgtgcctcagtgacttagtgtggccatatcattagaaatgtgttgaggccgggcacagtggctcatgtctgtaatcccagcactttgagaggctgaggcaggaggatggcttgaggccaggagtttaaaaccagcctggacaacatagtgagagcctgtctctacaaaaaaaaaaaaaaaaaactcgagggggggcccg

SEQ ID NO: 314 - DNA, 818 bp, Homo sapiens
aaaacttgagtatgttgagggaaggaatatatatatatctgggagagaatggatacgttttgtttttctgaaatggaattagaaagatgttcagttgtcttgtgcattcttgcaaaccttgcagttttgagagccctgtttctgccttgtatcattttccactgtgtatckgattctaggagcgtgaacagggagacaaaggtgaagtttgtgcacacctctgtccatggggtgggtcatagctttgtgcagtcmgctttcaaggcttttgmccttgttccycctgaggctgttcctgaacagaaagatccggatcctgagtttccaacagtgaaatacccgaatcccgaagaggggaaaggtgtcttggtaacctaatttttttttaaattatgaaatctgcttttatattcaaaactattactgtcaagtaaaatacatttttatgtgttttcattgtgctgaagaaaaactaatttcagcatggaaatatgtatgtttggctgggtgcagcgtctcatgtctgtaatcccagcactttgggagaccaaggcaggcagatcacttgaggtcaggtgttcgagaacagcctggccaacatggcaaaaccctgtctctactaaaaatacaaaaattagctgggtgtggtggtacatgcctgtaatcccagccacttgggaggctgaggcactagaattgtttgaacctgagagatggaggttgcagtgagctgagattgcaccactgcactccagcctgggtgacagggtgacagagcgagactctgtctcaaaaaaaaaaaaaaaaaaaaactcgag

SEQ ID NO: 315 - DNA, 534 bp, Homo sapiens
agcccttcgtggccggctttgccgtcatcaccgcggcccaggacgtgtggatgctgctggggggccgcctcctcaccggcctggcctgcggtgttgcctccctagtggccccggtgagtgtcccgtctctcgagtgtcctgtctcgcggcctgagaccgagggggagtgggacaaaccgctccccaggcctgggggcgcggctccccctggcgggaccttctgggtgccaggcttgaagtccctgcgttatctcgcggtccctcccgtcgaccctgggaaggatcctactgttctctccattttacactgaggtcatgacatgcagtctcggaaaggtgaagtcctttgcccaggcgaggtccacagctagtcagaggggaagcagttgcaggaacccagggttgtcccacttagccgtgcccytcttttgctctgcaaactgcggatgatccacaggagcccactccctacattttggttttcatccctggcttcggggtcaatgactgcaattagcaggaagttcctgtcct

SEQ ID NO: 316 - DNA, 1032 bp, Homo sapiens
tgcaggaattcggcacgaggcgggccgggacgggcatggccctgctgctgtgcctggtgtgcctgacggcggcgctggcccacggctgtctgcactgccacagcaacttctccaagaagttctccttctaccgccaccatgtgaacttcaagtcctggtgggtgggcgacatccccgtgtcaggggcgctgctcaccgactggagcgacgacacgatgaaggagctgcacctggccatccccgccaagatcacccgggagaagctggaccaagtggcgacagcagtgtaccagatgatggatcagctgtaccaggggaagatgtacttccccgggtatttccccaacgagctgcgaaacatcttccgggagcaggtgcacctcatccagaacgccatcatcgaaagccgcatcgactgtcagcaccgctgtggtaagcaaggctccgtccaggctgaggggcgtgccggtggcagctcggggccctggaggctgaggggagccctggcggctcttgtacgtgtttcaggcatcttccagtacgagaccatctcctgcaacaactgcacagactcgcacgtcgcctgctttggctataactgcgagtcctcggcgcagtggaagtcagctgtccagggcctcctgaactacataaataactggcacaaacaggacacgagcatgagcctggtatcgccagccttaaggtgtctggagcccccacacttggccaacctgaccttggaagatgctgctgagtgtctcaagcagcactgacagcagctgggcctgccccagggcaacgtgggggcggagactcagctggacagcccctgcctgtcactctggagctgggctgctgctgcctcaggaccccctctccgaccccggacagagctgagctggccagggccaggagggcgggagggagggaatgggggtgggctgtgcgcagcatcagcgcctgggcaggtccgcagagctgcgggatgtgattaaagtccctgatgtttaaaaaaaaaaaaaaaaaaac

SEQ ID NO: 317 - DNA, 978 bp, Homo sapiens
gctcacaagataatatctcttgcctttttcctctcggagtgttcctgcggtttgtgatctctcttagctctggtagcctgttcaggccttaaggtatctgttcggtattatgtggtcaagtagctgggaccacaggatcacaacaccacgtctggctaatttttttttttttttttttttttttttttttgtagagatggggtttcgctatgttggccaggctggtctcaaactcctggcctcaagcaatcttccagccttggcctcccaaagtgctgggattacaggtgtgagccaccacktctggcttggagggcttattaaaacmccgattcttagcctcacccccagagtttctggttagtaggtcttggcagggctggagaattkgaatttccacaccttccttggtgatgtgttgttggtagttcagggagtacatgtgagaggaaccgtttagatagkaaaaactgcaaacctgaagaagaatagaagaatccttattctgkgctctcttagatttagtttcctcatctatgatcaataactattcatttcttcctcatttccaataacgatttgctgcttttaagagcaagagatcacttttccttcatgttgttttgctagtggcaaatcagaaatggtttcgccagtattcactgatcttgtaatcactctcggaatccagctgcatctctagtgtagagttttgggtcaacaagaataawrmwgagcttaaagaattggactcagactcttgaagtcaggggttgatgagaaggtggctctaatctattcattcaacaacttcctattgagcacctgctatgtgccaggtgctgttctagccactaagatagagcaggtaataacatagggccattgtccttatggaatttgtattgtagtggggtgaataaaaaagggcagtctaggtggggcccggaaaaaaaaaaaaaaaaaaaaaaaactcga

SEQ ID NO: 318 - DNA, 1466 bp, Homo sapiens
ggcacgagtgcctcaaagactattatttgggaggatctagtgcaaatgttagtaatgtggatattgtgtagtgtcccaggatattaatgtttttagcctcttggcttttattctgtattgttgccccaaaagatgatgctcacttatctttcatccagtgtaaggatatctggaaagacaacagaaagtatagctgttttcatttcaaaagtgatcagctgcttgagctagcaagcaaggcttgcactagcttccaggcgcagtcacgcagtttcacagcaggcgcggttccctcggagcacccagagctgccctgcggtagtcagcagttgtgctgtggctgcactgccaggctgggtggcargtggatcggagccagcagatgtggctcaggaagtgccttcttggcctctccttaatctctttcagastctgtgggcccttgattgcactgtgggttgtttcagactccagtattaggagactgaaccccttggtggttttttggtgtgtgtgtgctgagmtgggttgaggacatgttaagcaggtggggtgcytcccctgggtttgctccgggtggtacctgtggtgtggggtggttctgagtagttctggccccactgctggagtatctgcccaytcagtttgtgagatggcagggcttcatcctggtctggtgcctcattttcttctttagcagtgggcttagaaccaatgcagattcccaagttaagtattttttctgtagcttaattattacaggcttctggtacctaagccctttcttactttctgttctgaggggaagagaagataatgttgtttctccgccccccccggagtggccccaggaccttgcatggcatttgcagcatttgcagcgtgcttgggtttgctttactagggtgaaagtgttgcaccccccagcacccacaaaggcacctctgctcaccctccggtgaggttctgactggccctgggacatcacstgctccaggatcctatgtggctcatcccaggagagatgtgggagggaaggggaaaaaaggcttacatttgctgagtggaattcatgtagatctgagttccgcattgattcctaagctgcagagcccttatgccttggctgttttgtgaatgttagtcggtcttaacctttttcaccgagttagcattggctgtctcaggaggctcacagctcctgctcctcctccaggggagtgcgccctcctcctctgtcggtagctgtcaggtgcccctttcctctgcagcagactgtcctgggtccttgcctggccttccccttacacgtgagcctgcagcttcattcacagcccctgtgtagaaagataggcactaaaagcagctgactggcagccctagaaacatgaagggtttcatttatagtttcagtccttttccttctttcgagccttaatttaaaaaaaaaaaaaaaaaaactcgta

SEQ ID NO: 319 - DNA, 1430 bp, Homo sapiens
ggcacgagcacttatgtgtttggcattctccgtcatcattctggccggggcgggcagttctaggagttggaactcagtcctggtggaaaaggaagtcgtggagggagggctagggccgtgggggaactgctctgctgagcctcttcctcacctgctgcttcctaggactaacctgaaaggctaaggtaccaggctgaagtcagtgctcagaaaaccaatcgtcattctttggggttttttttcttgaagagccactttctctttaccttgttctagcctgttggaggtagggtttctgcaattccaaaggccgtacacagcctctcaccatcagaccactttttaaggctcttcgttcatacctagctcgaagattcacttcctcaggaagccattttagttacaaatctgggaaaacttaaaatgctttcattgtgccatgttttctgttgcagcttcagtaccgtacctagtggtcaggcatacttacaagtttctttttacagtaaccccttgtggacatctaataaatggtcattattttttagtactagtttgttttcctgaacactgtaagatctgtgactgacgtttgataccttaaagcagtgccatataataactacccactatttgttctttatttctgtcagataaaaatgttctatgtagtgtctacagtcattttttttttaactagaatttagatttggaagtagtttttctattagttgatttgcatgaaatacaaaattaggaaaaggcttattccacctcaacctagttgaactattaatgatttttttttttttttgaggatttgggctctttctagatagaaaatcaccctgaacttctagctttgcattgtgaagtgagcatcatgaagatgagaaaatgttgggagatcatttttgcaaagggcataatagtcggcattcagatatgagttaactgcagagggaaaattgcaagctgtcatgttggccttgttcctctcaaccttctggtaacctaacaagctcctacaggttgtatgtgaaattgcaagatgattatatagccctgttgaatttacaaccagatcttgctttcaaaccattattagccaagggtttgattccacacctgtgttcatggattttttggtattagacattgctgtaactctgttttcactttttcatctgttatcttggctcacttaagggagaaggtatcagcagcctaggaccacttggtttctgtttttatgtttcatagttcatggctgataaaaattacctgtccttaggccgagtgcagtgcctcacacctgtaatcccagcactttgggaggccgaggtgagtagatcacctgagatcaggagttcgagaccagcctggacaacaagagcaaaactccatctccaaaaaaaaaaaaaaaaaaa

SEQ ID NO: 320 - DNA, 1499 bp, Homo sapiens
  misc_feature (52)..(52): n equals a,t,g, or c
  misc_feature (66)..(66): n equals a,t,g, or c
  misc_feature (84)..(84): n equals a,t,g, or c
agcttattgcaaagacaaatgtttgaagtgtttgttgagatttcctgttgtncttcctgaggcagncacagcataagctctttnaccctctacttctcagcacataagctttcttaccatctatcactggagtcaggggtgaggggaggaccgcatgacagttggttaatatacacttattttttggcaaaaacgttttctctgggaccagaatgatcttgatactgaaaaaatttctagtgctagatcctctttctaagtgtgaaaggacttatctggaatgctccagaatgatcccaagtgttgagctgagagggacctggcagcagaatctgattattgaaaagtggcaattgttgatttattgaagacagaataataactcagcagaactgttatgttgagctgaacccgacctccttcagccgaatcatgcaagaatgcctgctgcatggctgttgctgctacttattaaggcttggtgttctgggcacagtgcaatgcatttctacatggttgatcctcacagcaaatgaacaacacaggcttaaggaaacaagcaactctcaaagtcctgcagtgagtagagcttagctgttggtagtcaacatgccacgcgattcggragttgagcctgtctccagaggttagagatgttcagtttcctcttaaggttcttacgtagatttttttcatgactttatctacatcctccttaaatttacgtttttagtccttactggctcttgatatcaccagttttgttgttattagtaatttctaactgccctaaatttgtctgttttaagattcaagggatgatacctcagtctgttatctggaatatggtttacaaatccattttttctcttcaaggctttgaaaacattgacattgtctcctcctaacatttttatttgtcttgcagactcctaatttatttaatttatcgttaggaagacgacttttctgtcttttgatgattttagctgcccttctctagaccttgctgattccattatctttaccaagaattgaaagtgaaagtggcatttgtcatagaatgccatggtcttattccaaagtatcttaggatggaacaatacaaggcataatatggggtcagtgaggtttgttacacgagtgaatgaccaacaacactactgtctgttcaaacccagtctgaagggtgaatcagaccgaccattggccgtgagggtctggactgctcagtattatctcaaggatatcaagggttattggaaactgtgtgatcaaaggggctccatgactttatgcagggattcagtagggagccaagaaggttgagaatagttcagagaccagagtctaagaccaatcaagaagaatggatcaattagagatatgaattctggtgcttatatttttgtggagctggttgtgagataaaaggtcaagcctaccagactgaaaagtgtatgtgaaagctctttaaaaaaaaaaaaaaaaaactcgag

SEQ ID NO: 321 - DNA, 549 bp, Homo sapiens
  misc_feature (474)..(474): n equals a,t,g, or c
  misc_feature (484)..(484): n equals a,t,g, or c
  misc_feature (528)..(528): n equals a,t,g, or c
gaattcggcagagcagatgcttcccactagagaagctaagaagctgtggcagccacasccgggacagggcctggcctccagcccagggctttccctgatgtccagcctcagctgcctcttcctgcctcatcccacccgcaagaggwgctggggaccaragacagagacacaaactccatttgaatgtgaaccttggcaccatggagatgctcagggtgagcccagtctgctctctcattagtatgaatttccttgtgtttctgtctctctcctcttccctggtatcagctgctggkcccaggtttccttccagagaggagcggggggtgggtggggtggtgctgattaaatctgaggacatgacattgrgcgagagaagcaaggggagctgstgacctccctggatggataaccatcaggaggcggtarcagagtycamataccatcaccttctcctgcagatgttggttcagncactttcctnctaccacagatgggctatgtgtttcaaagcagaagagcagaganggcagagaaccccagctggtt

SEQ ID NO: 322 - DNA, 904 bp, Homo sapiens
ggcacgagatcgtcttgtgacaagacttgctgagaagcaccttaaaattcactgtgagccacattttgtcttttactgtctcatcggatagggtagatcaatgtcctttactgtagcagagactctctcatgggcaggaccatcatggaaagttctgactacatcaagaaaggcgccaatgtctcacctgtgcttggggtcaggcagcaggctgtgatgccggtgcctctctggttggtactgtggttctgcttcctgttatatgtagcctcacgaaggacctttggattagccaattacatgcccctaccctgagcttcttccccagctctttgacttcctggacattggtgaatatcctgaataagcaaaagggataaaattcatagaaatatggtggcaaaaatatacaacttcagcccagttctttgggtccatgttggtaaggagtccagttggcaagacaagctgcccaaggaagtgcctcagaagtctgggtcaaagaggagggccagatctgttctgtgagaccctatgtgattgttatatttttaaataatatataattaagcaggacaaattaaatactccatggctttggggaaattgttgctttaaagtcctggaatggggctgggcacggtggctcatgcctattaatcccagcactttgggaagccaaagtgggtggatcacctgaggtcaggagttcaagaccagcctggccaacatggcaaaaccctgtccatggtggtgtgcgaggctgaggcaagaaaatcgcttgaacccgagaggcagaggttgcagtgacctgagattgcgccactgcactccaacctgggtgacagaatgagactccgtctcaaaaaaaaaaaaaaaaaaaaaaaaaaaaaaaaaaaaaaaa

SEQ ID NO: 323 - DNA, 3435 bp, Homo sapiens
  misc_feature (760)..(760): n equals a,t,g, or c
cgagcagcatcagaaagtacgawtctgctctgagggcgratgraaaatgaagawtctgacgtaaagcctccagactkgccaaacccaatgaatgctacctcccagtttcctcagcctcagcactttgcagctttggcctccgtctgcctcgggatatcacagagctgcccgagtgragtaggggtaccccttctacatggccatgggcttcccagggtatgacctctcggctgatgacatagctgggaagtttcagttcagccggggcatgcgccgcagttacgacgcagggttcaagctgatggtagtggaatatgctgagagtaccaacaactgccaggctgccaagcagtttggagtattggaaaaaaacgttcgagactggcgcaaagtgaagccacagcttcaaaacgcccacgccatgcggcgggcattccgaggccccaakaatgggaggtttgctctggtggaccagcgtgtggccgaatatgtcagatacatgcaggccaaaggggaccccatcacccgggaggcgatgcagctgaaagctctcgaaatcgcccaggaaatgaacattccagagaaagggttcaaggcaagcttgggttggtgtcgaagaatgatgagaaggtatgacctgtctctgaggcataaagtgcccgtgccccagcacctgccggaagacctgactgagaaactcgtcacttaccagcgcagtgtcctggctctgcgcagggcgcatgactatgaggtagctcanatggggaatgcagatgagacgcccatttgtttagaggtgccatcacgggtaactgttgataaccagggcgaaaagcctgtcttggtcaagacaccaggcagggaaaaactgaaaatcacagcaatgcttggtgtcttggctgatggraggaagttaccaccgtacatcattttraggggaacatatatccccccggggaagtttcccagtgggatggaaattcgctgccaccggtatgggtggatgactgaagacttgatgcaggactggttggaagtggtgtggagacggaggacaggagcagtgcccaagcagcgagggatgctgatcttgaatggcttccggggccatgccacagattccgtgaagaactccatggaaagcatgaacactgacatggtgatcatsccagggggtctgacctcacagcttcaggtgctggatgtcgtggtctacaagccactgaatgacagtgtgcgggcccagtactccaactggcttctggctgggaacctggcgctgagcccaaccgggaatgctaagaagccacccctgggcctctttctggagtgggtcatggtcgcgtggaatagcatctcaagtgagtccatcgtccaagggttcaagaagtgccatatctccagcaacttggaggaggaagacgatgtcctgtgggaaatcgagagtgagttgccaggaggaggagaaccaccaaaagattgtgacaccgaaagcatggctgagagcaactgaagggaaagggaaagcaaatggaactctgatttaaacagctggggatgaaattcctcaagatgattattcctgaaagtgtggatgcgctggatgcgcagggaacatcaggaaaaggccacggggctctgaacagccccggtccagacagcagcctgtacatccatcccaggacacagcccagcccctccccacaccatacaaggtatcagaaaagtctaggacctatcatttcatcagagacatgatcagaaaagaaactgcttctgccccatttcttgttttggagattactccatctgtccatcaaaagaaacctgtaaatatgaaagaacaaaggttatttcctggagaaaagacaatttattcaacaccaacaagggactcatcatatgggcacaactctggtgtccttctatggagaaaacctcaagtaaagttttattctgcctttgaaaatgcttccaaaagtagaccctgtccccacacaggtcaagactacagagaaggctttgtagaaatgtgtcacctatgtacacctgctacttacacatttcctcttttggaaaaatgagatacttagaataacaagaaaattaagacatactggcctggtgccagcagatggcttttctatagacaaactaggttagtgtggaagatataggttaaaataaactatgctgttttatttatcttcccaacctgattggcagctagacttttttagggtctcatttaatggccctgtttttttcattattatatttaatgatagggcaggatttcgtatgcaagctcttgtttctcaggctgcctgcagaagaagtcgctataaattatctgttgtctacatggtacaaggcccattgactcatctgatgcttgttttgttaatttctttaatatttttatcacggggcagtgggagggcttgggcttttagccacagctgttttaagacttctgatctcctgccctgcaggaataggtgggaagtcattgaatttttacactatagtaatttgcattcccacataagtttgagtgttacgaaaacattcctttaaagggatctgtgctacacaaaatatgccaggacctcacagacaaagccattgctagaaatgtcattccaatgatcagatctggaaacaggctgccataaccacttttccttcttgtagactcagctcacctgtatatttaaactgttcttggcatcttgaaacacctatttctactcaggtactcattgtcctgttactgattcacctttctgatccttttcaaccagttttcccccaaggggggaaattttacttaacctctagtatttgaacaactcaatatttgaattgttgccccatttgcttttacctgtactgtattcttggtcatctcaaatggcgtctaaacccagctactttgcattccagaagtttccattccctccaattccacctaatttttcatctgtcctagttactggctctttcttcatgtcttatttctcttgctttgggagcttaaaagattttacaagacctaattttgggttccttccttggagccatagttaccctgccaagaagagtagaaaatgggttcaactcctgtttcgctccaccaacacctctgtgagtctcatcatcagctgagcgatgatgccttacaggttgcatagcactggaactttcctagagtaacggctctgctgccagggtttctctgggctcattcttccactgacttaattatgatctatgcctaacagagccccagtacaactattttgcagaatggctgttaccctagaattactatagcacatattgagatatagttgtactccctagtagataggaactgaccccaacaataaactttgataataaagamaaaaaaaaaaaaaaaaaaaaaaa

SEQ ID NO: 324 - DNA, 1481 bp, Homo sapiens
ggcacgagcctggcagagagactctgaaatgagggattagaggtgttcaaggagcaagagcttcagcctgaagacaagggagcagtccctgaagacgcttctactgagaggtctgccatggcctctcttggcctccaacttgtgggctacatcctaggccttctggggcttttgggcacactggttgccatgctgctccccagctggaaaacaagttcttatgtcggtgccagcattgtgacagcagttggcttctccaagggcctctggatggaatgtgccacacacagcacaggcatcacccagtgtgacatctatagcacccttctgggcctgcccgctgacatccaggctgcccaggccatgatggtgacatccagtgcaatctcctccctggcctgcattatctctgtggtgggcatgagatgcacagtcttctgccaggaatcccgagccaaagacagagtggcggtagcaggtggagtctttttcatccttggaggcctcctgggattcattcctgttgcctggaatcttcatgggatcctacgggacttctactcaccactggtgcctgacagcatgaaatttgagattggagaggctctttacttgggcattatttcttccctgttctccctgatagctggaatcatcctctgcttttcctgctcatcccagagaaatcgctccaactactacgatgcctaccaagcccaacctcttgccacaaggagctctccaaggcctggtcaacctcccaaagtcaagagtgagttcaattcctacagcctgacagggtatgtgtgaagaaccaggggccagagctggggggtggctgggtctgtgaaaaacagtggacagcaccccgagggccacaggtgagggacactaccactggatcgtgtcagaaggtgctgctgaggatagactgactttggccattggattgagcaaaggcagaaatgggggctagtgtaacagcatgcaggttgaattgccaaggatgctcgccatgccagcctttctgttttcctcaccttgctgctcccctgccctaagtccccaaccctcaacttgaaaccccattcccttaagccaggactcagaggatccctttgccctctggtttacctgggactccatccccaaacccactaatcacatcccactgactgaccctctgtgatcaaagaccctctctctggctgaggttggctcttagctcattgctggggatgggaaggagaagcagtggcttttgtgggcattgctctaacctacttctcaagcttccctccaaagaaactgattggccctggaacctccatcccactcttgttatgactccacagtgtccagactaatttgtgcatgaactgaaataaaaccatcctacggtatccagggaacagaaagcaggatgcaggatgggaggacaggaaggcagcctgggacatttaaaaaaaaaaaaaaaaaaa

SEQ ID NO: 325 - DNA, 652 bp, Homo sapiens
gaattcggcacgagcaacagtggggcactctgctcccaggcaggtcccactgggctgagccgcacagcctggctttgggcttccctgactgcaccacccacatcasctgcctctagcccttaamatacaaaacttcccccagtcactggccgccaggctgagttgggggatgtgttacatccctgggtccactggggggcagtgttggccatggtgttggtgctggctctgccgagaggcgttggagtggctgtgtggggcggtgagcgccggcccagcctgatggaacccactgtaccaggcccaggcctcagcctctgagaaggacttccctgtgtcactcactcatacatgtcctcaggacgtgaagacatttcagcagaccaaagtttccttcgaatttccttcgaatcgtccagatacttggagacatctcctcctcacctgtggggtgctggggcagtcctaggcgtgggggcagatgggtggacagctgctgctgccctgctgggggtgggcagcccttggagcacacagtggtgaagacattcctgaatatgtctcaggctgtagaaatcttattttgtggaaagattttagagaatcatcaaaataaacttttaccaaataaaaaaaaaaaaaaaaaactcga

SEQ ID NO: 326 - DNA, 1711 bp, Homo sapiens
ggcacgagcgctcctgtcctgccactgagggacccggttaccaaccctcatgtagctcagtttgcccatctgtcccggtgctaacacacagttctcgggagactttccccattcccagaggagtagtgcgaaatgcgtgtacctctagtcttaagctgggcgtttgtattagttgggttttctggtgtctatttagcaagtgaaagtttctggttccctccttcactgtgtgacctgactagtcctcctggattgcatttatggaagtttatacgagacctagtttccatggaggaactcactgattccgcgagggagatggggtactggatgatggtcttcagccttaaggctatgtttccagtgtcctctgggtgtttccaagagcggcaagaaacgaataaatctctgacccttctcaggtgcagccagagagacactagcccactgatggacggacagacgtgggcaagggtccgtgtcactaaaccacccaccactgccacagctgcctacaacagacacatcagatgacactccgggcaaataaatgattttcactgaggacttactggttttaataataggtcctggtgtagagaagtccctcaacctattgtgcaacgagttttgagaagcgggtaagctgtatgttttgtggttttgtttcataaattcatctacaggaagaccaatattgactgaatgaagctttcatttaaagagctaaaatatgctttgtgtttttatatgtggatactactttaaacctaacgactattcattgtatcatagcttgtgatgtattctgctcatggcttttaaggtaaattgtgccatgatccactgccattctaattgctttaacaagtcattaccacactactgttacatcttaattatgcatacagacaggtagacttgttttacatatgtgaactaactagttgtcaaagcaaatgcagattgtattctgcaagtaaagtctttttctctctgaaatttctagggatgttctttaagtgaaattcatattaaaactgaagattttagttacaagaactgagtgcagattaagtctttgtgattcaacatagtcaagatacaactgtggatatttcatggaagtatgcaataaaatgtctctacctggaaaaatctatcaagcagcgtcacagtactgaatttgaaaccagaaatactgggtttttatataaatgcttcatagatttgttttatgataaagggcacataactctcctaaacctcacaccacctcttgaataggtataataagtccacatcaatgctgatgccttagctattattaaactcttacagtatgatgtaaagtgaaagtacaatgtaagatcattcctaggccaactttgaccagttttatacagaaacatgtgccaacttttctgtttgcaaggataatatcaaagcaaacaccagaaagttatatctttgatgcattttttcaaaatcatacacataatacacaaaccaaagacaaatgatgaatattacgtcagaaaatataaagtcttcccctttcttcttttgccaagaaagtccaatattttcaccatttttatgcacacaatcaactttatttaagctggaagttaatgtctcattgttttcattgttctaaataaacaccttttcccttgagtattgctctaaaaaaaaaaaaaaaaaaaaa

SEQ ID NO: 327 - DNA, 2058 bp, Homo sapiens
ggcacgagctcaaagagtaagaatccaagtgtgtgacattacatagctttgcatctatggaaacctaaatcataattgtttccactgcccaattatgttccttttcataacatttactattctggctatatttatcatagaacctaggaaccttagagttgacctgaatctaattaaatttcagacctcctggccaaagaccctagtggaagagcaaaactaaatcaacatattaccaatctcaagtatttctctgaggacccagaccactgactttttgttgtcattttcaggttgatcctataactgtatgttctacaatatctgtgctccaccagctcagtgaggaatcaacggaatatcaaaagtaaatattggtcaccatataccttttggtactagtctacgaaataattggctgaggaactgtttcatattaaagaaaagctaaaagcaatgtgtgatcttagattagacctatgattggaatgtatgtatattttatatacaaaatattgaggaaattgacaaaatttaaatacagaatatggattagataataggaatgtatcaaggtcaatatttaaaaagataatttcaacttttattttattcagtgggtacatgtgcagactttgttttacatagtacccaacagtttttcaacgcttatcccccaccctctagtaatctgcagtgtctattattgtcatcttcgtggctattgtacatgggattccatacttgattttgctctcaacatgaacattattggtgtagagaaatgccactaagttttgtacgttgcttttgtatcctgaaactttgctaaagttatttatcatttccaggagcctttcgttggagtctttagggttttctagttagagagtcatcagtgaagagagataatttgacttcttcttttcctttttgggtgccttttacttctttctcttccctgattgctctggctagggtttctaacatcaaattttttgatgttgatcattatactgtagttatgcaggggaatgtctttgttctttctaaagaacattcaatgttaaacattgaaatgtttaacaatgaaagatcattatatgtaatttactctcaaatggtcaagggagaggagagagaaagagacagagagaaagaataagaaaagagagtgagtaaatggggcaaaatgcaaacaatttgtcaatctatgtaaaatgtttacaagagttctgtgttacatttttgcaactcttctgtatgtttaaaataatgttaaaataacaattttcccaaatgtcaaatgttgccacatacaagcatttatgagcatggaaaatgtggcttctgaatgataggatacaaaatctggtgatgagcgaatacactgaatatatcaagattgagttgccatcttagaaggagaatattagctataaatcacatgatgaatacatcaatattaaatagactagaaaaccaataattataaggtcacaagagtgcaataaacatgaattatctccattgcatgtattttcatctctacttgccagttttatgagattcagtccccaatatattttcaattaattcaacatagaagattcacttctagtatgttttcaaattgtttcaaaccctgaccatctttttgattgctctaccttccaaaagaaaagaagggaacactaattttctttcctgatttacttcattgttttcttctgttagattaactttacctataaaagattgtctcttgactttatatatatatatatgtgtgtgtgtgtgtgtgtgtgtgtgtgtgtgtgtgtgtgtgtgtatttgaagaggacatgtgcctccataaaaggaaataaaatgagagaatacattattgattttgtgaaatcaaaatatttgaattatggtttctcaatattcaaaaactcttgcagtttctgtacttatttcttctgatgcatagagtttcggggactacatatgtttcacaaccaaagatatccacttgaaataaaaacattataaagttaaaaaaaaaaaaaaaaa

SEQ ID NO: 328 - DNA, 963 bp, Homo sapiens
  misc_feature (2)..(2): n equals a,t,g, or c
tncagaggccctgcggagttgttcagaaccccaactctctctggctggctaccccctgaactactgggtctctggacccattgtgcccagccacccccaaaagccctcaggcgagagctgcctgaggaggcaccgctgaggaggaaaggagaaagattgaagttccaagtgagattgagagatctccctagaggcagctgaagaggagaagtcccgcatcagcctcatcccaccagaagaacggtggtaagcggccaggctccgtggragccagggcccamagcccttggccagktkgtggaaacagctgctgggatgggtatgccccttgtcactgtcacagctgccaccttccctactctctcatgtcctcctagggcctggcctgaggtggaggcgccagaagctcctgcattgcccgtggtgcctgaactccctgaggtgcccatggagatgcctttggtgctgcccccagagctcgagctgctctcactggaagcagtgcacaggtaccaggraggtggcaccttgatggggtggacccgggctgaagcctctgctaatggttcttgatccctatagggcagtggcactggagytgcaggctaacagggagcccgacttcagcagcctggtgtcamctctcagcccccgcaggatggctgcccgggtcttctamctgctcctgggtgartgtatgcatgtgtgtgtgtgtatgtkgggcagggacacagagaccagaggcccgtacagggactcccccgacctgccctctcctcgcctcttgaccagtgctctcagcgcaacagattcttcacgtgaaacaagaaaagccatatggtcgcctcctgatccagccggggcccagattccactgaggttagagtccatttacaaagctgccaggaaaccggccacttctagtaaaccacgtcgtgcctcactgaaaaaaaaaaaaaaagg

SEQ ID NO: 329 - DNA, 1134 bp, Homo sapiens
  misc_feature (1)..(1): n equals a,t,g, or c
  misc_feature (1134)..(1134): n equals a,t,g, or c
ncgccccggactcttctcagttgagagtgcggttcctgggcaggtttccacaccagttcctttccgcgtccttcggccctggctctggctgcctggcggaggtggggtagcatttgtcatttgcacactgctggctttatctttggggctgcaccccgaggcaacaaatgcaggatgctctgtcacccacatgtccaccaccatctggtttgccttttggctactttgactttctccttaaatgcttcctgtgctgagcaaacattccacagccagcagagcaatggagagttcatggccactcttcccagtatcagcaagcaatttggggtgatcgtttggaagcctcagaggaaagatgtcatcaggcttcctgtggctttgtccttcagcagtggggctcggcttgctttcacctgccttaggaagatttctggcttccgagctctgatatggggagaagataagggctgggatctttgagtctgcccctagctgggtatgtgcgtccggtgtgcgggccttggagtttttggtaatgactcacttgtgctctttctgggatctgtctccctcccacatgaccccgtggggtccctgaatgactgttttagagtacccatgtgggttccctgagtcacagcaggggatgtttaataaggaggttagcactgagcttggggacgtgctgtcacaccagcaggacgctgcaggaaggagcaggctacttcctttcttgacgtgcaaataactcgtataggctaatcaacaggcttataagttaaaagggctaccgctcggccccttggggattccatcccctcctctgtaacttggagatgtttgtttctgctgcagactcagagggttgcgatgaagagtggtgggactgagttgagaagcttatcccttcgctgggtgggaggtttctaattgccccgttctttgggggatccttaagtccagcttccaggtgggggcagcgataggaccaagttctcctagtagtctctgggaagccacttgagggaagctgccggtcatcccatgcacccattggtcttctccagcaggccctgtaggtcgtccatgttccatgccttctgggttcttgggggagaaggaagctgttgn

SEQ ID NO: 330 - DNA, 1991 bp, Homo sapiens
  misc_feature (300)..(300): n equals a,t,g, or c
  misc_feature (353)..(353): n equals a,t,g, or c
gcgacgctcggcccgaagatggcggccgaatggggcggaggagtgggttactcgggctcaggcccggccggagccggtggcgctggagcgggtctgtgtgggtccgaagcgttttactcctgttgggcgggctccgggccagcgccacatctactcccgtctccttgggcagttcccctccctgccggcaccacgtcccctctgacactgaggtcataaataaagttcatcttaaggcaaatcatgtggtcaagagagatgttgatgagcatttaagaatcaagactgtctatgataaantgktgaasagttgctccctgagaaaaagaatcttgtaaagaacaagcttctcncacawgcgatttcttatttagagaagacttttcaggtccgtcgacctgcgggcactatcttacttagcagacaatgtgcaacaaaccaatacctccggaaggaaaacgatcctcacaggtactgcaccggggagtgtgccgcacacacaaagtgcggccccgttattgttcctgaggaacatctccagcaatgccgggtctaccgtgggggtaagtggcctcatggagcagtgggtgtgccagaccaagaaggcatctcagatgcagactttgttctttacgttggtgctctggccaccgagagatgcagccatgaaaacatcatctcttatgcagcctattgtcagcaggaagcaaacatggacaggccaatagcaggatatgctaacctgtgtccaaatatgatctctacccagcctcaggagtttgttgggatgctgtccacagtgaaacatgaggttattcatgccctgggtttctctgctgggctgtttgcattctaccatgataaagatggaaatcctctcacttcaagatttgcagatggcctyccaccttttaattatagtctgggattatatcaatggagtgataaagtagttcgaaaagtgragagattatgggatgttcgagataataagatagttcgtcacactgtgtatctcctggtaacgcctcgtgttgttgaggaagcacgaaaacattttgattgtccagttctagagggaatggaacttgaaaatcaaggtggtgtgggcactgagctcaaccattgggaaaaaaggttattagagaatgaagcgatgactggttctcacactcagaatcgagtactctctcgaatcactctggcattaatggaggacactggctggtataaagcaaattacagcatggctgagaagttagactggggccgaggaatgggctgtgactttgtcaggaagagctgtaaattctggattgatcagcagagacaaaagagacagatgctgagcccttactgtgacacgctcagaagtaacccactgcagctaacttgcagacaggaccagagagcagttgccgtgtgtaatttgcagaagttccctaagcctttaccacaggaataccagtactttgatgaactcagtggaatacctgcagaagatttgccttattatggtggctccgtggaaattgctgactactgscctttcagtcaggaattcagttggcatttaagtggtgaatatcagcgcagctcagattgtagaatattggaaaatcaaccagaaatttttaagaactatggcgctgaaaagtatggacctcattccgtttgtctaattcagaaatcagcattcgttatggagaagtgtgagaggaagctgagttacccagactggggaagcggatgctatcaggtttcttgttctcctcaaggtctgaaagtttgggtccaagatacttcatatttgtgtagtcgggctgggcaggtcctccctgtcagtatccagatgaatggctggattcacgatggaaacctgctctgcccatcatgttgggacttctgtgagctctgtcctccagaaacagatcctccagccactaacctgacccgagctctgccacttgatctttgttcctgttcctcga

SEQ ID NO: 331 - DNA, 2398 bp, Homo sapiens
  misc_feature (1874)..(1874): n equals a,t,g, or c
attgcttagtttgatgtgtcttgctttaaatccatttatttcaacaagcttaaagagatttttttttaatggagatgatttaattttaacaatctgtgattttctctgaatcgaacttgtgttttggcacctttcaatctgtggtaacaaatgacaagaagggtgcaattcttccttcccttgtgcagggattttgcctccccctttctcccagatgaaagatatttgggtctctagaataactgtggtacagttagctccagagtgttttctttctggaggcagtttagacaacagcctcaagtagtgcttttgttaaaaatatacatgtttttaaaagtgcttgtatttctaatattcttttctcctttctcttctagtctgttctctggggaggcagtaaggggccgtggagctggcctcggcctcggcatcgggagaggctggacttcctgtctctctgtgctgaatggctgcgatggcgcccgctctcactgacgcagcagctgaagcacaccatatccggttcaaactggctcccccatcctctaccttgtcccctgggcagtgccgaaaataacggcaacgccaacatccttattgctgccaacggaaccaaaagaaaagccattgctgcagaggatcccagcctagatttccgaaataatcctaccaaggaagacttgggaaagctgcaaccactggtggcatcttatctctgctctgatgtaacatctgttccctcaaaggagtctttgaagttgcaaggggtcttcagcaagcagacagtccttaaatctcatcctctcttatctcagtcctatgaactccgagctgagctgttggggagacagccagttttggagttttcyttagaaaatcttagaaccatgaatacgagtggtcagacagctctgccacaagcacctgtaaatgggttggctaagaaattgactaaaagttcaacacattctgatcatgacaattccacttccctcaatgggggaaaacgggctctcacttcatctgctcttcatgggggtgaaatgggaggatctgaatctggggacttgaaggggggtatgmccaattgcactcttccacatagaagccttgatgtagaacacacaattttgtatagcaataatagcactgcaaacaaatcytctgtcaattccatggaacagccggcacttcaaggaagcagtagattatcacctggtacagactccagctctaacttggggggtgtcaaattggagggtaaaaagtctcccctgtcttccattcttttcagtgctttagattctgacacaaggataacagctttactgcggcgacaggctgacaytgagagccgtgcccgcagattacaaaagcgcttacaggttgtgcaagccaagcaggttgagaggcatatacaacatcagctgggtggatttttggagaagactttgagcaaactgccaaacttggaatcsttgagaccacggagccagttgatgctgactcgaaaggctgaagctgccttgagaaaagctgccagtgagaccaccacttcagagggacttagcaactttctgaaaagcaattcaatttcagaagaattggagagatttacagctagtggcatagccaacttgaggtgcagtgaacaggcatttgattcagatgtcactgacagtagttcaggaggggagtctgatattgaagaggaagaactgaccagagctgatcccgagcagcgtcatgtacccctgtgagtagacctcatgcatgatagcattcttgagaaatgttggcacaaggaagaatgaatgaatcgccattatggagagaatgtgttstttgtacataggtgtytagttcygttngttttttccctgatgttgggtagatgagtgcatatacatgctagtgaagaaggggaagatactttgctgtagggttgtattgttgtagtctaaatggtggtaatttccttttgaagtctaagaaaaataactaggagacatcttatgtgtaaaattgtactagtacctctttaagagtgaatttagatttcttttgaaactatatataggacatgataagttaatggcctgattgttgagattttgttgtttccagtaagcagggacaaatgctgagttgacctagttacctttgtaggaaattacagttgcttttgattgaactttcagcagagagcacacccagtcttcaattttaacacttgagattttcttacattttaaggactgacaattagaaaatgcttcagaatatttaatacatcgcctccaagcacagtctagtttcacaacctgactctcttcctattaaaaaaaaaaaaaaaaaactcgrgggggggcccgtacccaatcgcccctcatga

SEQ ID NO: 332 - DNA, 1505 bp, Homo sapiens
gcaccatggccacgcccctggaggatgttggcaagcaggtgggtaggtcttgtctgcttcctgtggccctgatgggtccctgcagagcctcacgctgcttgtcgctccttgtcctcttccctccaggtgtggcggggcgccctgctcctggcagactacatcctgttccgacaggacctcttccgaggatgtacagcgctggagctcggggccggcacggggctcactagcatcatcgcagccaccatggcacggaccgtttattgtacaggtaatgaggtgacatctcaggctgcagggaagtagtcaccttcacaaagcatgcactgactgtataaaaaaagaggcagaggcaatggaaattggatgttagctgctgttgattttgccatcctggtcccctggccctctccactctccattttttctcagtgacatcaaaatgacccagcaatacgcactcagcagcagcagcgtcacccagtggctataaggccattgagcttcaggaggtgcctagcgcccctgctggtacctctctccccactcctgagaaagagcaaatatctccaaaaacaggaggaatatacccttttagaagcctttgaaagcaagtttattatttttttcctgggtatagaagccttgcccattctttgtaggaggtttttaaaacagtacataaaaattactcataattttacaatccctagattgaatcaacaatatgcaacttatgggtcacctcccgtgtgccactcatttctagatgtaggaggccctgcggtgaatggagctgactaggcactgccctcagggcgcttacgttgtaagaatctcctccaaatgatagctgaaatcaagctgcagcagcactgtattctgctgaaaatgttgaaaaacatttttaagagcattttcttttttaaatatgtatatatttagggggtacaagtgcgggtttctgatgtgcagctatattgcagtgatgacatccgtctgggcttttagtggaccttccactcaaatagtgracattgtacccaatagggaagctttaatcccccacccctyccaccgtgtcaccttytggaatccccagtgtctgtgtttccactcagtatgtccatgtttacccattgtttagctcccactcataagtgagaacattttaagagcattttctcatgccattaaaaaattattatataggccaggtgcggtggctgacatctgtaatcccagccctttgggaggctgaggcaggcagatcacctgaggtcaggagtttgagaacagccaggccaacatggtgaaaccctgtctgtactaaaaatacaagaattaaccagatgtggtagcggcgggcacctgtaattccagctacttgggaggcttgaacctgggaggcagaggttgcagtgagctgagattgcaccactgcactccagtctgggccacagagtgagactctgtctcaaaaaaaaaaaaaaaaaaaactcgag

SEQ ID NO: 333 - DNA, 1193 bp, Homo sapiens
cagccccgccttctctacacaggaaagctcagtggcccccaagccaggatgtcccaagcttgggtccccggcctcgcgcccaccttgctgttcagcctgctggctggcccccaaaagattgcagccaaatgtggtctcatccttgcctgccccaaaggattcaaatgctgtggtgacagctgctgccaggagaacgagctcttccctggccccgtgaggatcttcgtcatcatcttcctggtcatcctgtccgtcttttgcatctgtggcctggctaagtgcttctgtcgcaactgcagagagccggagccagacagcccagtggattgccgggggcccctggaactgccctccatcatccccccagagagggtcagagtatccctttctgcgcccccacccccctacagtgaggtgattctgaagcccagcctgggcccaactcccacagagccaccccctccctacagcttcaggcctgaagaatataccggggatcagaggggcattgacaacccggccttctgagtcacctcctgcctggaatcttgccatcagcaacctcctccccagtgcctcctggatcaagctagagactgctggcaccccaggaatgtccctgcccatcctgccgtgtctctgttcattcttggatttaacttattactttttctgcttctgtttccaccccagctgcctctcttgtcctgagggttaggctggagtgacagtttccgcccaccccccagcccaagaaagaggctgccggaaagaaaatgctgaccattggaggtgcccaacagtagaatgggctactgtgaggggtagtaagagccccatttctggaggtatgcaaatcttgactggacagccagctctgagattttatcagggcacttctatacctgtgggacattggactggatgagccctgagccagcttccactcctacctgaatagagaactcactgcacccacccacaacacatgataaacacatgtcctcactgaatgttactgattgcggctgagggcctgcctctggctgtgtggggaggtgggtggagaggtgagcccaggcactgctgaggggtgcggtgatggggtcgctgcgccgcaatcccaccactgatgagccacctgggaggtctgggaggccagtccatccatgggccgccctcggagagaggct

SEQ ID NO: 334 - DNA, 868 bp, Homo sapiens
gactgactatagggaaagctggtacgcctgcaggtaccggtccggaattccgggtcgacccacgcgtccgctgaatttaggagactttttacccaggggcaaaaggctcttagggtaatgagatggatggtggcccaggtgcattttccagggcctgggttctccagatcccgtggcttctgttgagtggaggcaactttgctctgtgtgaacctcgcccctgtccctctgccgggcacccctggcaggaagcaggactcccatcctcaccctgacttagactgtcctctgagtcagctcctctccaagacaggagtgggcagccctgggcagtcttctggccccttgctaaagtgagggscaggaagctggggctgccctccagaaagccggggtaggractctgaaaaatacctcctctaaacggaagcagggytctccagttccacttggcgccccctcccacaaggcccttcctccctgaggaccccacccccctaccccttccccagcagcctttggaccctcacctctctccggtgtccgtgggtcctcagcccagggtgagctgcagtcaggcgggatgggacgggcaggccagaggtcagccagctcctagcagagaagagccagccagaccccaaccctgtctcttgtccatgccctttgtgatttcagtcttggtagacttgtatttggagttttgtgcttcaaagtttttgtttttgtttgtttggtttttgttttgagggggtggggggggatacagagcagctgatcaatttgtatttatttattttaacattttactaaataaagccaaataaagcctcaaaaaaaaaaaaaaaaaaaaaaaaagggcggccgc

SEQ ID NO: 335 - DNA, 853 bp, Homo sapiens
  misc_feature (1)..(1): n equals a,t,g, or c
  misc_feature (75)..(75): n equals a,t,g, or c
naaggcaaatttcttcctcagtcgtgtggcaggccctgagcaggcagctgggtgtccccgctcagatccaggccncgaatgggctgggcgggttgcagaagccatcacctgagctacccagggtgggatccctggccccgacctctgtcctgacacgccccaagcggcagcaacaaagccccaattggcctgggcctgggcaggaggagctgggccgggtgccagatactgggatcagccactgcagctccctgagcactctctacagagacgcggaccccagacatgaggaggctcctcctggtcaccagcctggtggttgtgctgctgtgggaggcaggtgcagtcccagcacccaaggtccctatcaagatgcaagtcaaacactggccctcagagcaggacccagagaaggcctggggcgcccgtgtggtggagcctccggagaaggacgaccagctggtggtgctgttccctgtccagaagccgaaactcttgaccaccgaggagaagccacgaggtcagggcaggggccccatccttccaggcaccaaggcctggatggagaccgaggacaccctgggccgtgtcctgagtcccgagcccgaccatgacagcctgtaccaccctccgcctgaggaggaccagggcgaggagaggccccggttgtgggtgatgccaaatcaccaggtgctcctgggaccggaggaagaccaagaccacatctaccacccccagtagggctccaggggccatcactgcccccgccctgtcccaaggcccaggctgttgggactgggaccctccctaccctgccccagctagacaaataaaccccagcaggccgggttat

SEQ ID NO: 336 - DNA, 2561 bp, Homo sapiens
cccgagaggcccggttcctttaggccgcctgcccgcctccagctctcggggtcggctccaggaggcgccctcaggagaggggcgggcgctctattccagagaccgagtggcagggcggccactgtggcggggctctttccccgtttcgcctcagctacccctcagctccggtagtcgccagtccggggtcgtcgccgtttggggcgggagctgctcggccccgccgccgtccccgtcgccgcttccgggtccaggcccctcgggccgcctgccgccgtcatgaggctgcgggtgcggcttctgaagcggacctggccgctggaggtgcccgagacggagccgacgctggggcatttgcgctcgcacctgaggcagtccctgctgtgcacctgggggtacagttctaatacccgatttacaattacattgaactacaaggatcccctcactggagatgaagagaccttggcttcatatgggattgtttctggggacttgatatgtttgattcttcaagatgacattccagcgcctaatataccttcatccacagattcagagcattcttcactccagaataatgagcaaccctctttggccaccagctccaatcagactagcatgcaggatgaacaaccaagtgattcattccaaggacaggcagcccagtctggtgtttggaatgacgacagtatgttagggcctagtcaaaattttgaagctgagtcaattcaagataatgcgcatatggcagagggcacaggtttctatccctcagaacccatgctctgtagtgaatcggtggaagggcaagtgccacattcattagagaccttgtatcaatcagctgactgttctgatgccaatgatgccttgatagtgttgatacatcttctcatgttggagtcaggttacatacctcagggcaccgaagccaaagcactgtccatgccggagaagtggaagttgagcggggtgtataagctgcagtacatgcatcctctctgcgagggcagctccgctactctcacctgtgtgcctttgggaaacctgattgttgtaaatgctacactaaaaatcaacaatgagattagaagtgtgaaaagattgcagctgctaccagaatcttttatttgcaaagagaaactaggggaaaatgtagccaacatatacaaagatcttcagaaactctctcgcctctttaaagaccagctggtgtatcctcttctggcttttacccgacaagcactgaacctaccagatgtatttgggttggtcgtcctcccattggaactgaaactacggatcttccgacttctggatgttcgttccgtcttgtctttgtctgcggtttgtcgtgacctctttactgcttcaaatgacccactcctgtggaggtttttatatctgcgtgattttcgagacaatactgtcagagttcaagacacagattggaaagaactgtacaggaagaggcacatacaaagaaaagaatccccgaaagggcggtttgtgatgctcctgccatcgtcaactcacaccattccattctatcccaaccccttgcaccctaggccatttcctagctcccgccttcctccaggaattatcgggggtgaatatgaccaaagaccaacacttccctatgttggagacccaatcagttcactcattcctggtcctggggagacgcccagccagtttcctccactgagaccacgctttgatccagttggcccacttccaggacctaaccccatcttgccagggcgaggcggccccaatgacagatttccctttagacccagcaggggtcggccaactgatggccggctgtcattcatgtgattgatttgtaatttcatttctggagctccatttgtttttgtttctaaactacagatgtcaactccttggggtgctgatctcgagtgttattttctgattgtggtgttgagagttgcactcccagaaaccttttaagagatacatttatagccctaggggtggtatgacccaaaggttcctctgtgacaaggttggccttgggaatagttggctgccaatctccctgctcttggttctcctctagattgaagtttgttttctgatgctgttcttaccagattaaaaaaaagtgtaaattacattggtggtcttgacttttattacagaaagatatgtagtaaatattcagaacagatacacaatgttacttggacatttcagaattatcagagaacatagcataggcagataatttttgtaagggttttctgtttgtttgttttttttttttttagcagcgctctgtcttctaataaaggcctgatttatgaaatgaatgaaaacagagctagtttggttgaactggacttggggtgggtgctttggctacacacctactcaaatccacctcttctctcgacttctctctctctgcagctctttcttgggttctgtggtggaactttctgggctgtgaagcaatgctgttgaaaggccatttggtattagggactcctgtttgtggctcctgggatgaggtggttatgattttg

SEQ ID NO: 337 - DNA, 1502 bp, Homo sapiens
gctgattacctttatgttggtttctcttattatttgtctcttgctagatctgctaaaccaacccagcttgctcagagatctcatattgaagcaacatacaggcaatccacatctttctttccctttgaagtatagtcattggatgggatgagggacagggcctgttgggttcacagggccttgcactgcatgggcacatacttaaaagctcttgtgcatggaatccctgtctgttagccacaggcctctttagctctatacattcaaaataactactgtagtagaaaatagataagcttcagctgagttggcttttgatagtggaaaaaaaacaaaatttgactttttatggccaaaattccttgttgacagctgtgatgttctaatatgatttgggaatatgtcagtctacagaacctgcatcctgtaaaaacacctttggggtagacgataaaagtcatttttaaggcaaatacttaccatgtgactttttattaccaaatgcatcagtagtggagctggtatgttgtttcataggatggaaacattagaagtccagagaaaaataaattttaaaaaaaggtggaaaagttacggcaaacctgagatttcagcataaaatctttagtatgaagtgagagaaagaagagggaggctggttctgttgctcgtatcaataggttatctgtgtccctcatcttggtgttacagtgttatttctgtcagtattatgaatatgtggttgacccatcctgtcaaatgtaccaacattttcgaaagaattcattcaaatctcttatgccaacagaaaagttccttcttgtttaatatctctttacctcagtcctacattttgattctctggaggagattttagcttgtcttaaaaagccaaatttggagtcatcaagcctgctgaacctgatggggcagctttttgaacagctttctggaagtaagaacttcagttgaaaagccctttgatcgcttcagcccgggacatgcccttcagatggcttattctcagtaaagctttatgtagactgtgacactgtatatgtgtgactcgtacaactttgacgtgtttctgaagtggtttaatcgtatttgttattagcttctttgtggaaatgcaatttttatactaaaaacattgcttatttgcaatgcaatatgttataaatttgttgtttatattactggtattagtcttagcctaatgaacctaattatttttctttctgtattctttgcttcctcaaatagcatctgcagcaattggaatgagaaatccagatatgtgtttcaagtagtacattgcctgaatcacaaatcacttgatcacagtattgtatataatccctgatcctatttgtttcattttattgtaaattcccatttgcatcaaaacctaatgatagtgattggtaagtaaaaacaaatggtgtattgcttttcataaaaaaaaaaaaaaaaaaaaaaaaaaaaaaaaaaaactcgag

SEQ ID NO: 338 - DNA, 3308 bp, Homo sapiens
ccacgcgtccggcccagggctgtctgtctccaaagcccaaccataactcacatccccattccagctcctctgggtgagtctgttccccctcagcctcactttccttatcctgtcaaatgaaggatttggaatgacttaagttattcaagcaacaaacacttactgaattgtcttgccacttccagggtgacattatggagttctgtgattctgcaagaggccagaggggacaaggtcaagtgggtgttcacctggcccctcatcttcctcctgtgcgtcaccattcccaactgcagcaagccccgctgggagaagttcttcatggtcaccttcatcaccgccacgctgtggatcgctgtgttctcctacatcatggtgtggctggtgactattatcggatacacacttgggatcccggatgtcatcatgggcattactttcctggcagcaggacaagtgtccagactgcatggccagcctaattgtggcgagacaaggccttggggacatggcagtctccaacaccatagaagcaacgtgtttgacatcctggtaggacttggtgtaccgtggggcctgcagaccatggttgttaattatggatcaacagtgaagatcaacagccgggggctggtctattccgtggtcctgttgctgggctctgtcgctctcaccgtcctcggcatccacctaaacaagtggcgactggaccggaagctgggtgtctacgtgctggttctctacgccatcttcttgtgcttctccataatgatagagtttaacgtctttaccttcgtcaacttgccgatgtgccgggaagacgattagcgctgagtcgcggcccctgggagctgatctggacaccctgtgacactggcgtcctcctctcccctccttcccccaccacaggtctctcctgcataggcagccactgtccgttctttcacacactggaaggaagagccatcgtggtctttgtctggccacagccaagctgctgggcatcctcctcctccttggagttccacccctgcaaggctggatttgggggccattatctgagcagcttcaaagacccctgagctgccaaccacggagatgtgccaagcatctcatctctcctgcacactttagtcagaaggacttctgcatgcagtttgtctttctgttctgcaggcagcttcagaattgaggtcatttgtgagcacaagatctcatagggcaggtgcaaaataggaatgttgttctcaagtgtcacctccagcccagaggtggttccttaggcagcatgtgctcctgggagcctctgacttttgctggaagcacccacagtttggaaggggcaagacctcaacctgttggggtttagggcccatgatggcagacattctaccccttttcctggaaaaactggaagaatgaaaataatttttttctgtggaagagagaaaatgagtgaatattcttctcacttttattgatgcattcagagaataagcaatgaaatattaaaaaatgaaacatcatataggtcatcatacttgaaaattatcattccatatgaaaggatcatgatacacaccaaaaaagtaatgatcgtaaagacacaaatcctctgtatgccatcttgcattggcactgaggtgtttggtttggaatagggaaaaagagacaggatctcgctgtgttccccaggtaggtcttgaactcctggcctcaagtgatcctcctgccttgacctcccaaagtgctggattacaagcgtgagcccctgcacccggcccaagcagttgcttctttttttctctttttttttttttttgagatggagcctcactctgttgcccaggctggagtgcagtggcgcgatctccactcactgcaagctccgcctcccgggttcatgccattctcctgcctcagcctcccgagtagctgggactacaggcgcctgccaccacacccagctaattttttgtatttttggtacagacagggtttcaccgtgttagccaggatggtcttgatctctgatctcggatccgccaccccggcctccaaagtgctggattacaagcgtgagccaccgggccccgccaagcagttgcttcttatgcaacatgttgggtgggacttgtccacgggccaggccaataaaattcttaatcctgcagagaggcagtaccctcatcaccccatcactggaaaacaaatgtttaagctatcaagagagggaatgtgcagcttggttctagatgcatggtttggaggatctacctttggcctaaagggaatgtcccaaacaacagagccttctttgctgtcactccagaattctctacacagaatttcccaagtccattcaggacagacgcgcagtcctctttcaatggaagaagagaggacttttcccctcctgaaaaatgactggagtgtgaacaaggcagctctgtttttctaaataagttgttcttgtgagttttttctggccactgggcatctctgccctcacttttcatccctgccctctaagctgcagaccccatgaccacactgtctgcttccttgagcttcccgcacgaggcttgcacctgggggacctggagaccctgcggacagaactgtggctgagccactgtggccaactcttggggagctccacagtgggggttgctggtctgtgaggctgagtctccatttcagagcacacactccctggcagggcgcctccgcctgtgtctcctgcccagcagccgccagcagggaatagttgctggtgtctgagcacaaagagagctttgattacctagagaggaaaaaggctgtcagccagatgcagccaggcccaggggtagatacaggagttgctaaggaaggggccgagccaggagaggccaggcagatccacaaagcccaaggggatgcaggctgggtgtggtttctgagggaacctaccaaatagcaggtagatggaatcagaggactcttgtgtcctgaaagaacctccttaaaaacaactaaaaccaagaacttctggggctgttcacacattgttcaagtcaccccaagatcgttctggcacgctgagctgaacaccaccatctttgttcattctctctctaatgggcaaagcaggatcatcgagttgaaaagttgtaaataatgaggatatttatcccgctatttattttttcaataactgtgacctcctgcactgtgaatgctctgtgacatgagattcttagtttaataaaactgtcattaaatttgaaaaaaaaaaaaaaaaaaaaaaaaaaaaaaaaaaaaaa

SEQ ID NO: 339 - DNA, 2950 bp, Homo sapiens
cccggctcccgcccgctcccagccgggccccccagcggtcggcgggacggctcccggctgcagtctgcccgcccgccccgcgcgggggccgagtcgcgaagcgcgcctgcgacccggcgtccgggcgcgctggagaggacgcgaggagccatgaggcgccagctgcgaaggtggcggcgctgctgctcgggctgctcttggagtgcacagaagccaaaaagcattgctggtatttcgaaggactctatccaacctattatatatgccgctcctacgaggactgctgtggctccaggtgctgtgtgcgggccctctccatacagaggctgtggtacttctggttccttctgatgatgggcgtgcttttctgctgcggagccggcttcttcatccggaggcgcatgtaccccccgccgctgatcgaggagccagccttcaatgtgtcctacaccaggcagcccccaaatcccggcccaggagcccagcagccggggccgccctattacacygacccaggaggaccggggatgaaccctgtcgggaattccatggcaatggctttccaggtcccacccaactcaccccaggggagtgtggcctgcccgccccctccagcctactgcaacacgcctccgcccccgtacgaacaggtagtgaaggccaagtagtggggtgcccacgtgcaagaggagagacaggagagggcctttccctggcctttctgtcttcgttgatgttcacttccaggaacggtctcgtgggctgctaagggcagttcctctgatatcctcacagcaagcacagctctctttcaggctttccatggagtacaatatatgaactcacactttgtctcctctgttgcttctgtttctgacgcatctgtgctctcacatggtagtgtggtgacagtccccgagggctgacgtccttacggtggcgtgaccagatctacaggagagagactgagaggaagaaggcagtgctggaggtgcaggtggcatgtagaggggccaggccgagcatcccaggcaagcatccttctgcccgggtattaataggaagccccatgccgggcggctcagccgatgaagcagcagccgactgagctgagcccagcaggtcatctgctccagcctgtcctctcgtcagccttcctcttccagaagctgttggagagacattcaggagagagcaagccccttgtcatgtttctgtctctgttcatatcctaaagatagacttctcctgcaccgccaggaaagggtagcacgtgcagctctcaccgcagatggggcctagaatcaggcttgcttggaggcctgacagtgatctgacatccactaagcaaatttatttaaattcatgggaaatcacttcctgccccaaactgagacattgcattttgtgagctcttggtctgatttggagaaaggactgttacccatttttttggtgtgtttatggaagtgcatgtagagcgtcctgccctttgaaatcagactgggtgtgtgtcttccctggacatcactgcctctccagggcattctcaggcccgggggtctccttccctcaggcagctccagtggtgggttctgaagggtgctttcaaaacggggcacatctggctgggaagtcacatggactcttccagggagagagaccagctgaggcgtctctctctgaggttgtgttgggtctaagcgggtgtgtgctgggctccaaggaggaggagcttgctgggaaaagacaggagaagtactgactcaactgcactgaccatgttgtcataattagaataaagaagaagtggtcggaaatgcacattcctggataggaatcacagctcaccccaggatctcacaggtagtctcctgagtagttgacggctagcggggagctagttccgccgcatagttatagtgttgatgtgtgaacgctgacctgtcctgtgtgctaagagctatgcagcttagctgaggcgcctagattactagatgtgctgtatcacggggaatgaggtgggggtgcttattttttaatgaactaatcagagcctcttgagaaattgttactcattgaactggagcatcaagacatctcatggaagtggatacggagtgatttggtgtccatgcttttcactctgaggacatttaatcggagaacctcctggggaattttgtgggagacacttgggaacaaaacagacaccctgggaatgcagttgcaagcacagatgctgccaccagtgtctctgaccaccctggtgtgactgctgactgccagcgtggtacctcccatgctgcaggcctccatctaaatgagacaacaaagcacaatgttcactgtttacaaccaagacaactgcgtgggtccaaacactcctcttcctccaggtcatttgttttgcatttttaatgtctttattttttgtaatgaaaaagcacactaagctgcccctggaatcgggtgcagctgaataggcacccaaaagtccgtgactaaatttcgtttgtctttttgatagcaaattatgttaagagacagtgatggctagggctcaacaattttgtattcccatgtttgtgtgagacagagtttgttttcccttgaacttggttagaattgtgctactgtgaacgctgatcctgcatatggaagtcccrcttcggtgacatttcctggccattcttgtttccattgtgtggatggtgggttgtgcccacttcctggagtgagacagctcctggtgtgtagaattcccggagcgtccgtggttcagagtaaacttgaagcagatctgtgcatgcttttcctctgcaacaattggctcgtttctcttttttgttctcttttgataggatcctgtttcctatgtgtgcaaaataaaaataaatttgggcaaaaaaaaaaaaaaaaaaaaaaaaaaaaaaaaaaaaaaaaaaag

SEQ ID NO: 340 - DNA, 1769 bp, Homo sapiens
agaaaaattgcagggacccaccccagacttgtgagtgcgagtgaagcaggagcagccctggccatcactgtttctttgacgtgtacatcccatcctgagatgcagctgggctgggagccgccacctgggtggatctgattcctggatttccccatcctggggasaggtgacccatcctgttctcctccttaggtccatgtgaaatctgargtccttgctgtcaagttgtcacaagaaataaactacgcaaagagcctctactatgaacagcagcttatgttaagactcagcgaaaaccgagagcagctggagctggactcctgaagccccgctgctgagatgggcgctcccgacacagcgcagacccaccaggaggaaagaggcccagctctcagctgacgatggaggcagaaccggagtcgggtttggggaagttgtcaaggaatgagggaaagtaaatcctcatgaggaaaagtacaaatggaaatcgtattaatttgtgaggcagggagttattttagattatgggaaataatttttaaaggtattggttaaataacgtttaaaaacatgtactgagatgaatctaatttttagattgccctgtattttgttaacatgtatatatgtacaacagtgtgtttgtaaatatataggaacgtttctgaacagggtctgtgctatgtgtaaaggtttgttaactgtaaagtaatataaagttatattggatcttctattgcactaattctagatgtctaattcaggatactgtctatagaaaggcattcttaaaagttaaagaatgttacgtcttagttttggagactaaagtattcccagtaaagtgggttgaggtgagggctgtggtcctgaaagggacgcctttgacatcgtggctgtccagttgggctgtgagctgtggcacccaggactggcgctggcccttcagaaggatctaggagaggggcttgggagcccacttttaatttctcacccccattttacaaagagtgcttagattcttacaaattatgatgtaagttatccatttggctttttcctaactagtcttaccaaacttagggggaaacctgtgctccattaccacatgggtgcaagtcagcattgtaagttttctcaggttattattattagagaggttggaaacattggtaaactctgttgattgagaaggaaaaaaaaagtcccattgaactgttgcaacaaatcagaaatccacataaaagtgctctcctgcctgggcagcaacaaccaagaacaaagccccgggactgttttctttttaataaagccacaggcaggcatcgtagctccacagcccgaggggacacaggatggaaaccccaggatgagaagggagcagggagagttccagaaagggggatgaaataggagtattaaaaagctgcgttggtaagtttttcatggaaccaagatttgacaaaggcatctcttatccttggttttaaattcctgctgggagcaaggcctggtatgagcgccctgggtcttgtttttggtgtttcgcttttctgtaaggattaagcagatagggagaagggaaaaggggcctcactttagaatgaatgagtcaccttgtgatttttaaatttttattttaataaagctaatcaatttctaaaaaaaaaaaaaaaaaaaaaaaaaagggcggccgctctagaggatccctcgaggggcccaagcttaccgtgcatgcgacggtatagctctctcctatagtgagccta

SEQ ID NO: 341 - DNA, 1317 bp, Homo sapiens
ccacgcgtccggacgccgccacctccggaacaagccatggtggcggctacggtggcagcggcgtggctgctcctgtgggctgcggcctgcgcgcagcaggagcaggacttctacgacttcaaggcggtcaacatccggggcaaactggtgtcgctggagaagtaccgcggatcggtgtccctggtggtgaatgtggccagcgagtgcggcttcacagaccagcactaccgagccctgcagcagctgcagcgagacctgggcccccaccacttcaacgtgctcgccttcccctgcaaccagtttggccaacaggagcctgacagcaacaaggagattgagagctttgcccgccgcacctacagtgtctcattccccatgtttagcaagattgcagtcaccggtactggtgcccatcctgccttcaagtacctggcccagacttctgggaaggagcccacctggaacttctggaagtacctagtagccccagatggaaaggtggtaggggcttgggacccaactgtgtcagtggaggaggtcagaccccagatcacagcgctcgtgaggaagctcatcctactgaagcgagaagacttataaccaccgcgtctcctcctccaccacctcatcccgcccacctgtgtggggctgaccaatgcaaactcaaatggtgcttcaaagggagagacccactgactctccttcctttactcttatgccattggtcccatcattcttgtgggggaaaaattctagtattttgattatttgaatcttacagcaacaaataggaactcctggccaatgagagctcttgaccagtgaatcaccagccgatacgaacgtcttgccaacaaaaatgtgtggcaaatagaagtatatcaagcaataatctcccacccaaggcttctgtaaactgggaccaatgattacctcatagggctgttgtgaggattaggatgaaatacctgtgaaagtgcctaggcagtgccagccaaataggaggcattcaatgaacattttttgcacataaaccaaaaaataacttgttatcaataaaaacttgcatccaacatgaatttccagccgatgataatccaggccaaaggtttagttgttgttatttcctctgtattattttcttcattacaaaagaaatgcaagttcattgtaacaatccaaacaatacctcacgatataaaataaaaatgaaagtatcctcctcaaaaaaaaaaaaaaaaaaaaaaaaaaaaaaaaaaaaaaaaaaaaaaaaaaaaaaaaaaaaaaaaaaaaaaaaaaaaaaaaaaaaaaaaaaaa

SEQ ID NO: 342 - DNA, 1677 bp, Homo sapiens
  misc_feature (537)..(537): n equals a,t,g, or c
ccccccgggtcgacccacgcgtccggactttttttattttagctattccagggggtttgaagtagtactgcattgtgattttaatttgcatttccctgatgattaatagtgataagcatattttcatataatatttaccatttatttatcttcttgtttgaaatatctgttcaagtcttatgcccattttaatgggacagtttttctgtttattattgattcatattattgacttatagtaatattttatgaattgatctctttattattatgaaatgyttctttttatttgtggtaatactcatcatcatgaaatctaatttgtctgatattattatagccacttatacttactgtatacctgattattttttccatacctttatcttcaatttatctgtatatttgaattcaaagttcatctcttgagcctgaaagtaataagcaccttgaacccggatctttatatctaaatatgattctccagtaaaatttatcagggttctctggacaagtggctgattgattgtagagcanggataagaagagtatatgctgaacctgaatcatttttgtggtgccaaaagtaaggaagtacacaaaaaaattgagaagatatcawgaaatgcacaaaaactaacctgaagtgactctyaatgaccatatctkggacaatttgagtaaaaaaataagtaacaataatggatgatatcttataagataatataaaacaaatatcaatgagtctatgatgatatagaattagaatgtataaatgggaggaaggggaaaattctttgcttaagcagaataataattaattaatataaaaagaataatggaaatggtagaaatagaaagtcaacatttggcaagcaccacagtaataattgttgcaggcaagaatcatcaatggatgctaaagtttgtgagaaaaagtttgatgagaaatgggctatttacataacctcaaaggcttttcccacaagatactgttaattacaaaggggaaaatattgagaaacatggaagacagcaccttaaccaaatgattgaagttaataccattagtaatgcaacaaatcagtatcgtgtgcctcctgatatgatgcactgagaagggcacaagcatcacctttatggtattcttgcaaaaaatgcataatctaaattcaaccatgaagaaatattagaaggatgttctatgactagtcagtactgctcaaaaatgtcaagattatgaaagacaaagaaagactaaggtactttccagatttaaagaaattaaatagacaggactactaaatgcaatatatgagtctgaattggaccctggactaaaattaggcagacagttggtgaattttgagtcaagtctgtagagtagttaatagtatttctggttttgatcatcataatatggttatttaagatgttaacatttggtggatctgggtgaaaagtatatgaggattctctcgcagtatttttgcaatttttttaaatctgaaattcttttaaaatgagaagttggctgggcacagtggctcacacctgtaatcccagcactttgaaacaccaaggcaggagactcgcttgagcccaggagtttgagaccatcctgcgtaagatggcaagactccatctctttaaaaaaaaaaaaaaaagggcggccgc

SEQ ID NO: 343 - DNA, 1604 bp, Homo sapiens
ccacgcgtccggcagacacaggcacttattcattcatctcattgaaaagctacgagttggttccttattgcctctccataatagaaaaactctttaatgagctctctttttgtttttcaaatcagatatgcaaagaagctcataacaattttttttaaaaatgcaaaacaagaatctccaattatgggagcaaaatcttcagcttctgggttcctgtctcactgaggaaatggatttgaaatggcaaggaggaaatgaggaggcaaactttcatgtctattttagttttccaatgcagtcctatttcctttggactttgtataaacaaggaaaggacagttgttagttcagttattacagataacctgtgtctttaaagtaaatgtatcttaaataagtaggactcccataaatgactacactttttcaaaatatgactccccagcttataacaagaataatagcaaacatcactttattaagcaattactatgtaaaagacacttagtgcttagcacacactggaaatattgttgactggctatattttccccagaaatcccatttctgaaagcctattacaaagaaataaaatcatcagtataacaaaggagtgtgtgtgtgtgtgggtgtgagtgtgtgtgggtgtgagtgtgtggggggtgtgagtgtgtgtgggtgtgagagtgtgtgtgtgagtgtgagtgtgtgtgtgtgtaagtgcacacacatgttgtagtattgttcatagtggcaaaaactagaaacaaagtgaatattgataacatgggcacagatgacaaattatatctccaaattatgaaacagaatccagccattaaaatcagagctttgccacgtgactaggatgaagttacaaaaagtattgttgagtgagaaaagcaggatacataggatacatggaattgagtataatatgatttctttttttttttttttgagatggagtctcgctctgtcactcaggctggagtgcagtggcacaatctcagctcactgcaacctccgcctcccggattcaagcaattctcctccctcagcctcctgagtagctgggactaccgtcacctgccaccacgccccagctaatttttgtatttttagtagagatgggctttcaccatattggtcacgctgatctcaaaatcctgacctcaggtgatccacctgcctcagcctcccaaagtgctgggattacagtcgtgagccactgcacctggccgatttcttttttaaaatgatcaaaaaaccatttatatgtgggaatatagctatatacttttattattgaattaccatggaaaaaaacatggaagagggaggccaaggcaggagaatcacttgaggcccaggagtttgagaccagcctgggcaacaaagcgagaccctcatctctactaaaaatacaaaaattacctgggcctggtgacacatgcctgtaatcccagctactcagaagactaaggcaagtgaatcgcttgaacccgagacgtggaggttgcagtgaagtgagccaagatcgcgccgttgcactccagcctggtgacagagtgagagtctttctcaaaaaaaaaaaaaaaaaa

SEQ ID NO: 344 - DNA, 1699 bp, Homo sapiens
acgcgtccgcgccaagggagcaggacggagccatggaccccgccaggaaagcaggtgcccaggccatgatctggactgcaggctggctgctgctgctgctgcttcgcggaggagcgcaggccctggagtgctacagctgcgtgcagaaagcagatgacggatgctccccgaacaagatgaagacagtgaagtgcgcgccgggcgtggacgtctgcaccgaggccgtgggggcggtggagaccatccacggacaattctcgctggcagtgcggggttgcggttcgggactccccggcaagaatgaccgcggcctggatcttcacgggcttctggcgttcatccagctgcagcaatgcgctcaggatcgctgcaacgccaagctcaacctcacctcgcgggcgctcgacccggcaggtaatgagagtgcatacccgcccaacggcgtggagtgctacagctgtgtgggcctgagccgggaggcgtgccagggtacatcgccgccggtcgtgagctgctacaacgccagcgatcatgtctacaagggctgcttcgacggcaacgtcaccttgacggcagctaatgtgactgtgtccttgcctgtccggggctgtgtccaggatgaattctgcactcgggatggagtaacaggcccagggttcacgctcagtggctcctgttgccaggggtcccgctgtaactctgacctccgcaacaagacctacttctcccctcgaatcccaccccttgtccggctgccccctccagagcccacgactgtggcctcaaccacatctgtcaccacttctacctcggccccagtgagacccacatccaccaccaaacccatgccagcgccaaccagtcagactccgagacagggagtagaacacgaggcctcccgggatgaggagcccaggttgactggaggcgccgctggccaccaggaccgcagcaattcagggcagtatcctgcaaaaggggggccccagcagccccataataaaggctgtgtggctcccacagctggattggcagcccttctgttggccgtggctgctggtgtcctactgtgagcttctccacctggaaatttccctctcacctacttctctggccctgggtacccctcttctcatcacttcctgttcccaccactggactgggctggcccagcccctgtttttccaacattccccagtatccccagcttctgctgcgctggtttgcggctttgggaaataaaataccgttgtatatattctgccaggggtgttctagctttttgaggacagctcctgtatccttctcatccttgtctctccgcttgtcctcttgtgatgttaggacagagtgagagaagtcagctgtcacggggaaggtgagagagaggatgctaagcttcctactcactttctcctagccagcctggactttggagcgtggggtgggtgggacaatggctccccactctaagcactgcctcccctactccccgcatctttggggaatcggttccccatatgtcttccttactagactgtgagctcctcgagggcagggaccgtgccttatgtctgtgtgtgatcagtttctggcacataaatgcctcaataaagatttaattactttgtaaaaaaaaaaaaaaaaaaaaaaaaaaaaaaaaaaaaaaaaaaaaaaaaaaaaaaaaaaaaaaaaaaaa

SEQ ID NO: 345 - DNA, 831 bp, Homo sapiens
  misc_feature (5)..(5): n equals a,t,g, or c
  misc_feature (10)..(11): n equals a,t,g, or c
  misc_feature (15)..(15): n equals a,t,g, or c
  misc_feature (27)..(27): n equals a,t,g, or c
catcnacggnnaccnctactataggtnaagctggtacgcctgcaggtaccggtccggaattcccgggtcgacccacgcgtccgggggaawtcccagtcgatttttccaagcagtactccgcttcctggatgtgtttgtctctcttggctgcactggcctgctctgctggagacacatgggcttcagaagttggcccagttctgagtaaaagttctccaagactgataacaacctgggagaaagttccagttggtaccaatggaggagttacagtggtgggccttgtctccagtctccttggtggtacctttgtgggcattgcatacttcctcacacagctgatttttgtgaatgatttagacatttctgccccgcagtggccaattattgcatttggtggtttagctggattactaggatcaattgtggactcatacttaggggctacaatgcagtatactgggttggatgaaagcactggcatggtggtcaacagcccaacaaataakgcaaggcacatagcagggaaacccattcttgataacaacgcagtgaatctgttttcttctgttcttattgccctcttgctcccaactgctgcttggggtttttggcccagggggtgaactttatttcatttccmcaggttgaaactgaatgggcagttcatgktaaaatcmcttttcatggaaagagctctatgtaacagcataataaaactgsctacctagcagcaaaaaaaaaaaaaaaaaaaaaaaaaaaaaaaaaaaaaaaagggcggccgctctagaggatccaagcttacgtacgcgtgcatgcgacatcatagct

SEQ ID NO: 346 - DNA, 801 bp, Homo sapiens
ggcacgagggaaggtgaggggagaaaatgcccctggaaagggttaagggccaggacaggaatggggcaggaggtgcacggatcctgctgggcactgggagcagggggcggccaaaggcagtgggtgggcaggtccatgcctcccctggccccccagctctgcagggcagtgttcctggttcctatcttgctgctgctgcaggtgaagcctctgaacgggagcccaggccccaaagatgggagccagacagagaaaacgccctctgcagaccagaatcaagaacagttcgaagagcactttgtggcctcctcagtgggtgagatgtggcaggtggtggacatggcccagcaggaagaagaccagtcgtccaagacggcagctgttcacaagcactctttccacctcagcttctgctttagtctggccagtgtcatggttttctcaggagggccattgaggcggacattcccaaatatccaactctgcttcatgctcactcactgaccctccctccctcctgggctccaggtcacaactcccaaaggagatgcaggcatggctctctgcctctgatcaccatcactgtatctcaaggttcagcagcagagataccagttgccatcagtgctaactgactgcctctccaggttcggagtttcatctcccagggccagagacagcagacccacatccttctctcccacacctctcctggttttgttcaggacagcagattagaggcaggaggcaatgacaataaaataacgataaaatcctgaaaacaaaaaaaaaaaaaaaaaa

SEQ ID NO: 347 - DNA, 1094 bp, Homo sapiens
  misc_feature (1)..(1): n equals a,t,g, or c
nacccattgagcagaaggaggccaggtgggaaagctcctgggaagagcagccagactggacactgggctgcttgagtcctgagtcacaattcagaattcctgggctccctgggtgcattctatcattccagttgaaagtttgcttccttccagtcatgtggctcttcattctactctccttggctctcatttcagatgccatggtcatggatgaaaaggtcaagagaagctttgtgctggacacggcttctgccatctgcaactacaatgcccactacaagaatcaccccaaatactggtgccgaggctatttccgtgactactgcaacatcatcgccttctcccctaacagcaccaatcatgtggccctgagggacacagggaaccagctcattgtcactatgtcctgcctgaccaaagaggacacgggctggtactggtgtggcatccagcgggactttgccagggatgacatggattttacagagctgattgtaactgacgacaaaggaaccctggccaatgacttttggtctgggaaagacctatcaggcaacaaaaccagaagctgcaaggctcccaaagttgtccgcaaggctgaccgctccaggacgtccattctcatcatttgcatactgatcacgggtttgggaatcatctctgtaatcagtcatttgaccaaaaggaggagaagtcaaaggaatagaagggtaggcaacactttgaagcccttctcgcgtgtcctgactccaaaggaaatggctcctactgaacagatgtgactgaagatttttttaatttagttcataaagtgatgctacaacagaataatcaccatgacaactggcccacacctcagagactgattctgatctcccaggaattctgaaggaccctctatccttgacaacaatcatttgcagccaggtagcaacggcggtagtcagaggagctatgatagaccacacccaagcaaggctgccctcaaataacatctcaagatcttagttcttatgcattccatcagtcagaagtgaagaagaggtggagaatctggattggggaccaggaaatcacttgtattttgttagcca

SEQ ID NO: 348 - DNA, 2709 bp, Homo sapiens
ggcacgagatttcctacaggtgaaacgccatcattaggattcactgtaacgttagtgctattaaactcactagcatttttattaatggccgttatctacactaagctatactgcaacttggaaaaagaggacctctcagaaaactcacaatctagcatgattaagcatgtcgcttggctaatcttcaccaattgcatctttttctgccctgtggcgtttttttcatttgcaccattgatcactgcaatctctatcagccccgaaataatgaagtctgttactctgatattttttccatgcctgcttgcctgaatccagtcctgtatgttttcttcaacccaaagtttaaagaagactggaagttactgaagcgacgtgttaccaagaaaagtggatcagtttcagtttccatcagtagccaaggtggttgtctggaacaggatttctactacgactgtggcatgtactcacatttgcagggcaacctgactgtttgcgactgctgcgaatcgtttcttttaacaaagccagtatcatgcaaacacttgataaaatcacacagctgtcctgcattggcagtggcttcttgccaaagacctgagggctactggtccgactgtggcacacattcggcccactctgattatgcagatgaagaagattcctttgtctcagacagttctgaccaggtgcaggcctgtggacgagcctgcttctaccagagtagaggattccctttggtgcgctatgcttacaatctaccaagagttaaagactgaactactgtgtgtgtaaccgtttcccccgtcaaccaaaatcagtgtttatagagtgaaccctattctcatctttcatctgggaagcacttctgtaatcactgcctggtgtcacttagaagaaggagaggtggcagtttatttctcaaaccagtcattttcaaagaacaggtgcctaaattataaattggtgaaaaatgcaatgtccaagcaatgtatgatctgtttgaaacaaatatatgacttgaaaaggatcttaggtgtagtagagcaatataatgttagttttttctgatccataagaagcaaatttatacctatttgtgtattaagcacaagataaagaacagctgttaatattttttaaaaattctatttttaaaatgtgattttctataactgaagaaaaatatcttgctaattttacctaatgtttcatcctttaatctcaggacaacttactgcagggccaaaaaagggactgtcccagctagacctgtgagagtatacataggcattactttattatgttttcacttgccatccttgacataagagaactataaattttgtttaagcaatttataaatctaaaacctgaagatgtttttaaaacaatattaacagctgttaggttaaaaaaatagctggacatttgttttcagtcattatacattgctttggtccaatcagtaattttttcttaagtgttttgtgattacactactagaaaaaaagtaaaaggctaattgctgtgtgggtttagtcgatttggctaaactactaactaatgtgggggtttaatagtatctgagggatttggtggcttcatgtaatgttctcattaatgaatacttcctaatatcgttggctctactaatattttccaatttgctgggatgtcacctagcaatagcttggattatatagaaagtaaactgtggtcaatacttgcatttaattagacgaaacggggagtaattatgacacgaagtacttaatgtttatttcttagtgagctggattatcttgaacctgtgctattaaatggaaatttccatacatcttccccatactattttttataaaagagcctattcaatagctcagaggttgaactctggttaaacaagataatatgttattaataaaaatagaagaagaaagaataaagcttagtcctgtgtcttttaaaaattaaaaattttacttgattccccatctatgggctttagacctattactgggtggagtcttaaagttataattgttcaatatgttttttgaacagtgtgctaaatcaatagcaaacccactgccatattagttattctgaatatactaaaaaaatccagctagattgcagtttaataattaaactgtacatactgtgcatataatgaatttttatcttatgtaaattatttttagaacacaagttgggaaatgtggcttctgttcatttcgtttaattaaagctacctcctaaactatagtggctgccagtagcagactgttaaattgtggtttatatactttttgcattgtaaatagtctttgttgtacattgtcagtgtaataaaaacagaatctttgtatatcaaaatcatgtagtttgtataaaatgtgggaaggatttatttacagtgtgttgtaattttgtaaggccaactatttacaagttttaaaaattgctatcatgtatatttacacatctgataaatattaaatcataacttggtaagaaactcctaattaaaaggttttttccaaaattcaggttattgaaaacttttcattttattcatttaaaaactagaataacagatatataaaagtgttaatctttgtgctatatggtatgaaatacaatattgtactcagtgttttgaattattaaagtttctagaaagcaaaaaaaaaaaaaaaaaaa

SEQ ID NO: 349 - DNA, 813 bp, Homo sapiens
ggcacgagatcattttctgtcccctcctatcttaggctgaccggttccctgatgtgttacctgcttctgctactgatccaaactgcagaacttctcattcatccccaaggcctccaggcagtatccaatggggaatcagctctaaaaggaaccagaccaacgttttccagccccttcattctggtgactgaggggaggaaagaatgggagggggtattcttgtctagtggatggaaaggaaacacactgtcaaattactatatctccttggttttctattacagtagaattctccagccatatttttattgtctatgggggaagttggagatggtgaccttgattagaagtgtctggagggggataaatggaggggataagatttcagttggttttggaaaatgttaaagtcttaaaataatgcgtcccatctgaagaattttttctaaaaccagagtttataaaaatatcactgatacagcctgccccctcatttccctgccacaggagatgtcttggactagagacacttgtttaataatagcttgtctctgatattcccagtagcttccctctgtgtgaggaaaggatagaaatgttcaggacatcatcatacaggctcctcatctacaaagttccagtagcagtgacgcctacacggaagacttggaactgcaaacaggctggggtcacctcagtgacatctgacgctgtccaaccagaagttcgatttttgttctgggggtgaaggaggaaacagactgtactaaaggactaaaataatttgtctatactaaaaaaaaaaaaaaaaaa

SEQ ID NO: 350 - DNA, 2288 bp, Homo sapiens
ccacgcgtccgggggctgcaaggacctgagctcagcttccgccccagccagggaagcggcaggggaaagcaccggctccaggccagcgtgggccgctctctcgctcggtgcccgccgccatgtgggccgtcctgaggttagccctgcggccgtgtgcccgcgcctctcccgccgggccgcgcgcctatcacggggactcggtggcctcgctgggcacccagccggacttgggctctgccctctaccaggagaactacaagcagatgaaagcactagtaaatcagctccatgaacgagtggagcatataaaactaggaggtggtgagaaagcccgagcacttcacatatcaagaggaaaactattgcccagagaaagaattgacaatctcatagacccagggtctccatttctggaattatcccagtttgcaggttaccagttatatgacaatgaggaggtgccaggaggtggcattattacaggcattggaagagtatcaggagtagaatgcatgattattgccaatgatgccaccgtcaaaggaggtgcctactacccagtgactgtgaaaaaacaattacgggcccaagaaattgccatgcaaacaggctcccctgcatctacttagttgattcgggaggagcatacttacctcgacaagcagatgtgtttccagatcgagaccactttggccgtacattctataatcaggcaattatgtcttctaaaaatattgcacagatcgcagtggtcatgggctcctgcaccgcaggaggagcctatgtgcctgccatggctgatgaaaacatcattgtacgcaagcagggtaccattttcttggcaggaccccccttggttaaagcggcaactggggaagaagtatctgctgaggatcttggaggtgctgatcttcattgcagaaagtctggagtaagtgaccactgggctttggatgatcatcatgcccttcacttaactaggaaggttgtgaggaatctaaattatcagaagaaattggatgtcaccattgaaccttctgaagagcctttatttcctgctgatgaattgtatggaatagttggtgctaaccttaagaggagctttgatgtccgagaggtcattgctagaatcgtggatggaagcagattcactgagttcaaagccttttatggagacacattagttacaggatttgctcgaatatttgggtacccagtaggtatcgttggaaacaacggagttctcttttctgaatctgcaaaaaagggtactcactttgtccagttatgctgccaaagaaatattcctctgctgttccttcaaaacattactggatttatggttggtagagagtatgaagctgaaggaattgccaaggatggtgccaagatggtggccgctgtggcctgtgcccaagtgcctaagataaccctcatcattgggggctcctatggagccggaaactatgggatgtgtggcagagcgtatagcccaagatttctctacatttggccaaatgctcgtatctcagtgatgggaggagagcaggcagccaatgtgttggccacgataacaaaggaccaaagagcccgggaaggaaagcagttctccagtgctgatgaagcggctttaaaagagcccatcattaagaagtttgaagaggaaggaaacccttactattccagcgcaagggtatgggatgatgggatcattgatccagcagacaccagactggtcttgggtctcagttttagtgcagccctcaacgcaccaatagagaagactgacttcggtatcttcaggatgtaactggaataaaggatgttttctgttggacatgtactgaaaattaacacatgtagtagccttaaaattttagacttctcgaacatgaggctgttacagtaatttttttaacactgtgcattgtacttttctaccttaaaaaaatcagtgaggatatttatttaatgaacatcaattccttttaaattttcttagagaaatttctctgtggctcagttttaccacccataaagcggagacagtaatttatggtatcctttctgacccacaaagtatgaaaagttctgtaatctgtaaactcagttctgtaatctgtattattgagatgattaatataaagttgtattttcactgaaaaaaaaaaaaaaaaaaaaaaaaaaaaaaaaaaaaaaaaaaaaaaaaaaaaaaaaaaaaaaaaaaaaaaaaaaaaaaaaaaaaaaaaaaaaaaaaaaaaaaaaaaaaaaaaaaaaaaaaaaaaaaa

SEQ ID NO: 351 - DNA, 3758 bp, Homo sapiens
ccacgcgtccgctttttctcaggatgaatattttcctggccgactcattgatccttggtacaaataaacttctggaagacccagagagaggaaaacacaggagaaattgagcgatgtacgtacatcaaataccactactcctcagcaaccatccccaggaacctcactttcaatatcacgaagaccatccgtcaggatgagtggcatgccctacacctgcgcagaatgacggctggcttcatgggcatggcggtggccatcatcctctttggctggatcatcggcgtgctgggctgctgctgggaccgaggccttatgcagtacgtggcaggctgctcttcctcatgggagggaaaacagtggaattaaagagtgtctgccccagcccggcagggtgaagtaggatggggaaaacgttctcaccagaccctgggacttctatgctgcagcatcgtgacctgaggggtggatgcagttgccacagctctttgaggcaaaggccccgatgctctgtggacagcctcaggcttgggatggatttggcagtgaggaacttattgtaacagaagaaagtcatccaagatgcctgaggaaagaaaccttcaattgagccagccggctggaaaatgtggccaagaaaaccgcagagaccaatgttcggaggagaaaaccagaaagaggggcctgcctggcccctttgatcctttatggccgattccgtggacattgctgctcctcacgccggcagccctctcttgagtacctcaattgcagtctccagaccctcaccccgcaggcattcctgggtcggtgtcccagtcggtcacagtcatggatcctctgcagagcagtagaaagtcgggaggggcccgtgcccatggtcaggaaaggagcggcaggaggaaagaggagcatgagaactcagaagaaattgtacctactcagaaggtggagtgaggatagacgttcccagattcaaaggcatcatgaagtgtcatgacaagatagaaaagactttgggctggccaagaaggaactggataaaattatgagtgaggtacagcaggtgggaacagtgtcactgaaccctatcaacagcagagcatgagaacgtgaattcctgctgctggggaggcaatgaaatgatatgggccttcagatgtctatgaatcctgacccaccgtgggtgccagttttcaagagggcttcccatcaaatattgtgcgcaaaggatggatggatgaaaggaagagtgagccaataaacgagggaacgccgggaaaggcagcctcaagccggtgggccctggcacccccaccgtccctgagcatcgagccggttcccgccccggcccgaactggcccgcgcgcgctcgcagccccgcggcggaacccgagggcggcggcagcggttccttgaacgagccggggaatctggagggagcacacaggaaaggcagagccgcgagctggaccagcggcaaatctctagaagatgacgggttctttaaaacgcttcgaaatcactggaagaaaactacagctgggctctgcctgctgacctggggaggccattggctctatggaaaacactgtgataacctcctaaggagagcagcctgtcaagaagctcaggtgtttggcaatcaactcattcctcccaatgcacaagtgaagaaggccactgttttctcaatcctgcagcttgcaaaggaaaagccaggactctatttgaaaaaaatgctgcccgattttacatttatctggcatggatgtgactattgtaagacagattatgagggacaagccaagaaactcctggaactgatggaaaacacggatgtgatcattgttgcaggaggagatgggacactgcaggaggttgttactggtgttcttcgacgaacagatgaggctaccttcagtaagattcccattggatttatcccactgggagagaccagtagtttgagtcataccctctttgccgaaagtggaaacaaagtccaacatattactgatgccacacttgccattgtgaaaggagagacagttccacttgatgtcttgcagatcaagggtgaaaaggaacagcctgtatttgcaatgaccggccttcgatggggatctttcagagatgctggcgtcaaagttagcaagtactggtatcttgggcctctaaaaatcaaagcagcccactttttcagcactcttaaggagtggcctcagactcatcaagcctctatctcatacacgggacctacagagagacctcccaatgaaccagaggagacccctgtacaaaggccttctttgtacaggagaatattacgaaggcttgcgtcctactgggcacaaccacaggatgccctttcccaagaggtgagcccggaggtctggaaagatgtgcagctgtccaccattgaactgtccatcacaacacggaataatcagcttgacccgacaagcaaagaagattttctgaatatctgcattgaacctgacaccatcagcaaaggagactttataactataggaagtcgaaaggtgagaaaccccaagctgcacgtggagggcacggagtgtctccaagccagccagtgcactttgcttatcccggagggagcagggggctcttttagcattgacagtgaggagtatgaagcgatgcctgtggaggtgaaactgctccccaggaagctgcagttcttctgtgatcctaggaagagagaacagatgctcacaagccccacccagtgagcagcagaagacaagcactctgagaccacactttaggccaccggtgggaccaaaagggaacaggtgcctcagccatcccaacagtgtcgtcagagggtccccagggcattttcatggcaagtacccctctgcccccactccagcagtgcttcccaaagtgtgctctgtcacctgctttgcaatcggcttccattagcgcatgttttattttggtgtgacggttggccctcctaaacacggactttcctcaggctggttcaagacggaaaaggactttcttctgttttcttccaaagtgcaaccacagtggagagcccacggtgggcttagcctgcctaggcccttccatttctcttctttgaccgtgctaggaattccaggaaagtgcattcctgccctggtgaccttttcctatgtctaggctcctccacaggtgctgctattttgtgagctccggctcctgtttagcttttatttcagttctaacctcagtccagaaacatatgtgaggttgtttccctcttcagccacggctacaataccggaaaatgctagtttttatttatttttttaagtagtgcttcctaaatggtttgcatgagagccacctggggtacatgttgaaaacttatttggggtctaccccaaacctaataacccaaatttggggatggggcccaggaatatgcatttttaaaaagtcatctgcccttcccaggtgattctgtaagttgtccctcaactgtacttggagaaatcgtgttttaaagcagtagtccacaaagtattctgctcatgtgcccccaaaagtattttgaaaaatcatgtataccctcacccatctaagttgatatctaaaattttatctaagttggtatctaaaatttttcatgggaagttaaatagttgacaaagtatgtatttgctggtgtcgtgtaaatattggtattttaaaataaaaactgttacatcactaaaaaaaaaaaaaaaaaaaaaaaa

SEQ ID NO: 352 - DNA, 1534 bp, Homo sapiens
  misc_feature (1212)..(1212): n equals a,t,g, or c
tcgaagataggttcgagacggtggatgttgcagctgatcatgcagttgggttcggtgctgctcacacgctgccccttttggggctgcttcagccagctcatgctgtacgctgagagggctgaggcacgccggaagcccgacatcccagtgccttacctgtatttcgacatgggggcagccgtgctgtgcgctagtttcatgtcctttggcgtgaagcggcgctggttcgcgctgggggccgcactccaattggccattagcacctacgccgcctacatcgggggctacgtccactacggggactggctgaaggtccgtatgtactcgcgcacagttgccatcatcggcggctttcttgtgttggccagcggtgctggggagctgtaccgccggaaacctcgcagccgctccctgcagtccaccggccaggtgttcctgggtatctacctcatctgtgtggcctactcactgcagcacagcaaggaggaccggctggcgtatctgaaccatctcccaggaggggagctgatgatccagctgttcttcgtgctgtatggcatcctggcccctggcctttctgtcaggctactacgtgaccctcgctgcccagatcctggctgtactgctgccccctgtcatgctgctcattgatggcaatgttgcttactggcacaacacgcggcgtgttgagttctggaaccagatgaagctccttggagagagtgtgggcatcttcggaactgctgtcatcctggccactgatggctgagttttatggcaagaggctgagatgggcacagggagccactgagggtcaccctgccttcctccttgctggcccagctgctgtttatttatgctttttggtctgtttgtttgatcttttgcttttttaaaattgttttttgcagttaagaggcagctcatttgtccaaatttctgggcttcagcgcttgggagggcaggaaccctggcactaatgctgtacaaggtttttttcctgttaggaagaacttgaggccagctgcccactgagtcttctgtccctgaagaaagggagtattgggcagggcttgggatccggctactgagagtgggagagtgggagacagaggaaggaagatggagattggaagtgagcaaatgtgaaaaattcctctttgaacctggcagatgcagctaaactctgcagtagtgtttggagactgtganagggagtgtgtgtgttgacacatgtggatcaggcccaggaagggcacaggggctgagcactacagaagtcacatgggttctcagggtatgccaggggcagaaacagtaccggctctctgtcactcaccttgagagtagagcagaccctgttctgctctgggctgtgaaggggtggagcaggcagtggccagctttgcccttcctgctgtctctgtttctagctccatggttggcctggtgggggtggagttccctcccaaacaccagaccacacagtcctccaaaaataaacattttatatagacaaaaaaaaaaaaaaaaa

SEQ ID NO: 353 - DNA, 2664 bp, Homo sapiens
ggttgctggcccaggtgagcgggcgcgctggtccaggtgagcgggcgcgtccccgcgacggcgctgcctgcccgaggcggttcacgtaaagacagcgagatcctgagggccagccgggaaggaggcgtggatatggagctggctgctgccaagtccggggcccgcgccgctgcctagcgcgtcctggggactctgtggggacgcgccccgcgccgcggctcggggacccgtagagcccggcgctgcgcgcatggccctgctctcgcgccccgcgctcaccctcctgctcctcctcatggccgctgttgtcaggtgccaggagcaggcccagaccaccgactggagagccaccctgaagaccatccggaacggcgttcataagatagacacgtacctgaacgccgccttggacctcctgggaggcgaggacggtctctgccagtataaatgcatgacggatctaagcctttcccacgttatggttataaaccctccccaccgaatggatgtggctctccactgtttggtgttcatcttaacattggtatcccttccctgacaaagtgttgcaaccaacacgacaggtgctatgaracctgtggcaaaagcaagaatgactgtgatgaagaattccagtattgcctctccaagatctgccgagatgtacagaaaacactaggactaactcagcatgttcaggcatgtgaaacaacagtggagctcttgtttgacagtgttatacatttaggttgtaaaccatatctggacagccaacgagccgcatgcaggtgtcattatgaagaaaaaactgatctttaaaggagatgccgacagctagtgacagatgaagatggaagaacataacctttgacaaataactaatgtttttacaacataaaactgtcttatttttgtgaaaggattattttgagaccttaaaataatttatatcttgatgttaaaacctcaaagcaaaaaaagtgagggagatagtgaggggagggcacgcttgtcttctcaggtatcttccccagcattgctcccttacttagtatgccaaatgtcttgaccaatatcaaaaacaagtgcttgtttagcggagaattttgaaaagaggaatatataactcaattttcacaaccacatttaccaaaaaaagagatcaaatataaaattcatcataatgtctgttcaacattatcttatttggaaaatggggaaattatcacttacaagtatttgtttactatgaaattttaaatacacatttatgcctagaaggaacggactttttttttctattttaattacacataatatgtaattaaagtacaacataatatgttgtttctctgtagcccgttgagcatatgagtaagtcacatttctattaggactacttmcaaggacaaggtttccatttttccagttgtaaaattggaaccatcagctgataacctcgtagggagcaaccccaggatagctaagtgttatgtaatatgcctagaaggtgatgtgaatgcgattcagaagcatagccactcccattttatgagctactcacatgacaaatgtcatcttttgctataacctttgccaagttagagaaaagatggatttaatgagataaatgaaaagatatttamcctaatatatcaaggcactatttgctgttatgctttgttatttatttcccagcacttgttccttattgtagattttttaaagactgtaaccttttactaactgtggtcttactaaaatttgtgcttgatactgcttttcaaaaagcctttaattagagccaaaaggatggaaaaggcaagatataaatgccttttatagatctcttatttacattgaaaattattaccatatgtttagagcaaatccaagaaaacttcaacagcttctgaagatgtctatgaatgttgaaaacttttcaatctcttggaatgctcagttatgttcctagaccggtctttgctgactactggttgttaacctttccctagcctgggacctcaagccatatatatcctttgggtgacccatggccaaagttattaagatgaactgactttcaaagtcagagaaggacagcatagggagaggcggttatttgtaagtcattacaggtagaacagggcagaaggaaaagtatgttctggagaaagggccatgttcctaactttggagatatgtcattgccgggaacctagtatcttccaacttgaattggtggcagctgttccagtgagacaaggcacatgtatgccttgtggctaagtgagcaaactgggtttccacttaaatgtttgggaccctcaattgattctttatttcaaacctttataaaaggtacagttttgtaagccattattaataattaatgcttatcggctgggcacagtggctcacacctataatcccagcacttgggaggctgaggcggttggatcacttgaggtcaggagtttgagaccagctggccaacatggtgaaacagcgtctctactaaaaatacaaaaatttgccgggcgtggtggcgcatgcttatagtctcagctactcaggaagctgaggtacgagaatcacttgaacccaggaggtggaggttgcagtgagctgagattgtgccactgcactgcagcctggctcgag

SEQ ID NO: 354 - DNA, 1508 bp, Homo sapiens
ggcacagagatagagcggcaacctcggaagtgcggacgggtgggcctatatagatgttgaggtgcggaggccgtgggcttttgttgggcctggctgtagccgcagcagcggtaatggcagcacggcttatgggctggtggggtccccgcgctggctttcgccttttcataccggaggagctgtctcgctaccgcggcggcccaggggacccgggcctgtacttggcgttgctcggccgtgtctacgatgtgtcctccggccggagcactacgagcctgggtcccactatagcggcttcgcaggccgagacgcatccagagctttcgtgaccggggactgttctgaagcaggcctcgtggatgacgtatccgacctgtcagccgctgagatgctgacacttcacaattggctttcattctatgagaagaattatgtgtgtgttgggagggtgacaggacggttctacggagaggatgggctgcccaccccggcactgacccaggtagaagctgcgatcaccagaggcttggaggccaacaaactacagctgcaagagaagcagacattcccgccgtgcaacgcggagtggagctcagccaggggcagccggctctggtgctcccagaagagtggaggtgtgagcagagactggattggcgtccccaggaagctgtataagccaggtgctaaggagccccgctgcgtgtgtgtgagaaccaccggcccccctagtggccagatgccggacaaccctccacacagaaatcgtggggacctggaccacccaaacttggcagagtacacaggctgcccaccgctagccatcacatgctcctttccactctaagccgtagcctcttctgttaataacacacagagagctctgccaagcacctgagtaggcccttgacacttgtgtgccctgggatgcctcctggcgcgaatcaggagggtctggaaggactctggctatattctgcaaatgtggctcatgccccttaccgtggctcggcgttgtggtgcctgagggacagccggccacctgcccagtactggtcagcttttcaacactattccctttgacctactggccatcttcctcacagccctcagatatcaacgggcacaaataagaccaactcaatttccacttgaatttacaaccaaaagcctgctgagttgattacagctgggccaatacagtacgaggcaataacaaattagtgtgggttgattctggaattggaaaagcttttgcttgtatggatacagcaaatccagatgtctctgaacaaagcaacaatttaaagcaacgacattttctgtcctttaagcacttaaaatcaggtgtggtgtgttttcaaaggcagaagtctgcattttgagcaaaaggtggcttcccagctctaacaaggtaactggttagcatgacattaaagcttgggcaaggcttcaaacttaaaaaaaaaaaaaaaaaaaaaaaaaaaaaaaaaaaaaaaaaactcgag

SEQ ID NO: 355 - DNA, 1076 bp, Homo sapiens
  misc_feature (1029)..(1029): n equals a,t,g, or c
  misc_feature (1037)..(1037): n equals a,t,g, or c
  misc_feature (1040)..(1040): n equals a,t,g, or c
ggcacgaggggaaagccatgctcccaggactccttccttgcagccttaaatcggtctgtacggaaaattccgcgccttagaaacccacgcttgggtgtaacttattattgttcttcctgacctacttcctgtttatcacttccgggttcatcattttggcatttcggtgatcgggttggaactattgaagcccgctttcaggttcttttccccattttccctttgaaaggaagacttctggcttctcctaaatctccgttctctgggtaaggggagtccaagcctctgtcatgaggaacggaaatgcgagggcctcgggtgttactctaaaatccgccctcagcttgcacgccggaagctgcgattcctgcagcggaagaggcgtgatctggccttcgactcgctatgtccactaacaatatgtcggacccacggaggccgaacaaagtgctgaggtacaagcccccgccgagcgaatgtaacccggccttggacgacccgacgccggactacatgaacctgctgggcatgatcttcagcatgtgcggcctcatgcttaagctgaagtggtgtgcttgggtcgctgtctactgctccttcatcagctttgccaactctcggagctcggaggacacgaagcaaatgatgagtagcttcatgctgtccatctctgccgtggtgatgtcctatctgcagaatcctcagcccatgacgcccccatggtgataccagcctagaagggtcacattttggaccctgtctatccactaggcctgggctttggctgctaaacctgctgccttcagctgccatcctggacttccctgaatgaggccgtctcggtgcccccagctggatagagggaacctggccctttcctagggaacaccctaggcttacccctcctgcctcccttcccctgcctgctgctgggggagatgctgtccatgtttctaggggtattcatttgctttctcgttgaaacctgttgttaataaagtttttcactctgaaaaaaaaaaaaaaaanaraaaacncgngggggggcccggaacccaattcsccggatagtgagt

SEQ ID NO: 356 - DNA, 943 bp, Homo sapiens
ggcacgagctccgcccggccccgaggggctctccccggaggctcagccccctctgctccccatgggcaactgccaggcagggcacaacctgcacctgtgtctggcccaccacccacctctggtctgtgccactttgatcctgctgctccttggcctctctggcctgggccttggcagcttcctcctcacccacaggactggcctgcgcaccctgacatcccccaggactgggtctcttttttgagatcttttggccagctgaccctgtgtcccaggaatgggacagtcacagggaagtggcgagggtctcacgtcgtgggcttgctgaccaccttgaacttcggagacggtccagacaggaacaagacccggacattccaggccacagtcctgggaagtcagatgggattgaaaggatcttctgcaggacaactggtccttatcacagccagggtgaccacagaaaggactgcaggaacctgcctatattttagtgctgttccaggaatcctaccctccagccagccacccatatcctgctcagaggagggggctggaaatgccaccctgagccctagaatgggtgaggaatgtgttagtgtctggagccatgaaggccttgtgctgaccaagctgctcacctcggaggagctggctctgtgtggctccaggctgctggtcttgggctccttcctgcttctcttctgtggccttctctgctgtgtcactgctatgtgcttccacccgcgccgggagtcccactggtctagaacccggctctgagggcactggcctagttcccgacttgtttctcaggtgtgaatcaacttcttgggccttggctctgagttggaaaaggttttagaaaaagtgaagagctggaatgtgggggaaaataaaaagcttttttgcccaaaaaaaaaaaaaaaaaaaaaaaaaaaaa

SEQ ID NO: 357 - DNA, 1566 bp, Homo sapiens
cgcgtccggcgcccggcagctgtccaccgatcccggccaccgcccccggccacccccaccccgcgagcccatggaggctccgggaccccgcgccttgcggactgcgctctgtggcggctgttgctgcctcctcctatgtgcccagctggctgtggctggtaaaggagctcgaggctttgggaggggagccctgatccgcctgaatatctggccggcggtccaaggggcctgcaaacagctggaggtctgtgagcactgcgtggagggagacagagcgcgcaatctctccagctgcatgtgggagcagtgccggccagaggagccaggacactgtgtggcccaatctgaggtggtcaaggaaggttgctccatctacaaccgctcagaggcatgtccagctgctcaccaccaccccacctatgaaccgaagacagtcacaacagggagccccccagtccctgaggcccacagccctggatttgacggggccagctttatcggaggtgtcgtgctggtgttgagcctacaggcggtggctttctttgtgctgcacttcctcaaggccaaggacagcacctaccagacgctgtgagtacctggccagcagcaagtacctgagtcccagctcacctcctggttcctgccccaccgttccccttcagtacccagggtgctgtcttctccatgggcaagccctcaggacggtgacagcgtgctccatgtgagccacaccccttttgtctcctccagttggggtgtttcctttgtcagatgttggctgggaccaggactcagcctgggccagtctaggagcccagctgagccctcctgtgtcttttcccttcatgctgccagcagggaagagaaccagtaggtgccagcccaggcaagcctgtggcccgcgtttctgtggctgtgggcaggagctgggccttgtgtctagttgggttttgctctgagaaggggagctgtgcctgaggccctctgtgtgccgtgtgtgctgtggggcgggtcgccacagcctgtgttaaagtgtttgctcttcctctgctgcctcctctcgaggcagggggtccttggctggctgaggcagtgtcaccttcctgagtgtcctctttggcctctgcagaatctgacccctttgggcctggactccatcctgagggcaaaggaggatgcagagggtggcctctgggcacccttgtgggtaagcggggggcgggggcgggaaaaactctggccgccagtttttggctcctgcgggcaccaagcaggctcagtgtctgatgcctgacatctcctcctgtcctgggcctggaacctgcagctgagaaaatccctcaaccacctcgtctcctccatcgcccctgctgggccccccagcctgacagtgggttgtatgcctgcctctttccaccaactggcctgggcactgcccccaaataaaggaactctgcactgcaaaaaaaaaaaaaaaaaaaaaaaaaaaaaaaaaaaaaaaaaaaaaaaaaaaaaaaaaaaaaaaaaaaaaaaaaaaaaaaaaaaaaaaaaaaaaaaaaaaaaaaa

SEQ ID NO: 358 - DNA, 1067 bp, Homo sapiens
taccggtccggaattcccgggtcgacccacgcgtccggcgcccggcagctgtccaccgatcccggccaccgyccccggccacccccaccccgcgagcccatggaggctccgggaccccgcgccttgcggactgcgctctgtggcggctgttgctgcctcctcctatgtgcccagctggctgtggctggtaaaggagctcgaggctttgggaggggagccctgatccgcctgaatatctggccggcggtccaaggggcctgcaaacagctggaggtctgtgagcactgcgtggagggagacagagcgcgcaatctctccagctgcatgtgggagcagtgccggccagaggagccaggacactgtgtggcccaatctgaggtggtcaaggaaggttgctccatctacaaccgctcagaggcatgtccagctgctcaccaccaccccacctatgaaccgaagacagtcacaacagggagccccccagtccctgaggcccacagccctggatttgackgggccagctttatcggaggtgtcgtgctggtgttgagcctacaggcggtggctttctttgtgctgacttcctcaaggccaaggacagcacctaccagacgctgtgagtacctggccagcagcaagtacctgagtcccagctcacytctggttcctgcccacgttcccttcagtacccagggtgctgtcttctccactggcaagccctcaggacggtgacagcgtgctycatgtgagccacaccccttttgtctyctccagttggggtgtttcctttgtcagatgttggctgggaccaggactcagcctgggccagtctaggagcccagctgagccctcctgtgtcttttcccttcatgctgccagcagggaagagaaccagtaggtgccagcccagcaacctgtggcccgcgtttctgtggctgtgggcaggagctgggccttgtgtctagttgggttttgctctgagaaggggagctgtgctgaggccctctgtgtgccgtgtgtgctgtggggcgggtcgccacagcctgtgttaaagtgtttgctcttcc

SEQ ID NO: 359 - DNA, 1021 bp, Homo sapiens
ggcacgaggattctaggacagggatgggggtgcagcactgatccaggacccagaatggaggcatcatggagggtccccggggatggctggtgctctgtgtgctggccatatcgctggcctctatggtgaccgaggacttgtgccgagcaccagacgggaagaaaggggaggcaggaagacctggcagacgggggcggccaggcctcaagggggagcaaggggagccgggggcccctggcatccggacaggcatccaaggccttaaaggagaccagggggaacctgggccctctggaaaccccggcaaggtgggctacccagggcccagcggcccccttcggagcccgtggcatcccgggaattaaaggcaccaagggcagcccaggaaacatcaaggaccagccgaggccagccttctccgccattcggcggaaccccccaatggggggcaacgtggtcatcttcgacacggtcatcaccaaccaggaagaaccgtaccagaaccactccggccgattcgtctgcactgtacccggctactactacttcaccttccaggtgctgtcccagtgggaaatctgcctgtccatcgtctcctcctcaaggggccaggtccgacgctccctgggcttctgtgacaccaccaacaaggggctcttccaggtggtgtcagggggcatggtgcttcagctgcagcagggtgaccaggtctgggttgaaaaagaccccaaaaagggtcacatttaccagggctctgaggccgacagcgtcttcagcggcttcctcatcttcccatctgcctgagccagggaaggaccccctcccccacccacctctctggcttccatgctccgcctgtaaaatgggggcgctattgcttcagctgctgaagggagggggctggctctgagagccccaggactggctgccccgtgacacatgctctaagaagctcgtttcttagacctcttcctggaataaacatctgtgtctgtgtctgctgaaaaaaaaaaaaaaaaaa

SEQ ID NO: 360 - DNA, 1086 bp, Homo sapiens
ggattctaggacagggatgggggtgcagcactgatccagttgacaacaggaggcagaggcatcatggagggtccccggggatggctggtgctctgtgtgctggccatatcgctggcctctatggtgaccgaggacttgtgccgagcaccagacgggaagaaaggggaggcaggaagacctggcagacgggggcggccaggcctcaagggggagcaaggggagccgggggcccctggcatccggacaggcatccaaggccttaaaggagaccagggggaacctgggccctctggaaaccccggcaaggtgggctacccagggcccagcggccccctcggagcccgtggcatcccgggaattaaaggcaccaagggcagcccaggaaacatcaaggaccagccgaggccagccttctccgccattcggcggaaccccccaatggggggcaacgtggtcatcttcgacacggtcatcaccaaccaggaagaaccgtaccagaaccactccggccgattcgtctgcactgtacccggctactactacttcaccttccaggtgctgtcccagtgggaaatctgcctgtccatcgtctcctcctcaaggggccaggtccgacgctccctgggcttctgtgacaccaccaacaaggggctcttccaggtggtgtcagggggcatggtgcttcagctgcagcagggtgaccaggtctgggttgaaaaagaccccaaaaagggtcacatttaccagggctctgaggccgacagcgtcttcagcggcttcctcatcttcccatctgcctgagccagggaaggaccccctcccccacccacctctctggcttccatgctccgcctgtaaaatgggggcgctattgcttcagctgctgaagggagggggctggctctgagagccccaggactggctgccccgtgacacatgctctaagaagctcgtttcttagacctcttcctggaataaacatctgtgtctgtgtctgctgaaaaaaaaaaaaaaaaaaaaaaaaaaaaaaaaaaaaaaaaaaaaaactcgagggggggcccggtacccaattcgccgtataatgag

SEQ ID NO: 361 - DNA, 2078 bp, Homo sapiens
  misc_feature (1177)..(1177): n equals a,t,g, or c
  misc_feature (1187)..(1187): n equals a,t,g, or c
  misc_feature (2057)..(2057): n equals a,t,g, or c
ggcacgaggagttgtgcagatacctggctgagagctggctcaccttccagattcacctgcaggagctgctgcagtacaagaggcagaatccagctcagttctgcgttcgagtctgctctggctgtgctgtgttggctgtgttgggacactatgttccagggattatgatttcctacattgtcttgttgagtatcctgctgtggcccctggtggtttatcatgagctgatccagaggatgtacactcgcctggagcccctgctcatgcagctggactacagcatgaaggcagaagccaatgcyctgcatcacaaacacgacaagaggaagcgtcaggggaagaatgcacccccaggaggtgatgagccactggmagagacagagagtgaaagcgaggcagagctggctggcttctccccagtggtggatgtgaagaaaacagcattggccttggccatttacagactcagagctgtcagatgaggaggcttctatcttggagagtggtggcttctccgtatcccgggccacaactccgcagctgactgatgtctccgaggatttggaccagcagagcctgccaagtgaaccagaggagaccctaagccgggacctaggggagggagaggagggagagctggcccctcccgaagacctactaggccgtcctcaagctctgtcaaggcaagccctggactcggaggaagaggaagaggatgtggcagctaaggaaaccttgttgcggctctcatcccccctccactttgtgaacacgcacttcaatggggcagggtccccccmagatggagtgaaatgctcccctggaggaccagtggagacactgagccccgagacagtgagtggtggcctcactgctctgcccggcaccctgtcacctccactttgccttgttggaagtgacccagccccctccccttccattctcccacctgttccccaggactcaccccagcccctgcctgcccctgaggaagaagaggcactcaccactgaggactttgagttgctggatcagggggagctggagcagctgaatgcagagctgggcttggagccagagacaccgccaaaaccccctgatgctccacccctggggcccgacatccattctytggtacatcagaccaagaagctcaggccgtggcagagccatgagnccagccgttnaggaaggagctgcaggcacagtagggcttcttggctaggagtgttgctgtttcctcctttgcctaccactctggggtggggcagtgtgtggggaagctggctgtcggatggtagctattccaccctctgcctgcctgcctgcctgctgtcctgggcatggtgcagtacctgtgcctaggattggttttaaatttgtaaataattttccatttgggttagtggatgtgaacagggctagggaagtccttcccacagcctgcgcttgcctccctgcctcatctctattctcattccactatgccccaagccctggtggtctggccctttctttttcctcctatcctcagggacctgtgctgctctgccctcatgtcccacttggttgtttagttgaggcactttataatttttctcttgtcttgtgttcctttctgctttatttccctgctgtgtcctgtccttagcagctcaaccccatcctttgccagctcctcctatcccgtgggcactggccaagctttagggaggctcctggtctgggaagtaaagagtaaacctggggcagtgggtcaggccagtagttacactcttaggtcactgtagtctgtgtaaccttcactgcatccttgccccattcagcccggcctttcatgatgcaggagagcagggatcccgcagtacatggcgccagcactggagttggtgagcatgtgctctctcttgagattaggagcttccttactgctcctctgggtgatccaagtgtagtgggaccccctactagggtcaggaagtggacactaacatctgtgcaggtgttgacttgaaaaataaagtgttgattggctagaaaaaaaaaaaaaaaaattnctgcggtccgcaagggaattc

SEQ ID NO: 362 - DNA, 2494 bp, Homo sapiens
  misc_feature (920)..(920): n equals a,t,g, or c
ggagatgtttaaggattacccgccagccataaaaccatcctacgatgtgctgctgctgctgctgctgctagtsytcctsctgcaggccggcctcaacacgggcaccgccatccagtgygtgcgcttcaaggtcagtgcaaggctgcagggtgcatcctgggacacccagaacggcccgcaggagcgcctggctggggaggtggccaggagccccctgaaggagttcracaaggagaaagcctggagagccgtcgtggtgcaaatggcccagtgacccccagacgcggaaaccgggtggcagckcccagcctggccccaagcatggaaacgcacaacccctaatcgccctgagctactgcttctaacacctcttttcccttgtgtgagggcaaaccaggctgcaggtggggttttcacttcctagggtagtttaattttaaaataggccaatgttggctagtctgtgcctcagtgagatcagtcagctccgagtggctcccgtgtcgtaacagcaggagcatggccgcaacttcccaggccgaggaagggcccccggctcggcctcttgagagccccacccctgaactggccccagctcctcttcctgcctctctcatggcttgggctggagtgggctctctggacctgaccagactgtgggtccctgcgtctcctgcccactctgaccgggcttcctccctccacgcttagggtctgtcccgggtactcagtcagcccagtgggatcttacccacttccctgcaaggtgcacctgccccaggctcaggctgcccagcggctcttcctggacagtgagagcagggctgggcgcctctgtcctggcccgggagccgcaggggcccctcctccagagcctgggcgcaagcgacacaggctgccgctgctctccaggtgaaatncacaccagtccacgccgggtcgcctgccctgtctccctacttagacccagtcattctagagggatccamcgccamactggccggcccacgtcctgggtgctgtcatgcccagcttggagtgccacgtggccgctgcccacgtcccgggcactgtcatgcccagcttggagtgccacatggccgctgcccacgtcccgggcactgtcatgcccagcttggagtgccacgtggccgctgctgtgacaggcagtgttcttgggggtggggctgcatccaaggctttgtaaaccggctggaccacgtctccctggccccagtgaccgggggaagctgagcccctccctcctgtgtttgctcccattactcaaaatgcaggacagatcaggtcagagcccaggaattctcacaggttcacccagcgccctctacctcctagcaagtactttgtcttgatcctcactgagaaggccccagggcagtggtcttctccatctccgctgttttggggtcttagggtacagcccaggcggtcactgcccacctgccaggctgcagggacagttgggtgtgagaataacactggctttgggtagtgccatggccaggagtgggtttccctgcgtctcctcgtcccgagggcgcctgggtcctcccagctgacggcagtaaatccacagtgagttggggcgactgtgaaactggaatgctgttactttgataattactttccagcaggtgttttccttcacaatggttttgtttctttccttctgatctgagaagacatgaacgttttctcttcaccgccgtggggtgtattgactggtcccccatgggctgctggaaaggcccggagatgcatctgtggcctggggccatcaagatcaaagaaccaggaggcctgggagatgcagctggatggggcggcctgcagaccctgccagggggtttgaggaccctcccaggtttcccactgcggaacaggagtgactctggctgccaagataccttcatggtgttcatgacaagtggaatcattattttcaaccattgaagggggatgcaggcaagacaccttcccagctgctcctagaggggacaagccaggccctctctgcagtcctcggcagctccggaaggacacagtcaggggccgggcaaacactttggccacagccccaaacaagcgccaccgtgggagaggagaggctgctgtcactggtaccggatgcagaccccaccctgtctgcaggccacccccacctccctgcagctttgaggctggcggggtctgctcctgggaatggggtgggagccacagggacgacccggggcgggctgatgtcttcttgggggcagaccagagagctcaagtttcagagtcagaattaggcacttggagcgtttttgctggcttgcactttcttattttcttattttagagcgcttaaaaaatccggaaaaatggggtttaaaagaactgtctctttcagtctacatttttgtttaatacgcttgagcaataaacgctgacttgcagacgtgaaaaaaaaaaaaaaaaaaaaaaaactcga

SEQ ID NO: 363 - DNA, 807 bp, Homo sapiens
cccacgcgtccggacgtcctgatagatcctctgctccaataggcaactccggccttccctgccctgacctggaacctctgggagggctgcagagtaagtgccgcctctgcgctccgacggaggcacgaggcctgtggagtaggtccctctgttccgacaggtgcgacacttggcgctccatgcttgcgggtgccgggaggcctggcctcccccagggccgccacctctgctggttgctctgtgctttcaccttaaagctctgccaagcagaggctcccgtgcaggaagagaagctgtcagcaagcacctcaaatttgccatgctggctggtggaagagtttgtggtagcagaagagtgctctccatgctctaatttccgggctaaaactacccctgagtgtggtcccacaggatatgtagagaaaatcacatgcagctcatctaagagaaatgagttcaaaagctgccggttcagctttgaatggaacaacgcttattttggaagttcgaaaggggctgtcgtgtgtgtggccctgatcttcgcttgtcttgtcatcattcgtcagcgacaattggacagaaaggctctggaaaaggtccggaagcaaatcgagtccatatagctacattccacccttgtatcctgggtcttagagaccctatctcagacagtgaaagtgaaatggactgatttgcactcttggttctttggagccttgtggtggaatccccttttccccatcttcttctttcagatcattaatgagcagaataaaaagagtaaaatggtaaaaaaaaaaaaaaaaa

SEQ ID NO: 364 - DNA, 845 bp, Homo sapiens
  misc_feature (1)..(1): n equals a,t,g, or c
  misc_feature (4)..(5): n equals a,t,g, or c
  misc_feature (823)..(823): n equals a,t,g, or c
  misc_feature (845)..(845): n equals a,t,g, or c
ntanntaatggcacatctccccttctattgggaacacaagctggagctccaccgcggtggcggccgctctagaactagtggatcccccgggctgcaggaattcggcacgaggtcaaggcaaaaatgggtcaggtttggagagttcccccactccttttgagtgttcaggttttccttaccatggctcatgctttccatcaagcaccagagttgcagtggcttggcctctggttctgggtgaggttatttgcaggtggagacggggggctgcacctgaacatttctagtgtcaccctccctctccttcatgggaaacagctctccagggaagtaccttcctgccaggggaagccaaggctgggccggccgccctacaaggagccacaggattgcagccatgggtgccacctttcatggaaggggagatttatgggctttcctggaacccccaggctgtcctggccaagaggaaagaggtggttacttcaggagtttgaccttagttagataactaaaagaatacatttcccctcccttttctttatttcctcaataaaaatgtacaaagtatcacccttctccatgccccaatctgtgttaaagtcacaatctatgggtgtagttctgggattctgtcaaattctccttcctgctctccaaaatggacaattgtcgtagggaccacatgcccccagaatacaatggcctctgtgktctactggggtcaagcctgctagaactcagcattcatgacaggggstaagtgtgcatgaaktgacactgactacagstargaaagccaggcgcacaaatgsccctttcnccccaagggccggtctttccan

SEQ ID NO: 365 - DNA, 738 bp, Homo sapiens
  misc_feature (3)..(3): n equals a,t,g, or c
  misc_feature (8)..(8): n equals a,t,g, or c
  misc_feature (566)..(566): n equals a,t,g, or c
  misc_feature (680)..(680): n equals a,t,g, or c
  misc_feature (684)..(684): n equals a,t,g, or c
  misc_feature (703)..(703): n equals a,t,g, or c
  misc_feature (715)..(715): n equals a,t,g, or c
  misc_feature (717)..(717): n equals a,t,g, or c
  misc_feature (731)..(731): n equals a,t,g, or c
ccnctgtnctggccctctatcatttgcctgcctttagacctgcctcaaggatatggcagcgctagcctttagctyccacagcacggatgggggtgatgccagttagaagtgggtagtgaacgtttgctgagctgttcactgtttmtctcttctctttggaagcacctctccgagccatgtgagccccctgatgccaccgagcaggggcagcttcatgaccgatgtctggctgaggctgtggcggacactctcggggttgtctgcaggagagcaagccaggaggacatgggcctggacgacacggcctcgcagcaaagtgtgtcagacgagcagtgacgggcgtgcggccgggcggggaggctggctcccccacacctcccacctgcattgctctccctcgtgctccccaaatcaccacaaccaaccaataccgcratccatgagggactcctcctgtggaaaaggagagctgttccagaacacagaactgatctcaggtttttgaaaaaaaaaaaaaaaaaactcgagggggggcccggtacccaattcgccctatagtgagtcgnattacaattcactggcgtcgttttacaacgtcgtgactgggaaaaccctggcgttacccaacttaatcgccttgcagcacatccccctttcgccagctggcgtaataagcgaanaggnccggaccgatcggcctttnccaacagttggngnagcctgaaatgggngaatggg

SEQ ID NO: 366 - DNA, 1145 bp, Homo sapiens
  misc_feature (9)..(9): n equals a,t,g, or c
  misc_feature (410)..(410): n equals a,t,g, or c
caggcagangggctgagtcacaggcacaggtgaggaactcaactcaaactcctctctctgggaaaacgcggtgcttgctcctcccggagtggccttggcagggtgttggagccctcggtctgccccgtccggtctctggggccaaggctgggtttccctcatgtatggcaagagctctactcgtgcggtgcttcttctccttggcatacagctcacagctctttggcctatagcagctgtggaaatttatacctcccgggtgctggaggctgttaatgggacagatgctcggttaaaatgcactttctccagctttgcccctgtgggtgatgctctaacagtgacctggaattttcgtcctctagacgggggacctgagcagtttgtattctactaccacatagatcccnttccaacccatgagtgggcggtttaaggaccgggtgtcttgggatgggaatcctgagcggtacgatgcctccatccttctctggaaactgcagttcgacgacaatgggacatacacctgccaggtgaagaacccacctgatgttgatggggtgataggggasatccggctcagcgtcgtgcacactgtacgcttctctgagatccacttcctggctctggccattggctctgcctgtgcactgatgatcataatagtaattgtagtggtcctcttccagcattaccggaaaaagcgatgggccgaaagagctcataaagtggtggagataaaatcaaaagaagaggaaaggctcaaccaagagaaaaaggtctctgtttatttagaagacacagactaacaattttagatggtaaggttcacaaataggttgatttctttcttcagctttctgacatgtccagcccatctctaatgaggactcccagatcatcactttatggctgttargtgtttcccatatgaaattagaggagctgggtcagggagacaaaagtcttctattagtcttatggatagctcctccttgagtgtattttgtgcaaaagattaagaagctggactctactgccattaaagctgagagaatcctaaggttatttgtggcttcggggttatatttattactactactactaataaatattcaacaagtaaataaatcttttttaaatca

SEQ ID NO: 367 - DNA, 3113 bp, Homo sapiens
gttattaatgaccgctgagcaggcagcaccatgtcagtgtgacaactgaatcgggtgaacgatgcaccactaaccaccatggaaacaaggaaaaataaagccagctcacaggatctctcttcactggattgagagcctcagcctgccgactgagaaaaagagttccaggaaaaagaaggaatcccggctgcagcctcctgccttcctttatattttaaaatagagagataagattgcgtgcatgtgtgcatatctatagtatatattttgtacactttgttacacagacacacaaatgcacctatttataccgggcaagaacacaaccatgtgattatctcaaccaaggaactgaggaatccagcacgcaaggacatcggaggtgggctagcactgaaactgcttttcaagcatcatgctgctattcctgcaaatactgaagaagcatgggatttaaatattttacttctaaataaatgaattactcaatctcctatgaccatctatacatactccaccttcaaaaagtacatcaatattatatcattaaggaaatagtaaccttctcttctccaatatgcatgacatttttggacaatgcaattgtggcactggcacttatttcagtgaagaaaaactttgtggttctatggcattcatcatttgacaaatgcaagcatcttccttatcaatcagctcctattgaacttactagcactgactgtggaatccttaagggcccattacatttctgaagaagaaagctaagatgaaggacatgccactccgaattcatgtgctacttggcctagctatcactacactagtacaagctgtagataaaaaagtggattgtccacggttatgtacgtgtgaaatcaggccttggtttacacccagatccatttatatggaagcatctacagtggattgtaatgatttaggtcttttaactttcccagccagattgccagctaacacacagattcttctcctacagactaacaatattgcaaaaattgaatactccacagactttccagtaaaccttactggcctggatttatctcaaaacaatttatcttcagtcaccaatattaatgtaaaaaagatgcctcagctcctttctgtgtacctagaggaaaacaaacttactgaactgcctgaaaaatgtctgtccgaactgagcaacttacaagaactctatattaatcacaacttgctttctacaatttcacctggagcctttattggcctacataatcttcttcgacttcatctcaattcaaatagattgcagatgatcaacagtaagtggtttgatgctcttccaaatctagagattctgatgattggggaaaatccaattatcagaatcaaagacatgaactttaagcctcttatcaatcttcgcagcctggttatagctggtataaacctcacagaaataccagataacgccttggttggactggaaaacttagaaagcatctctttttacgataacaggcttattaaagtaccccatgttgctcttcaaaaagttgtaaatctcaaatttttggatctaaataaaaatcctattaatagaatacgaaggggtgattttagcaatatgctacacttaaaagagttggggataaataatatgcctgagctgatttccatcgatagtcttgctgtggataacctgccagatttaagaaaaatagaagctactaacaaccctagattgtcttacattcaccccaatgcatttttcagactccccaagctggaatcactcatgctgaacagcaatgctctcagtgccctgtaccatggtaccattgagtctctgccaaacctcaaggaaatcagcatacacagtaaccccatcaggtgtgactgtgtcatccgttggatgaacatgaacaaaaccaacattcgattcatggagccagattcactgttttgcgtggacccacctgaattccaaggtcagaatgttcggcaagtgcatttcagggacatgatggaaatttgtctccctcttatagctcctgagagctttccttctaatctaaatgtagaagctgggagctatgtttcctttcactgtagagctactgcagaaccacagcctgaaatctactggataacaccttctggtcaaaaactcttgcctaataccctgacagacaagttctatgtccattctgagggaacactagatataaatggcgtaactcccaaagaagggggtttatatacttgtatagcaactaacctagttggcgctgacttgaagtctgttatgatcaaagtggatggatcttttccacaagataacaatggctctttgaatattaaaataagagatattcaggccaattcagttttggtgtcctggaaagcaagttctaaaattctcaaatctagtgttaaatggacagcctttgtcaagactgaaaattctcatgctgcgcaaagtgctcgaataccatctgatgtcaaggtatataatcttactcatctgaatccatcaactgagtataaaatttgtattgatattcccaccatctatcagaaaaacagaaaaaaatgtgtaaatgtcaccaccaaaggtttgcaccctgatcaaaaagagtatgaaaagaataataccacaacacttatggcctgtcttggaggccttctggggattattggtgtgatatgtcttatcagctgcctctctccagaaatgaactgtgatggtggacacagctatgtgaggaattacttacagaaaccaacctttgcattaggtgagctttatcctcctctgataaatctctgggaagcaggaaaagaaaaaagtacatcactgaaagtaaaagcaactgttataggtttaccaacaaatatgtcctaaaaaccaccaaggaaacctactccaaaaatgaacaaaaaaaaaaaaagcgaaagactgcagttgtgctaaaaacaaaacaaaacaaacaaacaaacaaaaaagtaaaaaaagattactttcgagagagaagtttaagcttcaccaatggctggctcctggaccaatgggaaatatgttacaactttcaggcattttttaagtgaactttttttttttt

SEQ ID NO: 368 - DNA, 1651 bp, Homo sapiens
  misc_feature (1648)..(1648): n equals a,t,g, or c
ggggacatgtctgggcacaaggaaaggcaagcaatggaggcagcaagagcccttggcagcaagtttccatcacctttgcctgccagtgtgtgagaggcgcagaggggcagtgagcaggtgacatgcagcttccagatacccacacactgcttttctcccgcccagctcccaccccagttaattgagatgggattgtttctctttctggtttcttcctaagcccctctctcatattcctggtgtgcttatggcctggcacaccttgtgaaacagaaacccaagctcctcatttcggagctgggatttcgattggctatctgcctccctaaccaagctgtcccttccacctcatccctagagtcaccctctggtctcatcaacatccagtgggcatttcagyggcccaggatccttcmaattgcagatataaagcatcaggaccccacacctgggatggaagcttctaggaattaatgaagccccagtagaggtgagggtaaacctaaaacgggctggatagggcctctcccaaggccctatggaaaggtgatgggaaactgggggctgaggcctcatcctaggagacccctggagggacccacttaccctagataggcagcggaggccagaaactggaaaacagccactcattgtcggtgcattaccgtgagcaccacctgtagggactctgttggcctccagccgtcgtcacacgttcctgacaaccacaaaagttcatttgagggtgcccagtcagctgactttgcttccaccaggaatacccacctggccctggtccttctgctgagctacaggaggcattcccagggtcttagcaaaaacaacccctcaaataggcccagtgcctacaactctagagaggtttcagatggtattggagacccagagaagttaactgactttcccaaaagtcacccactgtaaatggcagacagatctcaaacccacatctgakcctgagtccagtgttttttctctagtatcatcattgtcccttaaatgtgtttgacacatcatagtttacaaatcaccttcactcatattctctcactactcatcagtcatgaattcagccaatgagaagggctcagagaggttaactaaccagccacgctgtttacatggggcatagactgcttcatgaacgcttgactgcagctttgccttcctcatgccctcaaaaaggaaggagctgaccaaagcttactataccatagctggggtctgggacccccagccaggtctcacagatgatctgggaatggcctccctgttgctctcaggggtccggcagtcacacagaagagtcaggttgaaatcttggcaagactttggtgtggctttgggaactgggtttaacctcttggggacttcaccaagacagtggcaaaggacaccacctacagcttccagtgcctctctactctcccacctgtgctcctggggttgaatgagaccagaagcagctgggacaagatttggaaagataaagagagccaggagacaagaccttgagagaagcasaggtctggctggctgctgscctctggtggcgacaatgggtgacactgtaaacccctctgcaaggcgacactctcccctgactattcaggragggaagaagcanttg

SEQ ID NO: 369 - DNA, 4909 bp, Homo sapiens
  misc_feature (2488)..(2488): n equals a,t,g, or c
  misc_feature (2493)..(2493): n equals a,t,g, or c
  misc_feature (2512)..(2512): n equals a,t,g, or c
  misc_feature (2523)..(2523): n equals a,t,g, or c
gcgtccggtggtggcggcggcgcaagggtgagggcggccccagaaccccaggtaggtagagcaagaagatggtgtttctgcccctcaaatggtcccttgcaaccatgtcatttctactttcctcactgttggctctcttaactgtgtccactccttcatggtgtcagagcactgaagcatctccaaaacgtagtgatgggacaccatttccttggaataaaatacgacttcctgagtacgtcatcccagttcattatgatctcttgatccatgcaaaccttaccacgctgaccttctggggaaccacgaaagtagaaatcacagccagtcagcccaccagcaccatcatcctgcatagtcaccacctgcagatatctagggccaccctcaggaagggagctggagagaggctatcggaagaacccctgcaggtcctggaacacccccctcaggagcaaattgcactgctggctcccgagcccctccttgtcgggctcccgtacacagttgtcattcactatgctggcaatctttcggagactttccacggattttacaaaagcacctacagaaccaaggaaggggaactgaggatactagcatcaacacaatttgaacccactgcagctagaatggcctttccctgctttgatgaacctgccttcaaagcaagtttctcaatcaaaattagaagagagccaaggcacctagccatctccaatatgccattggtgaaatctgtgactgttgctgaaggactcatagaagaccattttgatgtcactgtgaagatgagcacctatctggtggccttcatcatttcagattttgagtctgtcagcaagataaccaagagtggagtcaaggtttctgtttatgctgtgccagacaagatgaatcaagcagattatgcactggatgctgcggtgactcttctagaattttatgaggattatttcagcataccgtatcccctacccaaacaagatcttgctgctattcccgactttcagtctggtgctatggaaaactggggactgacaacatatagagaatctgctctgttgtttgatgcagaaaagtcttctgcatcaagtaagcttggcatcacaatgactgtggcccatgaactggcccaccagtggtttgggaacctggtcactatggaatggtggaatgatctttggctaaatgaaggatttgccaaatttatggagtttgtgtctgtcagtgtgacccatcctgaactgaaagttggagattatttctttggcaaatgttttgacgcaatggaggtagatgctttaaattcctcacaccctgtgtctacacctgtggaaaatcctgctcagatccgggagatgtttgatgatgtttcttatgataagggagcttgtattctgaatatgctaagggagtatcttagcgctgacgcatttaaaagtggtattgtacagtatctccagaagcatagctataaaaatacaaaaaacgaggacctgtgggatagtatggcaagtatttgccctacagatggtgtaaaagggatggatggcttttgctctagaagtcaacattcatcttcatcctcacattggcatcaggaaggggtggatgtgaaaaccatgatgaacacttggacactgcagaggggttttcccctaataaccatcacagtgagggggaggaatgtacacatgaagcaagagcactacatgaagggctctgacggcgccccggacactgggtacctgtggcatgttccattgacattcatcaccagcaaatccgacatggtccatcgatttttgctaaaaacaaaaacagatgtgctcatcctcccagaagaggtggaatggatcaaatttaatgtgggcatgaatggctattacattgtgcattacgaggatgatggatgggactctttgactggccttttaaaaggaacacacacagcagtcagcagtaatgatcgggcaagtctcattaacaatgcatttcagctcgtcagcattgggaagctgtccattgaaaaggccttggatttatccctgtacttgaaacatgaaactgaaattatgcccgtgtttcaaggtttgaatgagctgattcctatgtataagttaatggagaaaagagatatgaatgaagtggaaactcaattcaaggccttcctcatcaggctgctaagggacctcattgataagcagacatggacagacgagggctcagtctcagagcgaatgctgcggagtgaactactactcctcgcctgtgtgcacaactatcagccgtgcgtacagagggcagaaggctatttcagaaagtggaaggaatccaatggaaacttgagcctgcctgtcgacgtgaccttggcagtgtttgctgtgggggcccagagcacagaaggctgggattttctttatagtaaatatcagttttctttgtccagtactgagaaaagccaaattgaatttgccctctgcanacccnaaaataaggaaaagcttcnatggctactanatgaaagctttaagggagataaaataaaaactcaggagtttccacaaattcttacactcattggcaggaacccagtaggatacccactggcctggcaatttctgaggaaaaactggaacaaacttgtacaaaagtttgaacttggctcatcttccatagcccacatggtaatgggtacaacaaatcaattctccacaagaacacggcttgaagaggtaaaaggattcttcagctctttgaaagaaaatggttctcagctccgttgtgtccaacagacaattgaaaccattgaagaaaacatcggttggatggataagaattttgataaaatcagagtgtggctgcaaagtgaaaagcttgaacgtatgtaaaaattcctcccttgccaggttcctgttatctctaatcaccaacattttgttgagtgtattttcaaactagagatggctgttttggctccaactggagatacttttttcccttcaactcattttttgactatccctgtgaaaagaatagctgttagtttttcatgaatgggctatcgctaccatgtgttttgttcatcacaggtgttgccctgcaacgtaaacccaagtgttgggttccctgccacagaagaataaagtaccttattcttctcattttatagtttatgcttaagcacccgtgtccaaaaccctgtaccccatgtttatcattcataaactgtttcatcagtctcctcgaaagactctgaatagtcgactactgaacaatgaacacctggatctgagactaagccggacgatgactgggttaaagctctcccggctcacccctccagacccgctgcccatccctcttccttgctccatgcccaggggctgacttgtaaaggccaagtcatcaagctttcttgccctttggatgttggtcagtggggagccggagagctggagctggggtcggaggaggtagtaggtggaggtgttcttccctgattcccttgcgggatgcctcgggctggcctcccctgagggtcttagctccgagaggggaccctcttttccacacagccttctccacctctggattttggtaactgctccctcctcatcccttcaggattagtggcctcagtgggagtctggcttttactagtcctggcggacttgtggtttctacataatgtgctcgcacttttgcaaaaaatctttttatagaaccctcctcagataattctgagtgtctgtcatctatttccctgactggtacagtatctcttctgaaaaagcagagtgcattcaagtctgtaggaaaacccttttcttagggaggtgattttttttctctctctgcttcttatttggcctactttacaatttctaactaactagttattggcatttactgacagtaaattattgcagtcaccaataaatgatagtacattgtgaaacaaaatatttgctcatattagcaaataggacattctttggctttgaagtctttcttttgtgaagacttcacacacggttgcttcagcacacagttgctgctcaggttttatgtatagatgataataatagaaagcacagtttactaacatggtaaaccaacggagttcaagtcaagtcagttaataccctaagaattagattttatttcttattctgaaaacttgctacacagggacttatctaacccatagtgtgctctgttgctgacttgattcaagttgcagcgtgttttgcgctgactctaaggtgcggaaatcctcacacctggcaaaggagaattcaaactgaactttttgaatataaggcaaaaacttcaagataagggaatatgattgatgattggtacgaaaaatgtcaaaaatgtgttcccctaatacacgacaaaatagagtgacttctggacataaatctgccatttattaaaccattcactacaacaaataaataggtataaaagtggaattggaatttttatacttatttgttgtagtgaatggtttaataaaaatagaaatcactggtaatttccaccccaaactaaactatttcccttcttttaaaaaaatacacaaccaagattttaatgtaaaatattttgctttaattgtattttatgccttgattaatgaaacatggaaatattgattttcagttttggtcacctgaggaacctatctttgtttgcttttggaaaagcccattttctaaacagatacaatattgccacaacaatgtgcagaaacctttttgataataaaaaattgttctttgcctctaaaaaaaaaaaaaaaaaaaaaaaaaaaaaaaaaaaaaaaaaaaaaaaaaaaaaaaaaaaaaaaaaaaaaaaaaaaaaaaaaaaaaaaaaaaaaaaaaaaaaaaaaaaa

SEQ ID NO: 370 - DNA, 2242 bp, Homo sapiens
tcgacccacgcgtccgggctgccatggcggcggcgggccggctcccgagctcctgggccctcttctcgccgctcctcgcagggcttgcactactgggagtcgggccggtcccagcgcgggcgctgcacaacgtcacggccgagctctttggggccgaggcctggggcacccttgcggctttcggggacctcaactccgacaagcagacggatctcttcgtgctgcgggaaagaaatgacttaatcgtctttttggcagaccagaatgcaccctattttaaacccaaagtaaaggtatctttcaagaatcacagtgcattgataacaagtgtagtccctggggattatgatggagattctcaaatggatgtccttctgacatatcttcccaaaaattatgccaagagtgaattaggagctgttatcttctggggacaaaatcaaacattagatcctaacaatatgaccatactcaataggacttttcaagatgagccactaattatggatttcaatggtgatctaattcctgatatttttggtatcacaaatgaatccaaccagccacagatactattaggagggaatttatcatggcatccagcattgaccactacaagtaaaatgcgaattccacattctcatgcatttattgatctgactgaagattttacagcagatttattcctgacgacattgaatgccaccactagtaccttccagtttgaaatatgggaaaatttggatggaaacttytstgwmagtacymtattggaaaaacctcaaaatatgatggtggttggacagtcagcatttgcagactttgatggagatggacacatggatcatttactgccaggctgtgaagataaaaattgccaaaagagtaccatctacttagtgagatctgggatgaagcagtgggttccagtcctacaagatttcagcaataagggcacactctggggctttgtgccatttgtggatgaacagcaaccaactgaaataccaattccaattacccttcatattggagactacaatatggatggctatccagacgctctggtcatactaaagaacacatctggaagcaaccagcaggcctttttactggagaacgtcccttgtaataatgcaagctgtgaagaggcgcgtcgaatgtttaaagtctactgggagctgacagacctaaatcaaattaaggatgccatggttgccaccttctttgacatttacgaagatggaatcttggacattgtagtgctaagtaaaggatatacaaagaatgattttgccattcatacactaaaaaataactttgaagcagatgcttattttgttaaagttattgttcttagtggtctgtgttctaatgactgtcctcgtaagataacaccctttggagtgaatcaacctggaccttatatcatgtatacaactgtagatgcaaatgggtatctgaaaaatggatcagctggccaactcagccaatccgcacatttagctctccaactaccatacaacgtgcttggtttaggtcggagcgcaaattttcttgaccatctctacgttggtattccccgtccatctggagaaaaatctatacgaaaacaagagtggactgcaatcattccaaattcccagctaattgtcattccataccctcacaatgtccctcgaagttggagtgccaaactgtatcttacaccaagtaatattgttctgcttactgctatagctctcatcggtgtctgtgttttcatcttggcaataattggcattttacattggcaggaaaagaaagcagatgatagagaaaaacgacaagaagcccaccggtttcattttgatgctatgtgacttgcctttaatattacataatggaatggctgttcacttgattagttgaaacacaaattctggcttgaaaaaataggggagattaaatattatttataaatgatgtatcccatggtaattattggaaagtattcaaataaatatggtttgaatatgtcacaaggtctttttttttaaagcactttgtatataaaaatttgggttctctattctgtagtgctgtacatttttgttcctttgtggaatgtgttgcatgtactccagtgtttgtgtatttataatcttatttgcatcatgatgatggaaaaagttgtgtaaataaaaataattaaatgagcaggaaaaaaaaaaaaaaaaaaaaaaaaaaaaagggcggccgc

SEQ ID NO: 371 - DNA, 2381 bp, Homo sapiens
ccacgcgtcccgcaaggccagttctagtgtagagagaaaaaggagccggcagcggctcttacgcgtcccggggctgcgcgccactctctcggccggtaacgcggtgctttgcggctgtcgtcaagcgcggcgttgggccggcgggcgggggctgaggggctgccatggcggcggcgggccggctcccgagctcctgggccctcttctcgccgctcctcgcagggcttgcactactgggagtcgggccggtcccagcgcgggcgctgcacaacgtcacggccgagctctttggggccgaggcctggggcacccttgcggctttcggggacctcaactccgacaagcagacggatctcttcgtgctgcgggaaagaaatgacttaatcgtctttttggcagaccagaatgcaccctattttaaacccaaagtaaaggtatctttcaagaatcacagtgcattgataacaagtgtagtccctggggattatgatggagattctcaaatggatgtccttctgacatatcttcccaaaaattatgccaagagtgaattaggagctgttatcttctggggacaaaatcaaacattagatcctaacaatatgaccatactcaataggacttttcaagatgagccactaattatggatttcaatggtgatctaattcctgatatttttggtatcacaaatgaatccaaccagccacagatactattaggagggaatttatcatggcatccagcattgaccactacaagtaaaatgcgaattccacattctcatgcatttattgatctgactgaagattttacagcagatttattcctgacgacattgaatgccaccactagtaccttccagtttgaaatatgggaaaatttggatggaaacttctctgtcagtactatattggaaaaacctcaaaatatgatggtggttggacagtcagcatttgcagactttgatggagatggacacatggatcatttactgccaggctgtgaagataaaaattgccaaaagagtaccatctacttagtgagatctgggatgaagcagtgggttccagtcctacaagatttcagcaataagggcacactctggggctttgtgccatttgtggatgaacagcaaccaactgaaataccaattccaattacccttcatattggagactacaatatggatggctatccagacgctctggtcatactaaagaacacatctggaagcaaccagcaggcctttttactggagaacgtcccttgtaataatgcaagctgtgaagaggcgcgtcgaatgtttaaagtctactgggagctgacagacctaaatcaaattaaggatgccatggttgccaccttctttgacatttacgaagatggaatcttggacattgtagtgctaagtaaaggatatacaaagaatgattttgccattcatacactaaaaaataactttgaagcagatgcttattttgttaaagttattgttcttagtggtctgtgttctaatgactgtcctcgtagataacaccctttggagtgaatcaacctggaccttatatcatgtatacaactgtagatgcaaatgggtatctgaaaaatggatcagctggccaactcagccaatccgcacatttagctctccaactaccatacaacgtgcttggtttaggtcggagcgcaaattttcttgaccatctctacgttggtattccccgtccatctggagaaaaatctatacgaaaacaagagtggactgcaatcattccaaattcccagctaattgtcattccataccctcacaatgtccctcgaagttggagtgccaaactgtatcttacaccaagtaatattgttctgcttactgctatagctctcatcggtgtctgtgttttcatcttggcaataattggcattttacattggcaggaaaagaaagcagatgatagagaaaaacgacaagaagcccaccggtttcattttgatgctatgtgacttgcctttaatattacataatggaatggctgttcacttgattagttgaaacacaaattctggcttgaaaaaataggggagattaaatattatttataaatgatgtatcccatggtaattattggaaagtattcaaataaatatggtttgaatatgtcacaaggtctttttttttaaagcactttgtatataaaaatttgggttctctattctgtagtgctgtacatttttgttcctttgtggaatgtgttgcatgtactccagtgtttgtgtatttataatcttatttgcatcatgatgatggaaaaagttgtgtaaataaaaataattaaatgagcaggaaaaaaaaaaaaaaaaaaaaaaaaaaaaaaaaaaaaaa

SEQ ID NO: 372 - DNA, 2921 bp, Homo sapiens
ccacgcgtccggatttctgaggttctgcaaacaggccaccctgcagttctgtgtggtgaagccactcatggcggtcagcactgtggtcctccaggccttcggcaagtaccgggatggggactttgacgtcaccagtggctacctctacgtgaccatcatctacaacatctccgtcagcctggccctctacgccctcttcctcttctacttcgccacccgggagctgctcagcccctacagccccgtcctcaagttcttcatggtcaagtccgtcatctttctttccttctggcaaggcatgctcctggccatcctggagaagtgtggggccatccccaaaatccactcggcccgcgtgtcggtgggcgagggcaccgtggctgccggctaccatgacttcatcatctgtgtggagatgttctttgcagccctggccctgcggcaccccttcacctacaacgtctatgctgacaagaggctggacgcacaaggccgctgtgcccccatgaagagcatctccagcagcctcaaggagaccatgaacccgcacgacatcgtgcaggacgccatccacaacttctcacctgcctaccagcagtacacgcagcagtccaccctggagcctgggcccacctggcgtggtggcgcccacggcctctcccgctcccacagcctcagtggcgcccgcgacaacgagaagactctcctgctcagctctgatgatgaattctaggtgcgggctgcagtggcggaagtgctggcgccatagccacggtcaggctgtgccccacctccagcctcaccaccaggccaggaggcagctggcacagtgctcacgccgcctttatttattggaccagaaacactcacatgtcgcttccagaggaacgggggacagccaggctcgcccatgggccttcaggaatatttatacatggcccagcctgcactgcccgggcgagggcagaggacactgggagcaaggcttatgcccctgctgcccgtcctgtgctgggggcatgctgggaccagccgcacccaggccccaatgcttgtgtgtggaccagcggctgcagccttctagcccctcctccccgcgagactctcaggctgaggtcggcaagccgtggctcccccacacaccgtgcaataccctgtctgacctgggctcttcccgcctgcatcccttccctgtccacctttgtccagtgctagattcacctcaccccgggcaggagtggggatgtgggcgctctgtggtcctcccctcctgacccaggcctctgtggcatgctgcaaggatcagagccagacaccaggagtcacaggccccacccaggaagggcattcagggcccctgggcaccgcttctgttgaagcaggggcttctgggcccctgggtatccccacctgtcgtggccacacctctgcctgcctcatgccccttcccctggcctaccaaggacagcccacagcccgcactgccggctcacttgggtccttcctcgatagctttgggcagagcccttgcttcctggctgcttcagggctcaggggctcccagccctccttcccaggctgatgctgggtcctctctctctttggggcttctccctcccgtttcaggggaaaggtctgagtctccacgtttcagaccagcttctgggggaaggcagtccggcagggagaccgggaggggtggccacacagtggggagctgggaggtggggggaatggtcccagactcctctcggggcccctatccacacagggcctggtgttctaccccatctggcccctggcccatctcttctgtgccttagtcacatatgaaagcgcccctccctggctccccatctgtcccacacgctccctggggctcttagttcagctgctggcactcgcaggatcctgcagtgctgggcccagagcccttggacaggcctcaggagtggtcaggaccaccaagcccctcctctccccctccacacctctagacctggggcctccggaacccccagcaggctgggcttatactagctcctgacttaggaagagcctcgtgtcacaacacgtgtccctacaggcaaagtgtcctggcatttaaaacccagattatccctgggtttgggctgcagtcacctggagaagctggtagggtaagggagagggaccctgccggtgttcatggggattctttcttttggtccttcctggaatgaacaggttccctccctgccacctgtgaggagagttggggcccagccgtcttcctggcctccttcctttcctcgtggcagaggcctgcatgtgggtgccagaggccagctctccccctccatcttgggggggcggagcagttgggcccaagctgcccgggagggtgggtgcagacacaggctgaggaccagccctggccctgccccgccatctgctttcaccaagctgtctctccaccgtggcttcccttctccctccaggccaaagtgctgctgattcccactcccttggttttcgcctgcccagcgttgctgtttgcgtggagggtggggggagctcagtggcagggaatcagcggtccgtggggtcgtggggacgggaacatgtgcccgaccgctccatcccctcctcctccttaggatgcataacctaccttgtctttttttttttaattttctttccaggtagagtagctctttgtacataaagaatacttgaaaaattaattgtatgatgtatgagaagacagagtctcctagttttgtatcttgttgtatgactgccatgagttccaccagaaagccactctattttggtctctgtgacattttaaatgcgtgacagaagtgagcaaataaagtgaggaagaaatctaaaaaaaaaaaaaaaaaaaaaaaaaaaaaaaaaaaaaaaaaaaaagg

SEQ ID NO: 373 - DNA, 1259 bp, Homo sapiens
  misc_feature (4)..(4): n equals a,t,g, or c
  misc_feature (18)..(18): n equals a,t,g, or c
gggntacaaaagctgganctccaccgcggtggcggccgctctagaactagtggatcccccgggctgcaggaattcggcacgagtccacacagggcctggtgttctaccccatctggcccctggcccatctcttctgtgccttagtcacatatgaaagcgcccctccctggctccccatctgtcccacacgctccctggggctcttagttcagctgctggcactcgcaggatcctgcagtgctgggcccagagcccttggacaggcctcaggagtggtcaggaccaccaagcccctcctctccccctccacacctctagacctggggcctccggaacccccagcaggctgggcttatactagctcctgacttaggaagagcctcgtgtcacaacacgtgtccctacaggcaaagtgtcctggcatttaaaacccagattatccctgggtttgggctgcagtcacctggagaagctggtagggtaagggagagggaccctgccggtgttcactggggattctttcttttggtccttcctggaatgaacaggttccctccctgccacctgtgaggagagttggggcccagccgtcttcctggcctccttcctttcctcgtggcagaggcctgcatgtgggtgccagaggccagctctccccctccatcttgggggggcggagcagttgggcccaagctgcccgggagggtgggtgcagacacaggctgaggaccagccctggccctgccccgccatctgctttcaccaagctgtctctccaccgtggcttcccttctccctccaggccaaagtgctgctgattcccactcccttggttttcgcctgcccagcgttgctgtttgcgtggagggtggggggagctcagtggcagggaatcagcggtccgtggggtcgtggggacgggaacatgtgcccgaccgctccatcccctcctcctccttaggatgcataacctaccttgtctttttttttttaaattttctttccaggtagagtagctctttgtacataaagaatacttgaaaaattaattgtatgatgtatgagaagacagagtctcctagttttgtatcttgttgtatgactgccatgagttccaccagaaagccactctattttggtctctgtgacattttaaatgcgtgacagaagtgagcaaataaagtgaggaagaaatctatatatgagataatatagattgtattgaaaaaaaaaaaaaaaaaaaaaaaaaaaaactccga

SEQ ID NO: 374 - DNA, 1314 bp, Homo sapiens
atgcggcagctcttctatgaccctgacgagtgcgggctgatgaagaaggggggcttgtacttcagtgacttctggaataagctggacgtcggcgcaatcttgctcttcgtggcagggctgacctgcaggctcatcccggcgacgctgtaccccgggcgcgtcatcctctctctggacttcatcctgttctgcctccggctcatgcacatttttaccatcagtaagacgctggggcccaagatcatcattgtgaagcggatgatgaaggacgtcttcttcttcctcttcctgctggctgtgtgggtggtgtccttcggggtggccaagcaggccatcctcatccacaacgagcgccgggtggactggctgttccgagggccgtctaccactcctacctcaccatcttcgggcagatcccgggctacatcgacggtgtgaacttcaacccggagcactgcagccccaatggcaccgacccctacaagcctaagtgccccgagagcgacgcgacgcagcagagccggccttccctgagtggctgacggtcctcctactctgcctctacctgctcttcaccaacatcctgctgctcaacctcctcatcgccatgttcaactacaccttccagcaggtgcaggagcacacggaccagatttggaagttccagcgccatgacctgatcgaggagtaccacggccgccccgccgtgccgcccccgttgatcctcttcagccacctgcagctcttcatcaagagggtggtcctgaagactccggccaagaggcacaagcagctcaagaacaagctggagaagaacgaggaggcggccctgctatcctgggagatctacctgaaggagaactacctccagaaccgacagttccagcaaaagcagcggcccgagcagaagatcgaggacatcagcaataaggttgacgccatggtggacctgctggacctggacccactgaagaggtcgggctccatggagcagaggttggcctccctggaggagcaggtggcccagacagcccgagccctgcactggatcgtgaggacgctgcgggccagcggcttcagctcggaggcggacgtccccactctggcctcccagaaggccgcggaggagccggatgctgagccgggaggcaggaagaagacggaggagccgggcgacagctaccacgtgaatgcccggcacctcctctaccccaactgccctgtcacgcgcttccccgtgcccaacgagaaggtgccctgggagacggagttcctgatctatgacccacccttttacacggcagagaggaagga

SEQ ID NO: 375 - DNA, 468 bp, Homo sapiens
gtgagaagataatcctgagaggctgcatcctgagaaataccagctggtgttttggaatggttatttttgcaggtcctgacactaaactaatgcagaatagtggtaagacaaagtttaaaaggacaagcattgatagattgatgaatactctagtactatggatttttgggtttctgatatgcttgggaattattcttgcaataggaaattcaatctgggagagtcaaactggggaccaattcagaactttcctcttttggaatgaaggagagaagagctctgtgttctccggattcttaacattctggtcatatattattattctcaatacagttgtacccatttccttatatgtgagtgtggaagtaattcgtctaggacacagttattttataaactgggaccggaagatgtattatyctcgaaaagcaatacctgcagtggctcgaacgaccacgctcaatgagg

SEQ ID NO: 376 - DNA, 181 bp, Homo sapiens
  misc_feature (178)..(178): n equals a,t,g, or c
ggtcagtgtgcagatagccttggataccagktactggactttcattaatcacgtcttcatctgggggagcattgccatttatttctccattttatttacaatgcacagtaatggcatctttggcatcttcccaaaccagtttccatttgttggtaatgcacgacattccctgacccanaag

SEQ ID NO: 377 - DNA, 612 bp, Homo sapiens
  misc_feature (47)..(47): n equals a,t,g, or c
  misc_feature (534)..(534): n equals a,t,g, or c
  misc_feature (537)..(537): n equals a,t,g, or c
  misc_feature (563)..(563): n equals a,t,g, or c
  misc_feature (565)..(565): n equals a,t,g, or c
  misc_feature (591)..(591): n equals a,t,g, or c
cagtctgggcttaagaaaccaccagaagaacccaaaccagaaatgcncaagtgtaaatgcaaaaattcttatagaagaaatagcataagaatttgcacattcggaaataagaccaccttccatgaacaaggagaagcctttggagatatctaaactgtgcaaatgaatagtcgctggctaagactgcttgcaatccttcctggccgctgatgccaacaccaatgtgagcacttttaatcatgctgacatcattggctccatcwccaatggccaaagtaacagcatttctgtacttcttcaccagctctaccacttgggctttctggagtggagtgaccctgcagcaaattacagtcttacacatgcaagcaagttctaggagatcattcttgacatcactttctagggcatgagccaaactgtggccatttatgattaaggcataatctcctgttatggtttcttctacaatagaatccaactccagctgctgctttttttcacaaactacatggccattggaaaaatttctgnttngtccaaacaaattttgttttgaaatnangagttcttctctcacttccacagcanttattccctgctatagggagg

SEQ ID NO: 378 - DNA, 1024 bp, Homo sapiens
  misc_feature (29)..(29): n equals a,t,g, or c
  misc_feature (986)..(986): n equals a,t,g, or c
tgctttcctgagttcttctctcacttccncagcattattccctgctatcccaaacmcatcattcatgtcgtcagtcagcatgttgcaggcataaccgatgttgatgscagtttcttgtttgtctcctgttaggacccagatcttaatattggctagtgataaacttgtaactgtttcaataacaccctcctgtaacttatcttctacagcagtggcacctagtagcatcaaatctctttcaatttcttcatatagcccagctattcgttcatccctctcttctgtggcaacattcgcatcttcaagcatcttatgccactctttaaagtacttgtcatccaggtctctgtatgcgatggccaaggtccgaaggccttcccctgcaaattcactgaggtggtctgacgtcaaagacaaaaggacttcattggaaggatsaagtttctcaaacagaatagtatctgctcctttggaataaagctttatctgtccttctgggtttcgarctatgacagacatcctttttctggtgttgttgaaatccaaaaaggcaagtaattgataagtaactagtgttcccaattcttctattgttatggtctctggggtccgggatttaaaratgaacccaaaatttctagcggcagtcactagagccccttcatcaggtgactgaacttggtaaatcagctctcctgcgctattctcttctgacattacagtgtggcagagagcaagtaacctaaggaattcatgaactttgggatcacccattttaatggattccatcagattgtggtcaaagaactgaaattctctatccgcttgagatttgactgagaaatccacaggctctttttcctgagttatttctgtcttctgatccaggtcatcatgtacttcaccatagattctcccattaatggaacatcttttaaaggtcatgatgttttgagtgagggtacccgttttgtcggagaaaatgnactcaatctgccccagttcttcattgagcgtggtcgtt

SEQ ID NO: 379 - DNA, 366 bp, Homo sapiens
gacgcgtgggagctcattatccatcaaactcactcargtgwcacytgagtgagtttgatggataatgagctaatgtgatatctataggtcacaattttttaaaaccaaaattttcaagtctgggataatctttcctaaatgggatcaaatgaaataatatgtgtaaaagagtcaaatgcagtcctttaccatagtaactgcctatggacgttgtctttcccttacatgcctgcctacacttaaccagatgttggttttcaagtctaatktgtcattagtttcaccacattkgctcacttttkgtaacatttttgcaagatttgaaaactttcagtaaatgttttggcactattggtaaaaaaaaaa

SEQ ID NO: 380 - DNA, 519 bp, Homo sapiens
  misc_feature (371)..(371): n equals a,t,g, or c
cctggttagggtcctacagggaaataaaattataaccgtggaggtacatttctctaccagaaagcaaaaataaagcatcatgtcttaatggttttctacaaatcaacttctaattctacagagtccttaatctggtccctattaaattcttggtcagacaaagttacatttcccaagagagtcaggtgacacttgagtgagtttgatggataatgagctaatgtgatatctataggtcacaattttttaaaaccaaaattttcaagtctgggataatctttcctaaatgggatcaaatgaaataatatgtgtaaaagagtcaaatgcagtcctttaccatagtaactgcctatggacgttgtctttccctnacatgcctgcctacacttaaccagatgttggttttcaatgtctaatttgtcattagtttcaccacatttgctcactttttgtaacatttttgcaagatttgaaaactttcagtaaatgttttggcactattggtaaaaaaaaaaaaaa

SEQ ID NO: 381 - DNA, 1867 bp, Homo sapiens
cccacgcgtccgggccacagcagagacagtggagggcagtggagaggaccgcgctgtcctgctgtcaccaagagctggagacaccatctcccaccgagagtcatggccccattggccctgcacctcctcgtcctcgtccccatcctcctcagcctggtggcctcccaggactggaaggctgaacgcagccaagaccccttcgagaaatgcatgcaggatcctgactatgagcagctgctcaaggtggtgacctgggggctcaatcggaccctgaagccccagagggtgattgtggttggcgctggtgtggccgggctggtggccgccaaggtgctcagcgatgctggacacaaggtcaccatcctggaggcagataacaggatcgggggccgcatcttcacctaccgggaccagaacacgggctggattggggagctgggagccatgcgcatgcccagctctcacaggatcctccacaagctctgccagggcctggggctcaacctgaccaagttcacccagtacgacaagaacacgtggacggaggtgcacgaagtgaagctgcgcaactatgtggtggagaaggtgcccgagaagctgggctacgccttgcgtccccaggaaaagggccactcgcccgaagacatctaccagatggctctcaaccaggccctcaaagacctcaaggcactgggctgcagaaaggcgatgaagaagtttgaaaggcacacgctcttggaatatcttctcggggaggggaacctgagccggccggccgtgcagcttctgggagacgtgatgtccgaggatggcttcttctatctcagcttcgccgaggccctccgggcccacagctgcctcagcgacagactccagtacagccgcatcgtgggtggctgggacctgctgccgcgcgcgctgctgagctcgctgtccgggcttgtgctgttgaacgcgcccgtggtggcgatgacccagggaccgcacgatgtgcacgtgcagatcgagacctctcccccggcgcggaatctgaaggtgctgaaggccgacgtggtgctgctgacggcgagcggaccggcggtgaagcgcatcaccttctcgccgccgctgccccgccacatgcaggaggcgctgcggaggctgcactacgtgccggccaccaaggtgttcctaagcttccgcaggcccttctggcgcgaggagcacattgaaggcggccactcaaacaccgatcgcccgtcgcgcatgattttctacccgccgccgcgcgagggcgcgctgctgctggcctcgtacacgtggtcggacgcggcggcagcgttcgccggcttgagccgggaagaggcgttgcgcttggcgctcgacgacgtggcggcattgcacgggcctgtcgtgcgccagctctgggacggcaccggcgtcgtcaagcgttgggcggaggaccagcacagccagggtggctttgtggtacagccgccggcgctctggcaaaccgaaaaggatgactggacggtcccttatggccgcatctactttgccggcgagcacaccgcctacccgcacggctgggtggagacggcggtcaagttgctgcgcgccgccatcaagatcaacagccggaaggggcctgcatcggacacggccagccccgaggggcacgcatctgacatggaggggcaggggcatgtgcatggggtggccagcagcccctcgcatgacctggcaaaggaagaaggcagccaccctccagtccaaggccagttatctctccaaaacacgacccacacgaggacctcgcattaaagtattttcggaaaaaaaaaaaaaaaaaaaaaaaaaaaaaaaaaaaaaaaaaaaaaaaaaaaaa

SEQ ID NO: 382 - DNA, 1722 bp, Homo sapiens
  misc_feature (401)..(401): n equals a,t,g, or c
  misc_feature (695)..(695): n equals a,t,g, or c
gggaccgcgctgtcctgctgtcaccaagagctggagacaccatctcccaccgagagtcatggccccattggccctgcacctcctcgtcctcgtccccatcctcctcagcctggtggcctcccaggactggaaggctgaacgcagccaagaccccttcgagaaatgcatgcaggatcctgactatgagcagctgctcaaggtcaccatcctggaggcagataacaggatcgggggccgcatcttcacctaccgggaccagawyacgggctggattggggagctgggagccatgcgcatgcccagctctcacaggatcctccacaagctctgccagggcctggggctcaacctgaccaagttcacccagtacgacaagaacacgtggacggaggtgcacgaantgaagctgcgcaactatgtggtggagaaggtgcccgagaagctgggctacgccttgcgtccccaggaaaagggccactcgcccgaagacatctaccagatggctctcaaccaggccctcaaagacctcaaggcactgggctgcagaaaggcgatgaagaagtttgaaaggcacacgctcttggaatatcttctcggggaggggaacctgagccggccggccgtgcagcttctgggagacgtgatgtccgaggatggcttcttctatctcagcttcgccgaggccctccgggccnacagctgcctcagcgacagactccagtacagccgcatcgtgggtggctgggacctgctgccgcgcgcgctgctgagctcgctgtccgggcttgtgctgttgaacgcgcccgtggtggcgatgacccagggaccgcacgatgtgcacgtgcagatcgagacctctcccccggcgcggaatctgaaggtgctgaaggccgacgtggtgctgctgacggcgagcggaccggcggtgaagcgcatcaccttctcgccgcgctgccccgccacatgcaggaggcgctgcggaggctgcactacgtgccggccaccaaggtgttcctaagcttccgcaggcccttctggcgcgaggagcacattgaaggcggccactcaaacaccgatcgcccgtcgcgcatgattttctacccgccgccgcgcgagggcgcgctgctgctggcctcgtacacgtggtcggacgcggcggcagcgttcgccggcttgagccgggaagaggcgttgcgcttggcgctcgacgacgtggcggcattgcacgggcctgtcgtgcgccagctctgggacggcaccggcgtcgtcaagcgttgggcggaggaccagcacagccagggtggctttgtggtacagmcgccggcgctctggcaaaccgaaaaggatgactggacggtcccttatggccgcatctactttgccggcgagcacaccgcctacccgcacggctgggtggagacggcggtcaagtcggcgctgcgcgccgccatcaagatcaacagccggaaggggcctgcatcggacacggccagccccgaggggcacgcatctgacatggaggggcaggggcatgtgcatggggtggccagcagcccctcgcatgacctggcaaaggaagaaggcagccaccctccagtccaaggccagttatctctccaaaacacgacccacacgaggacctcgcattaaagtattttcggaaaaaaaaaaaaaaaaaaaaaaaaaaaaaaaaaaaaaaaaaaaaaaaaaaaaagggcggcc

SEQ ID NO: 383 - DNA, 2042 bp, Homo sapiens
  misc_feature (2001)..(2001): n equals a,t,g, or c
ggtcagctttcatctcgtcctatctttgttcaggcaaacttctctagttctgttttaataggcatatttgttaggtctgttttttgaaatcctcttttttacattgtttaaagataatgccttggctaaaaagcctgcttcacttttccctgtttttagttgttttctccacattggcagtaaagagccttggcgtcccagtagcagcaggttctcctttttgtattgtggatgttttgcatttcatactgttgtgaagagtggctttgatcatacatgttgttggtatatttgccyttttgctgggggtgtgagaagaaccagagatgagcagaggtacacccagtagacttcccagcctgcagagcctcccgggaagagcttccgtgttcaggtgcttggggccccwccctaggagcctgwctcwcagtcagagcwgggtcccggcttgygttcaggattttgaaacatttgtawggtgattttgttgtttctacacctttctcctcatctttttttttttgtagttaatcgttactaataacagaaaagacatttttggcatggtaattggcacaaagtgaataattgttgaatagatgacttttgaggctttcaaaattcgagtgtccataaaatccatccagagccacctggttcctttttttgaaccacttaacgtaattctggaaaaccttgactgtgggtcttaagtttggtggattgctgcttctcactggctgacctttggaggtcgcatatttcaggatgtgattccacttaggctccatttcacctgacactgcaattctgtgccttcagagggatttgttattgcgaatgatgtggacaacaagcgctgctacctgctcgtccatcaagccaagaggctgagcagcccctgcatcatggtggtcaaccatgatgcctccagcatacccaggctccagatagatgtggacggcaggaaagagatcctcttctatgatcgaattttatgtgatgtcccttgcagtggagacggcactatgagaaaaaacattgatgtttggaaaaagtggaccaccttaaatagcttgcagctacatggcttacagctgcggattgcaacacgcggggctgaacagctggctgaaggtggaaggatggtgtattccacgtgttcactaaaccctattgaggatgaagcagtcatagcatctttactggaaaaaagtgaaggtgctttggagcttgctgatgtgtctaatgaactgccagggctgaagtggatgcctggaatcacacagtggaaggtaatgacgaaagatgggcagtggtttacagactgggacgctgttcctcacagcagacacacccagatccgacctaccatgttccctccgaaggacccagaaaagctgcaggccatgcacctggagcgatgccttaggatattaccccatcatcagaatactggagggttttttgtggcagtattggtgaaaaaatcttcaatgccgtggaataaacgtcagccaaagcttcagggtaaatctgcagagaccagagaaagcacacagctgagccctgcagatctcacagaagggaaacccacagatccctctaagctggaaagtccgtcattcacaggaactggtgacacagaaatagctcatgcaactgaggatttagagaataatggcagtaagaaagatggcgtgtgtggtcctcctccatcaaagaaaatgaagttatttggatttaaagaagatccatttgtatttattcctgaagatgacccattatttccacctattgagtaaggattcagcctttttaattattcatttaaagaaatttactatagagtatcaaatgtacaactgatcacatgtaaccattgttttgtatgtagttctgtctagcttttttttttttttaacctttttaactgcatattagagcaggatgaaactttagaggttactcaatcttttaatttaaggagaaagtaaacanttactttgtgaacatgatagataaaaaaaaactggaccggg

SEQ ID NO: 384 - DNA, 308 bp, Homo sapiens
ggaggcaggaccttgtcctattcattaatcttgcccctcaacagttattttcagaggggcaagaagtgtttcagggttcttggcccttgtttgaccagtcgtcctaaccctcrtgtcttgggtcattgttgttrtaatctggggttaccttttggaaggtcatggggtacccttttgcaaaagttatgggccctmtccttggaaactgcacacacaccatgcagcttacaattcagggagttcacaggtctacagaatcctgggaaactctccatgtccggttctaatccattgtagcttcagtggga

SEQ ID NO: 385 - DNA, 1568 bp, Homo sapiens
  misc_feature (1550)..(1550): n equals a,t,g, or c
  misc_feature (1564)..(1564): n equals a,t,g, or c
ctcatcagccctatgaggtagggaggtaggtattattatcacccttgttagtttttttgttttgttttgttttccagatgagagaatcattgctcacagaagtgaagtaacttttccaaggtcatacaatcagtaagtggcaggcaaggactgaaatccaagttgttaccctccaaagtccctgctctgagaactggaggaattctttatcaaatctaaaatcctcttttagscctgtctgctttaatattccggtctttattgatccttctcttctctaaamcttcagctgtcagtataaaaatcaaggaatttagcmcttgttattgtgtgamcagcttcttgtctctcctgtactgtaagtgggtctagggatttttattctttaaatatccccctgtactcagtagatctttgggagamcaagctcataggcttctaataattctttctttgactgccagctgaattagacagaaggtaagtcctgctgccgtgtcgtgcctaaccccatctttatttcctgtgctgttagagaacagtcttttcttggctggaacaaatactacagcctgctcaactagctaatatgtattgagttcttartatgttccaaggactgctctaagtattttatatatattaactcactgaatcttaaataccctatgagctaagtcctatttttatccccattttacaaaagaggaaactgaatgtaccagtgcatcagtatttgactgagtaaatgaatgactgctttgctgatggatagtattattagcaacaaccctacaaatatgatgttatgtttgcatcatgcagtacagctttatgtaccttatgtcattgtcactcatgattagcaaataggcacgaacatccctattttatagaagaggaamccatggctctaagagggtgagtgattctcaacagtcacatgccatctgtatccttcagtaaacaaggtatttggtccattccaggatcgggggcaagagagatgggagggcctcggtgagaaacactcatattcacaaaaggtactagatagatagacagataaataaataaatagagataaaagctagtaatagcagagatttgatgggaattcagatctttgattcctagtccagtgctctttcttttatgtaaggtgatgggaagcaagtcttaggtccagatctggcagctgctttgatttaggatcttaagccagaagcagcagcgccctaaacaaaaagcatcattttaacttctctgcatttctcacattctcaacaatgaccatgccctactttcataattaaaaacaaacaaataaacagagggggcaaaatgcatccttctgagtgggctggggcttgtagagggattcttgggtttgctctgggatgtctttgggcccctgcacttgtgggcactctgatttatccccacaggccacctggcccaccttatgggctgaggagggcttgatgggcggaggsaagcagagctgaggagctggggaggagctggaaaggactgctagaaggttccantgaagctacaatgngtag

SEQ ID NO: 386 - DNA, 865 bp, Homo sapiens
  misc_feature (13)..(13): n equals a,t,g, or c
  misc_feature (20)..(20): n equals a,t,g, or c
accgcagcctgcngggctcnagcattcctytsgcytcagcctcctgaktagctgggaccmcagytccactaattttgaagttttttkggtagacatgaagtctccctgtgttgcccgggctggtctcaaactcctgacctcaagcagtcctcctgtcttggcctctggaaatgctgggattacaggcgtgagccactgtgctggcctcttttttctttttctttttttttaaggtttttatttgttaaatgggaagtctgtgccatcaactgagcattgtattttctccttagtaagagcctgggtgggccactgggagagaactatacattaaatgtaagtagcctctgggtagagagcccctggctggtttcctttcctttctctccttttctctactttggtgtctggaggcatttcccagactccagtttcttaccaccctcacggattttgctattgtattatcacctcctttatcattcccaaaattgactttatggagactcattaaaagaaagaatcatcggccgggagcgtkgctcacgccacgaaggcgggcgaatcacctgaggtgcggagttcgtgaccagcctgaccaaaacagagaaaccccatctctactaaacaatacaaaattagctgggcgtggtggtgcacgcctgtaatcccagctactggggaggctgggacgggagaatcacttgaacccgggaggcagaggttgcagtgaccaaagatcgcactattgcactccagcctgggcaacaagagcaaaactctatctcaaaaaaaaaaaaaaaaaaaaaaaaaagggcggccgctctagaggatccctcgaggggcccaagcttaggcgtgcatg

SEQ ID NO: 387 - DNA, 1687 bp, Homo sapiens
  misc_feature (1568)..(1568): n equals a,t,g, or c
  misc_feature (1652)..(1652): n equals a,t,g, or c
  misc_feature (1654)..(1654): n equals a,t,g, or c
  misc_feature (1660)..(1661): n equals a,t,g, or c
ccacgcgtccgggcagtggggtgagggcacacaagcagttcagggtcccagcaggaagtggggctgcagggccggggtgggtcctgggcctggccatcaggcagcctagcaggttgttctgggcatggagggggcctggtgtggctgagggcatgcccagggctccctggaggatcccgctctgtgccctgcccaccctgtgcctggggagccctctgccctcacagcccacccaccccattttctatgaccacagagctccgacctggaagatggctcacccaggaggtcccaggagctctcactcccccaggggacctggaggacacccagctctcagacaaaggctgccttgccggcggggggagcccgaaacagccctttgcagctctgcaccaggagcaggttttgcggaacccccatgtaaggcttccccggggtggggtcctcccagccgtgggcctcagggtgaccgatcacagggagagtggctccctgccctgggcaccccctgcggtggccccgacgacagctgaggagtgaccacaaggtctctgcccacagtgctcggggtgcggtgtctgggctgcgaagtggatccccctcctttcttgggcactgcagcagcttggggggctttttggacgtggatgtgcctggtcctggtttcccgagggcctttacagtggatgaggaggtgaacacagggagtcctgagagcaagcaccacctcgggctttggtgtagaaacaatggcccggaccccaggccggagccgtggcttggcctcctgggtgtgtcttggcatctgaaatgcaggctacccacaccggctcacctccaggggtacaggcaggtcccacagggagagcttggcgctgagctgaggctgtctgggctcctcgcctcccaaccagtctgcagttacaggggccagtggatgggcgggtgagaaggacgggttccctcaggggagccggccggagcccgagccttcccccttctccaggacgcaggcctgagcagcggggagccgcccgagaaggagcggcggcgcctcaaagagagttttgagaactaccgcaggaagcgcgccctcaggaagatgcagaaaggatggcggcagggtggaggaggaccgggagaacaccacgggcagcgacaacaccgacactgagggctcctagccgcagcagccgcaggccccgaccagggcacacccaccggcccggcctcctgccacccgggggtgccgacgccctggggcgcagacttccccgagccgtcgctgacttggcctggaacgaggaatctggtgccctgaaaggcccagccggactgccgggcattggggccgtttgttaagcggcactcattttgcggaggccatgcgggtgctcaccacccccatgcacacgccatctgtgtaacttcaggatctgttctgtttcaccatgtaacacacaatacatgcatgcattgtattagtgttagaaaacacagctgcgtaaataaacagcacgggtgacccgcaaaaaaaaaaaaaaaaaaaaaaaaaaaaaaaaaanaaaaaaaaaaaaaaaaaaaaaaaaaaaaaaaaaaaaaaaaaaaaaaaaaaaaaaaaaaaaaaaaaaaaaaaaaaaaaaaaaaananaaaaannaaaaaaaaaaaaaaaaaaaaaaaaaa

SEQ ID NO: 388 - DNA, 570 bp, Homo sapiens
  misc_feature (5)..(5): n equals a,t,g, or c
  misc_feature (16)..(16): n equals a,t,g, or c
  misc_feature (496)..(496): n equals a,t,g, or c
  misc_feature (523)..(523): n equals a,t,g, or c
  misc_feature (531)..(531): n equals a,t,g, or c
ttccngtgccactatngaatgtacgcctgcaggtaccggtccggaattcccgggtcgacccacgcgtccgggcagtggggtgagggcacacaagcagttcagggtcccagcaggaagtggggctgcagggccggggtgggtcctgggcctggccatcaggcagcctagcaggttgttctgggcatggagggggcctggtgtggctgagggcatgcccagggctccctggaggatcccgctctgtgccctgcccaccctgtgcctggggagccctctgccctcacagcccacccaccccatttwctatgaccacagagctccgacctggaagatggctcacccaggaggtcccaggagctctcactcccccaggacctggargacacccagctctcagacaaargctgccttgccggcggggggagcccgaaacagccctttgcagctctgcaccaggagcaggttttgcggaacccccatgtaaggcttccccggngtggggtcctccagccgtgggcctcanggtgaccnatcacagggagagtggctccctgtcctgggcaccccctg

SEQ ID NO: 389 - DNA, 1752 bp, Homo sapiens
  misc_feature (1099)..(1099): n equals a,t,g, or c
aaggtacgcctgcaggtaccggtccggaattcccgggtcgacccacgcgtccgtccaggacagagagtgcacaaactacccagcacagccccctccgccccctctggaggctgaagagggattccagcccctgccacccacagacacgggctgactggggtgtctgccccccttgggggggggcagcacagggcctcaggcctgggtgccacctggcacctagaagatgcctgtgccctggttcttgctgtccttggcactgggccgaagcccagtggtcctttctctggagaggcttgtggggcctcaggacgctacccactgctctccgggcctctcctgccgcctctgggacagtgacatactctgcctgcctggggacatcgtgcctgctccgggccccgtgctggcgcctacgcacctgcagacagagctggtgctgaggtgccagaaggagaccgactgtgacctctgtctgcgtgtggmtgtccacttggccgtgcatgggcactgggaagagcctgaagatgaggaaaagtttggaggagcagctgacttaggggtggaggagcctaggaatgcctctctccaggcccaagtcgtgctctccttccaggcctaccctactgcccgctgcgtcctgctggaggtgcaagtgcctgctgcccttgtgcagtttggtcagtctgtgggctctgtggtatatgactgcttcgaggctgccctagggagtgaggtacgaatctggtcctatactcagcccaggtacgagaaggaaytcaaccacacacagcagctgcctgactgcagggggctcgaagtctggaacagcatcccgagctgctgggccctgccctggctcaacgtgtcagcagatggtgacaacgtgcatctggttctgaatgtctctgaggagcagcacttcggcctctccctgtactggaatcaggtccagggccccccaaaaccccggtggcacaaaaacctgactggaccgcagatcattaccttgaaccacacagacctggttccctgcctctgtattcaggtgtggcctctggaacctgactccgttagacgaacatctgccccttcaggnaggacccccgcgcacaccagaacctctggcaagccgcccgactgcgactgctgaccctgcagagctggctgctggacgcaccgtgctcgctgcccgcagaagcggcactgtgctggcgggctccgggtggggacccctgccagccactggtcccaccgctttcctgggagaaygtcactgtggacaaggttctcgagttcccattgctgaaaggccaccctaacctctgtgttcaggtgaacagctcggagaagctgcagctgcaggagtgcttgtgggctgactccctggggcctctcaaagacgatgtgctactgttggagacacgaggcccccaggacaacagatccctctgtgccttggaacccagtggctgtacttcactacccagcaaagcctccacgagggcagctcgccttggagagtacttactacaagacctgcagtcaggccagtgtctgcagctatgggacgatgacttgggagcgctatgggcctgccccatggacaaatacatccacaagcgctgggccctcgtgtggctggcctgcctactctttgcctgcgctttccctcatcctccttctcaaaaaggatcacgcgaaagggtggctgaggctcttgaaacaggacgtccgctcgggggcggccgc

SEQ ID NO: 390 - DNA, 536 bp, Homo sapiens
  misc_feature (508)..(508): n equals a,t,g, or c
ggtcgacccacgcgtccgcccacgcgtccggcttccttaatgtaatttaaaccctggcaaacattctttagaaaccaagaggaaagaaagaacaaatatcaaaaaagacatagaatttaatattgatacaatttcacctctaaaatggatttgaagaaatgcaactttatatcaaaaaatgtcatctgatttcctttgtttcttttttaaattatgtaatcagatgattttatgtttttttttcaggggagcggaatattggtttcttttacttgttgttttcagttttctctgccattcatgtttcttttttgtgttcagtgtttcaaatacaatttgtatttaaggattttaaaataccaaactgtaactgagtacagtggatcgttttctgttaggatgttaatattatacaatgaaatctataaagtgttgtcaatttgattattgacacatataacatgtttacaaataaactgtggtattgatcaaaaaaaaaaaaaaaaancccggggggggccccggaacccaatccc

SEQ ID NO: 391 - DNA, 716 bp, Homo sapiens
  misc_feature (630)..(630): n equals a,t,g, or c
  misc_feature (710)..(710): n equals a,t,g, or c
gcctcagcggccgggcccacggccccgagcagccatgctgggcgcgcgggcctggttgggccgcgtccttctgctgccccgcgccggtgcaggcctcgccgcragccgcaggtgtcctggagtctggcccaggacctggccccacaggagtcccagcaggggtagctcctcccgggacaaggaccgaagtgcgacggtcagtagttcagtgcccatgcctgctggagggaaaggaagccatccttcatctacaccccagagggtccccaaccgcctgatccacgagaagtcaccatacctcctacaacatgcctacaatcctgtggactggtacccctggggacaggaagccttcgacaaggccaggaaggaaaacaagccgattttcctctcagtcgggtactccacctgccactggtgccacatgatggaagaggagtccttccagaatgaggagattggccgcctgctcagtgaggactttgtgagtgtgaaggtagaccgtgaggagcggcctgacgtggacaaggtgtacatgacgttcgtgcaggccaccagcagcggcgggggctggcccatgaatgtgtggctgactcccaacctccagccctttgtcgggggcactatttncctcctgaaggatggcttgamccgagtsggttccgcacagtgttkctgagaatacgagaacartggaaacagaacaagancaccct

SEQ ID NO: 392 - DNA, 2716 bp, Homo sapiens
ggccgggcccacggcmccgagcagccatgctgggcgcgcgggcctggttgggccgcgtccttctgctgccccgcgccggtgcaggcctcgccgcgagccgcaggtctgcctgcagtcccacttccaggctgaactccctgaggtctctgattccctaggtgtcctggagtctggcccaggacctggccccacaggagtcccagcaggggtagctcctcccgggacaaggaccgaagtgcgacggtcagtagttcagtgcccatgcctgctggagggaaaggaagccatccttcatctacaccccagaggktccccaaccgcctgatccacgagaagtcaccatacctcctacaacatgcctacaatcctgtggactggtacccctggggasaggaagccttygacaaggccaggaaggaaaacaagccgattttcctctcagtcgggtactccacctgccactggtgccacatgatggaagaggagtccttccagaatgaggagattggccgcctgctcagtgaggactttgtgagtgtgaaggtagaccgtgaggagcggcctgacgtggacaaggtgtacatgacgttcgtgcaggccaccagcagcggcgggggctggcccatgaatgtgtggctgactcccaacctccagccctttgtcgggggcacctatttccctcctgaggatggcttgacccgagtcggcttccgcacagtgttgctgagaatacgagaacagtggaaacagaacaagaacaccctgctagaaaatagccagcgtgtcaccactgccctgctggcccgatcagagatcagcgtgggtgaccgccagctgccgccctctgccgccaccgtgaacaatcgctgcttccagcagctggatgagggctatgatgaggaatacggtggcttcgctgaggcccccaagtttcccacgccggtgatcctgagcttcctgttctcctactggctcagccatcgactgactcaggatggctctcgggcccagcagatggccttgcataccctgaaaatgatggctaacgggggcatccgggaccatgtggggcagggctttcaccgctactccacagaccgccagtggcacgtccctcactttgagaagatgctctatgaccaggcacagctcgctgtggcctattcgcaggccttccagctctctggtgatgaattctactctgacgtggccaaaggcatcctgcagtacgtggctcggagcctgagccaccggtccggaggcttctatagcgcagargatgcagactcgcccccagagcggggccagcggcccaaagagggcgcctactatgtgtggacggtcaaagaggttcagcagctcctcccggagcctgtgttgggtgccaccgagccgctgacctcaggccagctcctcatgaagcactacggcctcacagaggctggtaacatcagccccagtcaggaccccaagggggagctgcagggccagaatgtgctgaccgtccggtactcgctggagctgactgctgcccgctttggcttggatgtggaggccgtgcggaccttgctcaattcagggctggagaagctcttccaggcccggaagcatcggcccaagccgcacctggacagcaagatgctggctgcctggaatggcttgatggtgtcaggctatgctgtgactggggctgtcctgggccaagacaggctgatcaactatgccaccaatggtgccaagttcctgaagcggcacatgtttgatgtggccagtggccgcctgatgcggacctgctacaccggccctggggggactgtggagcacagcaacccaccctgctggggcttcctggaggactacgccttcgtggtgcggggcctgctggacctgtatgaggcctcacaggagagtgcgtggctcgagtgggctctgcggctgcaggacacacaggacaggctcttttgggactcccagggtggcggctacttctgcagtgaggctgagctgggggctggcctgcccctgcgtctgaaggacgaccaggatggagcagagcccagcgccaattccgtgtcagcccacaacctgctccggctgcatggcttcacgggccacaaggactggatggacaagtgtgtgtgcctattgaccgccttttccgagcgcatgcgtcgtgtcccggtggcgttgcccgagatggtccgcgccctctcagcccagcagcagaccctcaagcagatcgtgatctgtggagaccgtcaggccaaggacaccaaggccctggtgcagtgcgtccactctgtctacattcctaacaaggtgctgattctggctgatggggacccctcgagcttcctgtcccgccagctgcctttcctgagtaccctccgacggttggaagaccaggccactgcatatgtgtgtgagaatcaagcctgctcagtgcccatcactgatccctgcgaattacgaaaactactacatccatgactgccccaacccccttggggtggggcagaaggtgaagcatcccaactgactagagactcaggccctgcagggccctatagaacctgtggccatccctgagcaccctgccaccaggtgacctcggccatactcactgccccccttgggcacccactcaccctagaataaacttaacagtgtcccgtggtaaaaaaaaaaaaaaaaaaaaaaaaaaaagggcggccgc

SEQ ID NO: 393 - DNA, 2409 bp, Homo sapiens
  misc_feature (694)..(694): n equals a,t,g, or c
  misc_feature (716)..(716): n equals a,t,g, or c
  misc_feature (755)..(755): n equals a,t,g, or c
  misc_feature (761)..(761): n equals a,t,g, or c
  misc_feature (791)..(791): n equals a,t,g, or c
  misc_feature (808)..(808): n equals a,t,g, or c
  misc_feature (880)..(880): n equals a,t,g, or c
ccacgcgtccggcgagacgcgttcaccaccatatgcactgttgtcaactcccctggagatgcgcccaagccccacaggaagccttcctcctctgcctcctcttcctcatcctcgtcctcgttctccttggatgcagccggggcctccctggccacactccctggaggctccatcctgcagccgcggccctccttgcccctctcctccacgatgcacttggggcctgtggtttccaaggccctgagtacctcttgccttgtttgctgcctctgccaaaacccggccaacttcaaggaccttggggacctctgtgggccctactaccctgaacactgcctccccaaaaagaagccaaaactcaaggagaaggtgcggccagaaggcacctgtgaggaggcctcgctgccgcttgagagaacactcaaaggtcccgagtgtgcagctgccgccactgccgggaagccccccaggcctgacggcccagctgacccggccaagcagggcccactgcgcaccagtgcccggggcctgtcccggaggctgcagagctgctactgctgtgatggccgggaggatgggggcgaggaggcagccccagccgacaagggtcgcaaacatgagtgcagcaaggaggctccggcagagcccggcggggaggcccaggagcactgggtgcatgaggcctgtgccgtgnggaccggcggcgtctacctggnggccgggaagctctttgggctgcaggaggccatgaaggnggccgnggacatgatgtgttccagctgccaagaagncggggccaccatcgggngctgccacaaaggatgcctccacacctaccactacccgtgtgccagcgatgcaggttgcatattcatcgaanagaacttttctttgaaatgtcccaaacataagaggctgccgtagtaatccaccccaacggccggaggagccgccggagcccgcctgcccgcccgccgccgaaggagaggagccgcctgcgcagcccccgggcctttgagctgctcccagcgctggtccagagccgatccttgatccgggtcccggatcgtggatccggccgcctagggctcagacttgcggccccgggttgggaggaaaacccgttccggagccgcctgctcccggaaccggacggcacagggcgttcttgcccaccccaggggccaggcttgcggagggggagcccgcggagcggccagactccccggggcgctcagcctccggcgagggtgggagacggctttgtcctggggacactttccctctggaatctcaagacgacgtggcacacattccacgtgggtgctgccgccaccccagtcggtcgtggcgtgcagctgggagccctgggcttgggggtgggggtcgaaacagtactggaagaggcggagggcggctcctagctccgtggactaggcgggggagaaaggaagcctttctgagagcgggctaggccggcactggagaggccggagcctttggaacaaaccgtgcggaacgcgtccaggggccttcccgcccagcctttgccagatctctcgtgcggttcgggcaaagccggggtagacctgggctatgctcagttaggggttgcgggatccccgagtgtgggcgggactgggacaccctttggcctctgtttgtcccctttccagtcctccaccccacccctggagcccagcctgggagcgcaaaacccaagaagcggccagaacgcacctccggctccggcggacgcgcgaccgttgtgcaccaccagggaccgccgcgcctactctgcacgggagcagggacagcgctagatttcgtgtacaaaacctgtgtacccctctatatatatgttacatagaatgtatatatgttgggaacatgctcgcttctcccgtgtgtcgccgccgtgcgtcgtgcgcccgcaacagagccccaaccgggcctttgccgggtaaggggctaccgcgacgccacttgtccacgcagccaccaccggcccgggccagtccctgccagtccgtccgcctgtccgtccgtgtcctcagctctgtccacgcttcgataggcctgacgcagcccccagcccagggccgccctagcaacttcctgtacatatgactgtaaaatggtaaacgtgtgtattatatctggcctcgttatatagtgtatatatatgtatacatatacatatatataatatatatgaagactgtaaatgttaagacgactagtgttcttattagtatattgcttcacactgaagattgtgtgtatcgagctgtttctaaaagatgtttattttccttaagagtaaaaaacagtcattgcattcagaaaaaaaaaaaaaaaaaaagtcaataaagatacaacgattgttttggaaaaaaaaaaaaaaaa

SEQ ID NO: 394 - DNA, 737 bp, Homo sapiens
  misc_feature (1)..(1): n equals a,t,g, or c
  misc_feature (21)..(21): n equals a,t,g, or c
  misc_feature (369)..(369): n equals a,t,g, or c
nagagggaagagagaaaaagntacaatgcttcgccgtycgsctktmcgkccsygtcctcagctctgtccacgcttcgataggcctgacgcagcccccagcccagggccgccctagcaacttcctgtacatatgactgtaaaatggtaaacgtgtgtattatatctggcctcgttatatagtgtatatatatgtatacatatacatatatataatatatatgaagactgtaaatgttaagacgactagtgttcttattagtatattgcttcacactgaagattgtgtgtatcgagctgtttctaaaagatgtttattttccttaagagtaaaaaacagtcattgcattcagaaaaaaaaaaaaaaaaaangtcaataaagatacaacgattgttttggaaaatctgcagcccgtggattccgaccagattcagctgggagccgggccaggctttaggttggggaatgggaatgaagggaggggctgggggggggggcatgaatggagtcagggagtcggcctttcacagaacaggaaacctcccccgcccctgtgccccctctccagtgtggcggcaggtcgggagggaggaggcttctttgctgtgagatgaccaggggccgggatgggggaggtgagacgtgccagacttcttgcagggagacccaagctgtagctcctgtcccacaacaggtcctggaagtcagtccatcctcccgtgccacccagggacctaat

SEQ ID NO: 395 - DNA, 1471 bp, Homo sapiens
  misc_feature (798)..(798): n equals a,t,g, or c
tttctgaatgcaatgactgttttttactcttaaggaaaataaacatcttttagaaacagctcgatacacacaatcttcagtgtgaagcaatatactaataagaacactagtcgtcttaacatttacagtcttcatatatattatatatatgtatatgtatacatatatatacactatataacgaggccagatataatacacacgtttaccattttacagtcatatgtacaggaagttgctagggcggccctgggctgggggctgcgtcaggcctatcgaagcgtggacagagctgaggacacggacggacaggcggacggactggcagggactggcccgggccggtggtggctgcgtggacaagtggcgtcgcggtagccccttacccggcaaaggcccggttggggctctgttgcgggcgcacgacgcacggcggcgacacacgggagaagcgagcatgttcccaacatatatacattctatgtaacatatatatagaggggtacacaggttttgtacacgaaatctagcgctgtccctgctcccgtgcagagtaggcgcggcggtccctggtggtgcacaacggtcgcgcgtccgccggagccggaggtgcgttctggccgcttcttgggttttgcgctcccaggctgggctccaggggtggggtggaggactggaaaggggacaaacagaggccaaagggtgtcccagtcccgcccacactcggggatcccgcaacccctaactgagcatagcccargtctaccccggctttgcccgaaccgcacgagagatctngcaaargctgggcggraaggcccctgracgcgttccgcacggtttgttccaaaggctccggcctytccagtgccggcctagcccgctctcagaaaggcttcctttctccyccgcctagtccacggagctaggagccgccctccgcctcttccagtactgtttcgacccccacccccaagcccagggctcccagctgcacgccacgaccgactggggtggcggcagcacccacgtggaatgtgtgccacgtcgtcttgagattccagagggaaagtgtccccaggacaaagccgtctcccaccctcgccggaggctgagcgccccggggagtctggccgctccgcgggctccccctccgcaagcctggcccctggggtgggcaagaacgccctgtgccgtccggttccgggagcagkcggctccggaacgggttttcctcccaacccggggccgcaagtctgagccctaggcggccggatccacgatccgggacccggatcaaggatcggctctggaccagcgctgggagcagctcaaaggcccgggggctgcgcaggcggctcctctccttcggcggcgsgcgggcaggcgggctccggcggctcctmcgrccgttggggtggattactacggcagcctcttatgtttgggacatttcaaaggggaattctct

SEQ ID NO: 396 - DNA, 3302 bp, Homo sapiens
  misc_feature (3274)..(3274): n equals a,t,g, or c
tcgacccacgcgtccgcgacccacgcgtccggggggaggtaactgcagtaagtcccgcttggccctggagtccacgcggattttcgaagctggggctggcaagaggccgctggacaccacgctccagtcgtcagcccacttcctagctgaacagcgcgaggcggcggcagcgagccgggtcccaccatggccgcgaattattccagtaccagtacccggagagaacatgtcaaagttaaaaccagctcccagccaggcttcctggaacggctgagcgagacctcgggtgggatgtttgtggggctcatggccttcctgctctccttctacctaattttcaccaatgagggccgcgcattgaagacggcaacctcattggctgaggggctctcgcttgtggtgtctcccgacagcatccacagtgtggctccggagaatgaaggaaggctggtgcacatcattggcgccttacggacatccaagcttttgtctgatccaaactatggggtccatcttccggctgtgaaactgcggaggcacgtggagatgtaccaatgggtagaaactgaggagtccagggagtacaccgaggatgggcaggtgaagaaggagacgaggtattcctacaacactgaatggaggtcagaaatcatcaacagcaaaaacttcgaccgagagattggccacaaaaaccccagtgccatggcagtggagtcattcayggcaacagccccctttgtccaaattggcaggtttttcctctcgtcaggcctcatcgacaaagtcgacaacttcaagtccctgagcctatccaagctggaggaccctcatgtggacatcattcgccgtggagactttttctaccacagcgaaaatcccaagtatccagagktgggagacttgcgtgtctccttttcctatgctggactgagcggcgatgaccctgacctgggcccagctcacgtggtcactgtgattgcccggcagcggggtgaccagctagtcccattctccaccaagtctggggataccttactgctcctgcaccacggggacttctcagcagaggaggtgtttcatagagaactaaggagcaactccatgaagacctggggcctgcgggcagctggctggatggccatgttcatgggcctcaaccttatgacacggatcctctacaccttggtggactggtttcctgttttccgagacctggtcaacattggcctgaaagcctttgccttctgtgtggccacctcgctgaccctgctgaccgtggcggctggctggctcttctaccgacccctgtgggccctcctcattgccggcctggcccttgtgcccatccttgttgctcggacacgggtgccagccaaaaagttggagtgaaaagaccctggcacccgcccgacacctgcgtgagccctaggatccaggtcctctctcacctctgacccagctccatgccagagcaggagccccggtcaattttggactctgcacyccctctcctcttcaggggccagacttggcagcatgtgcaccaggttggtgttcaccagctcatgtcttccccacatctcttcttgccagtaagcagctttggtgggcagcagcagctcatgaatggcaagctgacagcttctcctgctgtttccttcctctcttggactgagtgggtacggccagccactcagcccattggcagctgacaacgcagacacgctctacggaggcctgctgataaagggctcagccttgccgtgtgctgcttctcatcactgcacacaagtgccatgctttgccaccaccaccaagcacatctgtgatcctgaagggcggccgttagtcattactgctgagtcctgggtcaccagcagacacactgggcatggacccctcaaagcaggcacacccaaaacacaagtctgtggctagaacctgatgtggtgtttaaaagagaagaaacactgaagatgtcctgaggagaaaagctggacatatactgggcttcacacttatcttatggcttggcagaatctttgtagtgtgtgggatctctgaaggccctatttaagtttttcttcgttactttgctgcttcatgtgtactttcctaccccaagaggaagttttctgaaataagatttaaaaacaaaacaaaaaaaacacttaatatttcagactgttacaggaaacaccctttagtctgtcagttgaattcagagcactgaaaggtgttaaattggggtatgtggtttgattgataaaaagttacctctcagtattttgtgtcactgagaagctttacaatggatgcttttgaaacaagtatcagcaaaaggatttgttttcactctgggaggagagggtggagaaagcacttgctttcatcctctggcatcggaaactcccctatgcacttgaagatggtttaaaagattaaagaaacgattaagagaaaaggttggaagctttatactaaatgggctccttcatggtgacgccccgtcaaccacaatcaagaactgaggcctgaggctggttgtacaatgcccacgcctgcctggctgctttcacctgggagtgctttcgatgtgggcacctgggcttcctagggctgcttctgagtggttctttcacgtgttgtgtccatagctttagtcttcctaaataagatccacccacacctaagtcacagaatttctaagttccccaactactctcacacccttttaaagataaagtatgttgtaaccaggatgtcttaaatgattctttgtgtaccttttctgtcatattcagaaaccgttttgtgcctgctgggagtaattcctttagcaattaagtatttggtagctgaataaggggtcagaacttctgaaaccagagatctgtaatcatctctattggcctggggtgcctgtgctataaatgagtttcttcacatgaaaaacacagccagcccaagatgacttatctgggtttaggattcaatagtattcactaactgcttattacatgagcaatttcatcaaatctccaaactcttaaaggatgctttcggaaaacacgctgtatacctagatgatgactaaatgcaaaatccttgggctttggtttttttctagtaaggattttaaataactgccgacttcaaaagtgttcttaaaacgaaagataatgttaagaaaaatttgaaagctttggaaaaccaaatttgtaatatcattgtattttttattaaaagttttgtaataaatttctaaattatnaaaaaaaaaaaaaaaaaaaaaaaaaaaa

SEQ ID NO: 397 - DNA, 2227 bp, Homo sapiens
  misc_feature (289)..(289): n equals a,t,g, or c
cggacgcgtgggtcgacccacgcgtccgggaaaaarggaaaaratgccgtgtaaaatctcgttctgtgtctgaattgccgtaggctcagatcttcatttgaggttctgtgtctgaattgccgtaggctcagatcttcatttgaggttatgttctataagttaacgttgatcttgtgtgagctttcggtagctggagtaacacaggcggcctcacagcgacctctccagcgccttccaaggcacatctgcagccagcgtaatcctcctgggagatgcctcctcaaggccntgctccagaccacgtggggarggcctgacarccaattcccaggctgtccccacccttgragagtgaccctaaacgctagacagatggggaatgggaaagaaaagaaagctgcagacctcaagttaaaattccctcaaaaacgtttttatttatctgctttttctgaaaggataaaggctttttgaaaattattttctaacaaataacatgaacacttctagaaaccctagaaaaacacaaagtattcaaaatagaaagaaaaattacccattactctttaagccagcattatccattgcggtgcttttggagttgggtgaggccgtagcctctgccaagtcaaggagcccggtggtggctgtggcattcctgcagggttgtttttttttctttgagatggagtctcactcttgtcaccccagctggaatgtggtggtgtaaacagctcactgcagccttgaccctgaggctcaagcgatccttctgccttggcctcctgagtagctgggatcccaggcgagagtcaccacaccctgtccatgttcctgcaggtcttgatatgcgaggacgctgtgtcttccctgccacattttcttcttctttcttgagacagacccttgctccatcacccaggccagagtgtggtsgtgcgaacacggctcactgcagcctcgaccctcaggctcaagcgatcctcacgcctcggacccccaaagtgctgggatcacaggcgagagtcaccatgctggcctgaatcttcagggtattttacggttgaagtgtcacttacttarccatscctgtttcaagagtgtaggtggtcaccctgtctctgycgctgacctggcctggaccctcggctgtgagagggaggggtgggctgggctggaggaacctraagccctcgtgatgtcacaagcccatctggctgggcatcccctgctgtgtcctgagctgcacatgccccaggtggcccccacagcagaggcgagccactgragggtgragggcttccacggacggtcttcaggggragaagaagggcccaggcccccaggagactcaggagaccagagcctggggtcaggggctyagcaggggctyarccagggctggatgtccggagccagccccgmagccctgkgktctttgttcttcgcactcccaccgtccgtgtgaacagctccagccccacctgcgcctccctgtgctgggctccatcagggagcccagaagacgtgtgtgcttctgaaattgggtccctacatgcctttgtcccagtgcaccttgctccttccatttactatcgagatttaaatgcctgttttctccccagaggttgacggatatattcagacgttacgacacggatcaggacggctggattcaggtgtcgtacgaacagtacctgtccatggtcttcagtatcgtatgaccctggcctctcgtgaagagcagcacaacatggaaagagccaaaatgtcacagttcctatctgtgagggaatggagcacaggtgcagttagatgctgttcttcctttagattttgtcacgtggggacccagctgtacatatgtggataagctgattaatggttttgcaactgtaatagtagctgtatcgttctaatgcagacattggatttggtgactgtctcattgtgccatgaggtaaatgtaatgtttcaggcattctgcttgcaaaaaaatctatcatgtgcttttctagatgtctctggytctatagtgcaaatgcttttattagccaataggaattttaaaataacatggaacttacacaaaaggcttttcatgtgccttacttttttaaaaaggagtttattgtattcattggaatatgtgacgtaagcaataaagggaatgttagacgtgtaaaaaaaaaaaaaaaaaaaaaaaaaaaaaaaaaaaaaaaaaaaa

SEQ ID NO: 398 - DNA, 2214 bp, Homo sapiens
  misc_feature (289)..(289): n equals a,t,g, or c
cggacgcgtgggtcgacccacgcgtccgggaaaaarggaaaaratgccgtgtaaaatctcgttctgtgtctgaattgccgtaggctcagatcttcatttgaggttctgtgtctgaattgccgtaggctcagatcttcatttgaggttatgttctataagttaacgttgatcttgtgtgagctttcggtagctggagtaacacaggcggcctcacagcgacctctccagcgccttccaaggcacatctgcagccagcgtamtcctcctgggagatgcctcctcaaggccntgctccagaccacgtgggrarggcctgacaagccaattcccaggctgtccccacccttgragagtgaccctaaacgctagacagatggggaatgggaaagaaaagaaagctgcagacctcaagttaaaattccctcaaaaacgtttttatttatctgctttttctgaaaggataaaggctttttgaaaattattttctaacaaataacatgaacacttctagaaaccctagaaaaacacaaagtattcaaaatagaaagaaaaattacccattactctttaagccagcattatccattgcggtgcttttggagttgggtgaggccgtagcctctgccaagtcaaggagcccggtggtggctgtggcattcctgcagggttgtttttttttctttgagatggagtctcactcttgtcaccccagctggaatgtggtggtgtaaacagctcactgcagccttgaccctgaggctcaagcgatccttctgccttggcctcctgagtagctgggatcccaggcgagagtcaccacaccctgtccatgttcctgcaggtcttgatatgcgaggacgctgtgtcttccctgccacattttcttcttctttcttgagacagacccttgctccatcacccaggccagagtgtggtsgtgcgaacacggctcactgcagcctcgaccctcaggctcaagcgatcctcacgcctcggacccccaaagtgctgggatcacaggcgagagtcaccatgctggcctgaatcttcagggtatttrcggttgargtgycacttacttarccatscctgtttcaagagtgtaggtggtcaccctgtctctgccgctgacctggcctggaccctcggctgtgagagggaggggtgggctgggctggaggaacctraagccctcgtgatgtcacaagcccatctggctgggcatcccctgctgtgtcctgagctgcacatgccccaggtggcccccacagcagaggcgagccactgragggtgragggcttccacggacggtcttcaggggragaagaagggcccaggcccccaggagactcaggagaccagagcctggggtcaggggctmagcaggggctyarccagggctggatgtccggagccagccccgmagccctgkgktctttgttcttcgcactcccaccgtccgtgtgaacagctccagccccacctgcgcctccctgtgctgggctccatcagggagcccagaagacgtgtgtgcttctgaaattgggtccctacatgcctttgtcccagtgcaccttgctccttccatttactatcgagatttaaatgcctgttttctccccagaggttgacggatatattcagacgttacgacacggatcaggacggctggattcaggtgtcgtacgaacagtacctgtccatggtcttcagtatcgtatgaccctggcctctcgtgaagagcagcacaacatggaaagagccaaaatgtcacagttcctatctgtgagggaatggagcacaggtgcagttagatgctgttcttcctttagattttgtcacgtggggacccagctgtacatatgtggataagctgattaatggttttgcaactgtaatagtagctgtatcgttctaatgcagacattggatttggtgactgtctcattgtgccatgaggtaaatgtaatgtttcaggcattctgcttgcaaaaaaatctatcatgtgcttttctagatgtctctggttctatagtgcaaatgcttttattagccaataggaattttaaaataacatggaacttacacaaaaggcttttcatgtgccttacttttttaaaaaggagtttattgtattcattggaatatgtgacgtaagcaataaagggaatgttagacgtgtaaaaaaaaaaaaaaaaaaaaaaaaaaaaaag

SEQ ID NO: 399 - DNA, 1145 bp, Homo sapiens
ttttttttttttttttttttttgactgaactaagtggcttttttattagagaaagccagaattacaaaagacttcccttttcttggggtatggctgtctcagcacaatactcaacataactgcagaactgatgtggctcaggcaccctggttttaattccttgaggatctggcaattggcttacgcaaaaggtcaccatttgaggtcctgccttactaattatgtgctgcccaacaactaaatttgtaatttgtttttctctagtttgagcagggtctgaattttttcatttatttccttttttgccagcagacagacttgagtctgtaaagacaagcaaatacactgacagaagtttaccatagtttctaaaatgtaaaaaagaaaacccccaaaagactcaagaaaattagaccacaaattttgcattgttcattgtagcactattggtaataaaataacaaatgtttgtgcatttttatgtgaagatccttctcgtatttcatttggaaagatgagcaagaggtctgcttccttcattttacttccccttctgtttttgaaaggcagtttcgccaagcttaatgcaagaatatctgactgtttagaagaaagatattgccacaatctctggatggttttccagggttgtgttattactgagcttcatctttccagaatgagcaaaacactgtccagtctttgttacgattttgtaataaatgtgtacattttttttaaatttttggacatcacatgaataaaggtatgtatgtacgaatgtgtatatattatatatatgacatctattttggaaaatgtttgccctgctgtacctcatttttaggaggtgtgcatggatgcaatatatgaaaatgggacattctggaactgctggtcaggggactttgtcgccctgtgcactaaaagggccagattttcagcagccaaggacatccatacccaagtgaatgtgatgggacttaaaagaagtgaactgagacaattcactctggctgtttgaacagcagcgtttcataggaagagaaaaaaagatcaatcttgtattttctgaccacataaaggcttcttctctttgtaataaagtagaaaagctctcctcaaaaaaaaaaaaaaaaaaaaaa

SEQ ID NO: 400 - DNA, 717 bp, Homo sapiens
ggcacgagctagctgccgccacccgaacagcctgtcctggtgccccggctccctgccccgcgcccagtcatgaccctgcgcccctcactcctcccgctccatctgctgctgctgctgctgctcagtgcggcggtgtgccgggctgaggctgggctcgaaaccgaaagtcccgtccggaccctccaagtggagaccctggtggagcccccagaaccatgtgccgagcccgctgcttttggagacacgcttcacatacactacacgggaagcttggtagatggacgtattattgacacctccctgaccagagaccctctggttatagaacttggccaaaagcaggtgattccaggtctggagcagagtcttctcgacatgtgtgtgggagagaagcgaagggcaatcattccttctcacttggcctatggaaaacggggatttccaccatctgtcccagcggatgcagtggtgcagtatgacgtggagctgattgcactaatccgagccaactactggctaaagctggtgaagggcattttgcctctggtagggatggccatggtgccagccctcctgggcctcattgggtatcacctatacagaaaggccaatagacccaaagtctccaaaaagaagctcaaggaagagaaacgaaacaagagcaaaaagaaataataaataataaattttaaaaaaaaaaaaaaaaaaaaaaaaaaa

SEQ ID NO: 401 - DNA, 713 bp, Homo sapiens
  misc_feature (27)..(27): n equals a,t,g, or c
ccgcgggaacgctgtcctggctgccgncacccgaacagcctgtcctggtgccccggctccctgccccgcgcccagtcatgaccctgcgcccctcactcctcccgctccatctgctgctgctgctgctgctcagtgcggcggtgtgccgggctgaggctgggctcgaaaccgaaagtcccgtccggaccctccaagtggagaccctggtggagcccccagaaccatgtgccgagcccgctgcttttggagacacgcttcacatacactacacgggaagcttggtagatggacgtattattgacacctccctgaccagagaccctctggttatagaacttggccaaaagcaggtgattccaggtctggagcagagtcttctcgacatgtgtgtgggagagaagcgaagggcaatcattccttctcacttggcctatggaaaacggggatttccaccatctgtcccagcggatgcagtggtgcagtatgacgtggagctgattgcactaatccgagccaactactggctaaagctggtgaagggcattttgcctctggtagggatggccatggtgccaccctcctgggcctcattgggtatcacctatacagaaaggccaatagacccaaagtctccaaaaagaagctcaaggaagagaaacgaaacaagagcaaaaagaaataataaataataaattttaaaaaacttaaaaaaa

SEQ ID NO: 402 - DNA, 802 bp, Homo sapiens
  misc_feature (337)..(337): n equals a,t,g, or c
  misc_feature (359)..(359): n equals a,t,g, or c
ggtgggtgaccagagagtcctgtctatcctaggaggagaacattcagcccaaatcccagccccatcatgcacagatcagagccatttctgaaaatgtcgctgctgattctgcttttcctgggattggcagaagcctgtactcctcgtgaagtcaacttgctgaaagggatcataggtctcatgagcagactgtcaccggatgagatcctaggcttgctgagcctccaagtactgcatgaagaaacaagtggctgcaaggaggaagttaaacccttctcaggcaccaccccatccaggaaaccactccccaagagggaagaacacgtggaayttcctngaaatgcgsctacatggtgrtngacctacctcttcgtatcctacaacaaaggggactggttcactttttcctcccaagtgttactgccaytactgtaacttggaactggacatcagggatgatccctgctgttctttctagtgagcctgctccatctcagcttagccttcacaaggcctccatctcccaggcattctaacctctgaagaaagctctctgtcccctggactgcctgtgtggagggtaatgaactgggtcctttaaggaatggcacctgggtgcccagaggcatggccagaaggtgtctgtgggggccatgccttagggggatgcacccagggcggctgagagagcaactgcaggagtttcccctaaaatctctcctccagatcgttctcgaactttccccactacttccataataaaatgtatacttgttgaaaaaaaaaaaaaaaaaaactcgag

SEQ ID NO: 403 - DNA, 1186 bp, Homo sapiens
gaattcggcacgagattgaatgttccagataatccctttcccagtcctgcctgacatctgggtagggggtttgtccctggaattctgggacactggctggggtttgaggagagaagccagtacctacctggctgcaggatgaagctggccagtggcttcttggttttgtggctcagccttgggggtggcctggctcagagcgacacgagccctgacacggaggagtcctattcagactggggccttcggcacctccggggaagctttgaatccgtcaatagctacttcgattcttttctggagctgctgggagggaagaatggagtctgtcagtacaggtgccgatatggaaaggcaccaatgcccagacctggctacaagccccaagagcccaatggctgcggctcctatttcctgggtctcaaggtaccagaaagtatggacttgggcattccagcaatgacaaagtgctgcaaccagctggatgtctgttatgacacttgcggtgccaacaaatatcgctgtgatgcaaaattccgatggtgtctccamtcgatctgctctgaccttaagcggagtctgggctttgtctccaaagtggaagcctgtgattccctggttgacactgtgttcaacaccgtgtggaccttgggctgccgcccctttatgaatagtcagcgggcagcttgcatctgtgcagaggaggagaaggaagagttatgaggaagaagtgattccttcctggttttgagtgacaccacagctgtcagccttcaagatgtcaagtcttcgartcagcgtgactcattcgttcttccaacagtttggacaccacaaagcaggagaaagggaacatttttctacagctggaaagtgagtcctatcctttgaggaaatttgaaaaaagacatggagtggtttgaaagctactcttcatttaagactgctctccccaaccaagacacatttgcctggaaattcagttcttagcttaaagactaaaatgcaagcaaaccctgcaattcctggacctgatagttatattcatgagtgaaattgtggggagtccagccatttgggaggcaatgactttctgctggcccatgtttcagttgccagtaagcttctcacatttaataaagtgtactttttagaacatttggaaaaaaaaaaaaaaaaaactcga

SEQ ID NO: 404 - DNA, 470 bp, Homo sapiens
  misc_feature (444)..(444): n equals a,t,g, or c
  misc_feature (458)..(458): n equals a,t,g, or c
  misc_feature (469)..(470): n equals a,t,g, or c
ctgcaggaattcggcacgagcggcacgagtgccaatacaactgctgtcgccctcaatgcgccagcccaccctgcaaggctcctaccacctggacccgcagtagccctcctactgctccgggggagctgcagtctctgttgctgccaccaaccgcataaggcgagctgcaaagccatgccatctgcaggctccaatgtaccatagatgactcctcctcttcctcctcctccagcctggcttggagcagctagatgggcaaagctagaaaagcctaaaacgggatgcagggagtggtagcattagagcctcaccttgtcacgctggccactgggtggcagggaccagtttcagcaaaggcactcacacccaccctccaaagtccagcctctmmttctggcaaaagctggccaggaactggggcccagggtgagtgggtgtgctttnccaaaaaccagggnaggttatagcnn

SEQ ID NO: 405 - DNA, 1821 bp, Homo sapiens
ggaattcggcacgagcgtggatccaagatggcgacggcgatggattggttgccgtggtctttactgcttttctccctgatgtgtgaaacaagcgccttctatgtgcctggggtcgcgcctatcaacttccaccagaacgatcccgtagaaatcaaggctgtgaagctcaccagctctcgaacccagctaccttatgaatactattcactgcccttctgccagcccagcaagataacctacaaggcagagaatctgggagaggtgctgagaggggaccggattgtcaacacccctttccaggttctcatgaacagcgagaagaagtgtgaagttctgtgcagccagtccaacaagccagtgaccctgacagtggagcagagccgactcgtggccgagcggatcacagaagactactacgtccacctcattgctgacaacctgcctgtggccacccggctggagctctactccaaccgagacagcgatgacaagaagaaggaaagtgatatcaaatgggcctctcgctgggacacttactgaccatgagtgacgtccagatccactggttttctatcattaactccgttgttgtggtcttcttcctgtcaggtatcctgagcatgattatcattcggaccctccggaaggacattgccaactacaacaaggaggatgacattgaagacaccatggaggagtctgggtggaagttggtgcacggcgacgtcttcaggccccccccagtaccccatgatcctcagctccctgctgggctcaggcattcagctgttctgtatgatcctcatcgtcatctttgtagccatgcttgggatgctgtcgccctccagccggggagctctcatgaccacagcctgcttcctcttcatgttcatgggggtgtttggcggattttctgctggccgtctgtaccgcactttaaaaggccatcggtggaagaaaggagccttctgtacggcaactctgtaccctggtgtggtttttggcatctgcttcgtattgaattgcttcatttggggaaagcactcatcaggagcggtgccctttcccaccatggtggctctgctgtgcatgtggttcgggatctccctgcccctcgtctacttgggctactacttcggcttccgaaagcagccatatgacaaccctgtgcgcaccaaccagattccccggcagatccccgagcagcggtggtacatgaaccgatttgtgggcatcctcatggctgggatcttgccttcggcgccatgttcatcgagctcttcttcatcttcagtgctatctgggagaatcagttctattacctctttggcttcctgttccttgttttcatcatcctggtggtatcctgttcacaaatcagcatcgtcatggtgtacttccagctgtgtgcagaggattaccgctggtggtggagaaatttcctagtctccgggggctctgcattctacgtcctggtttatgccatcttttatttcgttaacaagtgactgcagcgccaagcggcatccaccaagcatcaagttggagaaaagggaacccaagcagtagagagcgatattggagtcttttgttcattcaaatcttggatttttttttttccctaagagattctctttttagggggaatgggaaacggacacctcataaagggttcaaagatcatcaatttttctgactttttaaatcattatcattattatttttaattaaaaaaatgcctgtatgcctttttttggtcggattgtaaataaatataccattgtcctacaaaaaaaaaaaaaaaaaactcgagggggggcc

SEQ ID NO: 406 - DNA, 1094 bp, Homo sapiens
ccacgcgtccggtgcacggcgacgtcttcaggcccccccagtaccccatgatcctcagctccctgctgggctcaggcattcagctgttctgtatgatcctcatcgtcatctttgtagccatgcttgggatgctgtcgccctccagccggggagctctcatgaccacagcctgcttcctcttcatgttcatgggggtgtttggcggattttctgctggccgtctgtaccgcactttaaaaggccatcggtggaagaaaggagccttctgtacggcaactctgtaccctggtgtggtttttggcatctgcttcgtattgaattgcttcatttggggaaagcactcatcaggagcggtgccctttcccaccatggtggctctgctgtgcatgtggttcgggatctccctgcccctcgtctacttgggctactacttcggcttccgaaagcagccatatgacaaccctgtgcgcaccaaccagattccccggcagatccccgagcagcggtggtacatgaaccgatttgtgggcatcctcatggctgggatcttgcccttcggcgccatgttcatcgagctcttcttcatcttcagtgctatctgggagaatcagttctattacctctttggcttcctgttccttgttttcatcatcctggtggtatcctgttcacaaatcagcatcgtcatggtgtacttccagctgtgtgcagaggattaccgctggtggtggagaaatttcctagtctccgggggctctgcattctacgtcctggtttatgccatcttttatttcgttaacaagctggacatcgtggagttcatcccctctctcctctactttggctacacggccctcatggtcttgtccttctggctgctaacgggtaccatcggcttctatgcagcctacatgtttgttcgcaagatctatgctgctgtgaagatagactgattggagtggaccacggccaagcctgctccgtcctcggacaggaagccaccctgcgtgggggactgcaggcacgcaaaataaaataactcctgctcgtttggaatgtaaaaaaaaaaaaaaaaaaaaaaaaaaaaaaaaaaa

SEQ ID NO: 407 - DNA, 1932 bp, Homo sapiens
  misc_feature (293)..(293): n equals a,t,g, or c
ggcacgaggccgccctgggtgtcagcggctcggctcccgcgcacgctccggccgtcgcgcasctcggcacctgcaggtccgtgcgtcccgcggctggcgcccctgactccgtcccggccagggagggccatgatttccctcccggggcccctggtgaccaacttgctgcggtttttgttcctggggctgagtgccctcgcgcccccctcgcgggcccagctgcaactgcacttgcccgccaaccggttgcaggcggtggagggaggggaagtggtgcttccagcgtggtacancttgcacggggaggtgtcttcatcccagccatgggaggtgccctttgtgatgtggttcttcaaacagaaagaaaaggaggatcaggtgttgtcctacatcaatggggtcacaacaagcaaacctggagtatccttggtctactccatgccctcccggaacctgtccctgcggctggagggtctccaggagaaagactctggcccctacagctgctccgtgaatgtgcaagacaaacaaggcaaatctaggggccacagcatcaaaaccttagaactcaatgtactggttcctccagctcctccatcctgccgtctccagggtgtgccccatgtgggggcaaacgtgaccctgagctgccagtctccaaggagtaagcccgctgtccaataccagtgggatcggcagcttccatccttccagactttctttgcaccagcattagatgtcatccgtgggtctttaagcctcaccaacctttcgtcttccatggctggagtctatgtctgcaaggcccacaatgaggtgggcactgccaatgtaatgtgacgctggaagtgagcacagggcctggagctgcagtggttgctggagctgttgtgggtaccctggttggactggggttgctggctgggctggtcctcttgtaccaccgccggggcaaggccctggaggagccagccaatgatatcaaggaggatgccattgctccccggaccctgccctggcccaagagctcagacacaatctccaagaatgggaccctttcctctgtcacctccgcacgagccctccggccaccccatggccctcccaggcctggtgcattgacccccacgcccagtctctccagccaggccctgccctcaccaagactgcccacgacagatggggcccaccctcaaccaatatcccccatccctggtggggtttcttcctctggcttgagccgcatgggtgctgtgcctgtgatggtgcctgcccagagtcaagctggctctctggtatgatgaccccaccactcattggctaaaggatttggggtctctccttcctatargggtcacctctagcacagaggcctgagtcatgggaaagagtcacactcctgacccttagtactctgcccccacctctctttactgtgggaaaaccatctcagtaagacctaagtgtccaggagacagaaggagaagaggaagtggatctggaattgggaggagcctccacccacccctgactcctccttatgaagccagctgctgaaattagctactcaccaagagtgaggggcagagacttccagtcactgagtctcccaggcccccttgatctgtaccccacccctatctaacaccacccttggctcccactccagctccctgtattgatataacctgtcaggctggcttggttaggttttactggggcagaggatagggaatctcttattaaaactaacatgaaatatgtgttgttttcatttgcaaatttaaataaagatacataatgtttgtatgaraaaaaaaaaaaaaaaaaaaaaagggcggccgctctagaggatccctcgaggggcccaagcttacgcgtgcatgcgacgtcatagctctctccctatagtgagtcgtattataagctagg

SEQ ID NO: 408 - DNA, 711 bp, Homo sapiens
  misc_feature (345)..(345): n equals a,t,g, or c
ggcacgagcgaagaccctgttcggaccctgccccgattccagactcaggtagatcgtcggcataccctctaccgtggacaccaggcagccctggggctgatggagagagatcaggtatcccccagggagtaggggctaccttgaggggatgatagacctcccccactcccagtgkkactctggaaatatgaaggaactagggagtggaagagatttcagagctggggagaggagttcctcccttcaaagccagcaactgcctttggggaatgtcggggggtctctcctttctcctgcttgtttraggtggtacacagtccccccttcamctggsgggaagctgtnccggacaractcatctcagctttcccttggggcaggatcgggggcagcagctccagcagaaacagcaggatctggagcaggaaggcctcgaggccacacaggggctgctggccggcgagtgggccccacccctctggragctgggcagcctcttccaggccttcgtgaagagggagagccaggcttatgcgtaagcttcatagcttctgctggcctggggtggacccaggacccctggggcctgggtgccctgagtggtggtaaagtggagcaatcccttcacgctccttggccatgttctgagcggccagcttggcctttgccttaataaatgtgctttattttcaaaaaaaaaaaaaaaaaact

SEQ ID NO: 409 - DNA, 973 bp, Homo sapiens
ggcacgagcccagcggaagccaagccaccaggccccccagcgtccacgcggagcatgaacattgaggatggcgcgtgcccgcggctccccgtgccccccgctgccgcccggtaggatgtcctggccccacggggcattgctcttcctctggctcttctccccacccctgggggccggtggaggtggagtggccgtgacgtctgccgccggagggggctccccgccggccacctcctgccccgtggcctgctcctgcagcaaccaggccagccgggtgatctgcacacggagagacctggccgaggtcccagccagcatcccggtcaacacgcggtacctgaacctgcaagagaacggcatccaggtgatccggacggacacgttcaagcacctgcggcacctggagattctgcagctgagcaagaacctggtgcgcaagatcgaggtgggcgccttcaacgggctgcccagcctcaacacgctggagctttttgacaaccggctgaccacggtgcccacgcaggccttcgagtacctgtccaagctgcgggagctctggctgcggaacaaccccatcgagagcatcccctcctacgccttcaaccgcgtgccctcgctgcggcgcctggacctgggcgagctcaagcggctggaatacatctcggaggcggccttcgaggggctggtcaacctgcgctacctcaacctgggcatgtgcaacctcaaggacatccccaacctgacggccctggtgcgcctggaggagctggagctgtcgggcaaccggctggacctgatccgcccgggctccttccagggtctcaccagcctgcgcaagctgtggctcatgcacgcccaggtagccaccatcgagcgcaacgccttcgacgacctcaagtcgctggaggagctcaacctgtcccacaacaacctgatgtcgctgccccacgacctcttcacgcccctgcaccgc

SEQ ID NO: 410 - DNA, 984 bp, Homo sapiens
gaattcggcacgagcccagcggaagccaagccaccaggccccccagcgtccacgcggagcatgaacattgaggatggcgcgtgcccgcggctccccgtgccccccgctgccgcccggtaggatgtcctggccccacggggcattgctcttcctctggctcttctccccacccctgggggccggtggaggtggagtggccgtgacgtctgccgccggagggggctccccgccggccacctcctgccccgtggcctgctcctgcagcaaccaggccagccgggtgatctgcacacggagagamctggccgaggtcccagccagcatcccggtcaacacgcggtacctgaacctgcaagagaacggcatccaggtgatccggacggacacgttcaagcacctgcggcacctggagattctgcagctgagcaagaacctggtgcgcaagatcgaggtgggcgccttcaacgggctgcccagcctcaacacgctggagctttttgacaaccggctgaccacggtgcccacgcaggccttcgagtacctgtccaagctgcgggagctctggctgcggaacaaccccatcgagagcatcccctcctacgccttcaaccgcgtgccctcgctgcggcgcctggacctgggcgagctcaagcggctggaatacatctcggaggcggccttcgargggctggtcaacctgcgctacctcaacctgggcatgtgcaacctcaaggacatccccaactgacggccctggtgcgcctggaggagctggagctgtcgggcaaccggctggacctgatccgcccgggctccttccagggtctcaccagcctgcgcaagctgtggctcatgcacgcccaggtagccaccatcgagcgcaacgccttcgacgacctcaagtcgctggaggagctcaacctgtcccacaacaacctgatgtcgctgccccacgacctcttcacgcccctgcaccgcctcgta

SEQ ID NO: 411 - DNA, 553 bp, Homo sapiens
gtgtgccggatttggttagctgagcccaccgagaggcgcctgcaggatgaaagctctctgtctcctcctcctccctgtcctggggctgttggtgtctagcaagaccctgtgctccatggaagaagccatcaatgagaggatccaggaggtcgccggctccctaatatttagggcaataagcagcattggcctggagtgccagagcgtcacctccaggggggacctggctacttgcccccgaggcttcgccgtcaccggctgcacttgtggctccgcctgtggctcgtgggatgtgcgcgccgagaccacatgtcactgccagtgcgcgggcatggactggaccggagcgcgctgctgtcgtgtgcagccctgaggtcgcgcgcagtggcaacagcgcgggcggaggcggctccaggtccggagggttgcgggggagctggaaataaacctggagatgatgatgatgatgatgatggaaaaaaaaaaaaaaaaaaaaaaaaaaaaaaaaaaaaaaaaaaaaaaaaaaaaaaaaaaaaaaaaaaaaaaaaaaaaa

SEQ ID NO: 412 - DNA, 1614 bp, Homo sapiens
ggtgattggtagttactatgtggggacacaattacttgggctgaaataatccacctgttgtggttggggtcctctggggcattccagggtgagaggttgtcactgccacctgggccatgtgggccggcaccagcattttgtggttacgaattctacagtcacaaatatctttgggcaaatccccttctatacctcaaggcagcttttggtttgcaaccccactggccagagggaagggccagtcacttggctctctcactgccctgcgccccagatggttctagggctgctgttttcccttggccctgccaacaccactgtttttacttctgctcattggctgagtgcagtggttcctggaagccagtggcacgtttccccgcgtagctcgcttatcccacagcacacacccaagggttctgttgctaacacgctgaattaattctttgctcatcttacagagtgtgttttgactgcccccatttctgaggccttgtaaggccagagctttgttgcttcatcggcaggttgggacttagatggccgtgaatgtttcctctctgctgctgcagtaagtaagtgcccgcaccatagtgtgtttggaggctgaagttgaagcgaggctgtgaggggagatggacgtgtgaggagggatgatggggcttgagcaaagtgggggaggggcaaagcagttggcccaacacattccccacccctttgagaggtctgaggcctgcagacctggctcggagcccacctggtagtcctcagactgtgtgtgtgtgtgtgtgtgtgtgtgtgtgtgtgtgtgtgtgtgtgtgtaaaagagagaagttgtggagaaatggggggctgattctgctcagattcatcaggatgagtagaaggcacccagctctcaccctggcctgacatgtgtgtccctgagcaggttacagtcctctctgagcctctgcttcccatctggaccctgctgggcagggcttctgagctccttagcactagcaggaggggctccaggggccctccctccatggcagccaggacaggactctaaaatgaggacagcagagctcgtggggggctcccacggacccgccgtgggcccaggggaggcagagcctgagccaacagcagtggtgctgtggaccgtggatcctgagggtggcctggggcaagtaccggctgagggtccaggtgggctttgtgtacctttgggtcctggggccctggtgacttggactccaggttagagtcaagtgacaggagaaaggctggtggggccctgtgcttccgacttcatttcgagtgatggcagttcccaggaaggaatccacagctgacggtggctgacagatcagagaatggaaggcgaggcaggcgggcgtctgcgtgacctcaggtgcttggggcccagcagacccagagaaccatttccactaggccagggtgccggaagtgtccacaggtcttagattccctgttcagatgaaaagatttgtgcctttaatgataaaagtgatctgcatagagtcaaaaattcaagccatgggtataaaatgcaagtaaaatccctgccctcacctatcccaccctactacacagagatgtcct

SEQ ID NO: 413 - DNA, 1087 bp, Homo sapiens
  misc_feature (14)..(14): n equals a,t,g, or c
  misc_feature (55)..(55): n equals a,t,g, or c
  misc_feature (63)..(64): n equals a,t,g, or c
  misc_feature (174)..(174): n equals a,t,g, or c
caagttaaagtaangtggccccggcaaccaataagtgttgtttttggaagggctngaaagttnnaaagcgagggcttgtaaaggggaagatgggaccgttgtgaaggaaggatgattggggctttgaagcaaaagtgggggaagggggcaaaggcagttggcccaacacattcnccacccctttgagaggtctgaggcctgcagacctggctcggagcccacctggtagtcctcagactgtgtgtgtgtgtgtgtgtgtgtgtgtgtgtgtgtgtgtgtgtgtgtgtaaaagagagaagttgtggagaaatggggggctgattctgctcagattcatcaggatgagtagaaggcacccagctctcaccctggcctgacatgtgtgtccctgagcaggttacagkcctctctgagcctctgcttcccatctggaccctgctgggcagggcttctragctccttagcactagcaggaggggctccaggggccctccctccatggcagccaggacaggactctaaaatgaggacagcagagctcgtggggggctcccacggacccgccktgggcccaggggaggcagagcctgagccaacagcagtggtgctgtggaccgtggatcctgagggtggcctggggcaagtaccggctgagggtccaggtgggctttgtgtacctttgggtcctggggccctggtgacttggactccaggttagagtcaagtgacaggagaaaggctggtggggccctgtgcttccgacttcatttcgagtgatggcagttcccaggaaggaatccacagctgacggtggctgacagatcagagaatggaaggcgaggcaggcgggcgtctgcgtgacctcaggtgcttggggcccagcagacccagagaaccatttccactaggccagggtgccggaagtgtccacaggtcttagattccctgttcagatgaaaagatttgtgcctttaatgataaaagtgatctgcatagagtcaaaaattcaagccatgggtataaaatgtcaagtaaaatccctgccctcacctatcccaccctactacacagagatgtcctctcgagg

SEQ ID NO: 414 - DNA, 1201 bp, Homo sapiens
  misc_feature (66)..(66): n equals a,t,g, or c
  misc_feature (1182)..(1182): n equals a,t,g, or c
  misc_feature (1184)..(1184): n equals a,t,g, or c
gaattccggaacaaawgcyggagctccaccgcggtggcggccgctctagaactagtggatcccctnkgctgcaggaattcggcacgagctgctgtctgtgcttcgggatcctgccctccagaagtcctccaaggcttggtacttgctgcgtgtccaggtcctgcagctggtggcagcttaccttagcctcccgtcaaacaacctctcacactccctgtgggagcagctctgtgcccaaggctggcagacacctgagatagctctcatagactcccataagctcctccgaagcatcatcctcctgctgatgggcagtgacattctctcaactcagaaagcagctgtggagacatcgtttttggactatggtgaaaatctggtacaaaaatggcaggttctttcagaggtgctgagctgctcagagaagctggtctgccacctgggccgcctgggtagtgtgagtgaagccaaggccttttgcttggaggccctaaaacttacaacaaagctgcagataccacgccagtktgccctgttcctggtgctgaagggcgagctggagctggcccgcaatgacattgatctctgtcagtcggacctgcagcaggttctgttcttgcttgagtcttgcacagagtttggtggggtgactcagcacctggactctgtgaagaaggtccacctgcagaaggggaagcagcaggcccaggtcccctgtcctccacagctcccagaggaggagctcttcctaagaggccctgctctagagctggtgccactgtggccaaggagcctggccccatagcaccttctacaaactcctccccagtcttgaaaaccaagccccagcccatacccaacttcctgtcccattcacccacctgtgactgctcgctctgcgccagccctgtcctcacagcagtctgtctgcgctgggtattggtcacggcaggggtgaggctggccatgggccaccaagcccagggtctggatctgctgcaggtcgtgctgaagggctgtcctgaagccgctgagcgcctcacccaagctctccaagcttccctgaatcataaaacacccccctccttggttccaagcctcttggatgagatttggctaagcatacacactgttgcactggagggcctgaaccagccatcaaacgagagcctgcagaaggtncncagtaaggctgaagttt

SEQ ID NO: 415 - DNA, 628 bp, Homo sapiens
  misc_feature (567)..(567): n equals a,t,g, or c
  misc_feature (596)..(596): n equals a,t,g, or c
ttgggaagctggtmcscctgcaggtaccggtccggaattcccgggtcgacccacgcgtycgttccagattcaattgaaagtgcattgcagggtgatgaaagatgtgtgcttgatactatgcgtttggttgaccttctcttggtgctattatttgaaggacgaaaagctttgccaaagtctagtgctggatctacaggcagaatcccaggactccggagattagatagttctggggagcgctcacatcggcagcttatagattgtattcgaagtaaagataccgatgcacttatagatgcaattgacacaggaggtcagaaaatatttttttaaatataaaaagaaagttgtgagataaccatataggcagtttctagttttcggacagtactcttagaaatccagataacaaagtggcaccccttcgatattctcccctatccctgtgcataattatgtaattatcagcttggttcttggtgaaacctgaataaatgctttttgatgcaaaaaaaaaaaaaaaagaaaaataaaaaaaaaagataaaaaaaaaccttaaaaaaaaanaaaaaaaaaaaaaaaaaaaaaaagaaaanaaaaaaaaaaaacaaaaaaaaaaaaaaaaaaa

SEQ ID NO: 416 - DNA, 425 bp, Homo sapiens
  misc_feature (367)..(367): n equals a,t,g, or c
  misc_feature (380)..(380): n equals a,t,g, or c
  misc_feature (408)..(408): n equals a,t,g, or c
atcgtgctcaagtacatcatggctggttgccccttgtttctgggtaatctctgggatgtgactgaccgcgacattgaccgctacacggaagctctgctgcaaggctggcttggaagcaggcccagggccccccttctctactatgtaaaccaggcmcgccaagctccccgactcaagtatcttattggggctgcacctatacctatggcttgcctgtctctctgcggtaaccccatggagctgtcttattgatgctagaagcctcataactgttctacctccaaggttagatttaatccttaggataactcttttaaagtgattttccccagtgttttatatgaaacatttccttttgatttaaccncagataataaagntacatccatttaaaaaaaaaaaaaaaancccgagggggggcccgg

SEQ ID NO: 417 - DNA, 1191 bp, Homo sapiens
gctgggctggaacacaagarcccacagggctgccgtccacactctcccggtcagagtcctgggaccacatggggacgctgccatggcttcttgccttcttcattctgggtctccaggcttgggatactcccaccatcgtctcccgcaaggagtggggggcaagaccgctcgcctgcagggccctgctgaccctgcctgtggcctacatcatcacagaccagctcccagggatgcagtgccagcagcagagcgtttgcagccagatgctgcgggggttgcagtcccattccgtctacaccataggctggtgcgacgtggcgtacaacttcctggttggggatgatggcagggtgtatgaaggtgttggctggaacatccaaggcttgcacacccagggctacaacaacatttccctgggcatcgccttctttggcaataagataagcagcagtcccagccctgctgccttatcagctgcagagggtctgatctcctatgccatccagaagggtcacctgtcgcccaggtatattcagccacttcttctgaaagaagagacctgcctggaccctcaacatccagtgatgcccagraaggtttgccccaacatcatcaaacgatctgcttgggaagccagagagacacactgccctaaaatgaacctcccagccaaatatgtcatcatcatccacaccgctggcacaagctgcactgtatccacagactgccagactgtcgtccgaaacatacagtcctttcacatggacacacggaacttttgtgacattggatatcaataaggccaggcgtggcggcgattacgtctgtaatcccaggactttgggaggccaaggcgggcagatcacttcaggccaggaattcaagagcagcctggccaatatggcgaaactctgtctctactgaaaacaaacaaacaaacaaacaaacaaacaaagaaacaacaaaaattagccgggtgtggtggcacacgcctgtagtcccagctactcaggaggctgaggcataagaattgcttgaaccctggaggcggaggttgcagtgagctgagattgggccaccgcactccagtctgggagacagagtgagactgtctcaaaacaacaacaaaaaaatccctaacataatctcaaaaaaaaaaaaaaaaaaaaaaaaaaaaaaaagggcggccgc

SEQ ID NO: 418 - DNA, 1626 bp, Homo sapiens
  misc_feature (525)..(525): n equals a,t,g, or c
  misc_feature (542)..(542): n equals a,t,g, or c
  misc_feature (562)..(562): n equals a,t,g, or c
  misc_feature (607)..(607): n equals a,t,g, or c
ccacgcgtccgacgcggcgcacgcggcagtcctgatggcccggcatgggttaccgctgctgcccctgctgtcgctcctggtcggcgcgtggctcaagctaggaaatggacaggctactagcatggtccaactgcagggtgggagattcctgatgggaacaaattctccagacagcagagatggtgaagggcctgtgcgggaggcgacagtgaaaccctttgccatcgacatatttcctgtcaccaacaaagatttcagggattttgtcagggagaaaaagtatcggacagaagctgagatgtttggatggagctttgtctttgaggactttgtctctgatgagctgagaaacaaagccacccagccaatgaagtctgtactctggtggcttccagtggaaaaggcattttggaggcagcctgcaggtcctggctctggcatccgagagagactggagcacccagtgttacacgtgagctggratgacgcccgtgcctaatgtgcytkgsgggggraaacgactgncccacsggagggaagantggggagtttttccgcccgnaggggggcttgaarggtccaagtttaccccatggggggaactggnttccagccaaaccgcaccaacctgtggcagggaaagttccccaagggagacaaagctgaggatggcttccatggagtctccccagtgaatgctttccccgcccagaacaactacgggctctatgacctcctggggaacgtgtgggagtggacagcatcaccgtaccaggctgctgagcaggacatgcgcgtcctccggggggcatcctggatcgacacagctgatggctctgccaatcaccgggcccgggtcaccaccaggatgggcaacactccagattcagcctcagacaacctcggtttccgctgtgctgcagacgcaggccggccgccaggggagctgtaagcagccgggtggtgacaaggagaaaagccttctagggtcactgtcattccctggccatgttgcaaacagcgcaattccaagctcgagagcttcagcctcaggaaagaacttccccttccctgtctcccatccctctgtggcaggcgcctctcaccagggcaggagaggactcagcctcctgtgttttggagaaggggcccaatgtgtgttgacgatggctgggggccaggtgtttctgttagaggccaagtattattgacacaggattgcaaacacacaaacaattggaacagagcactctgaaaggccattttttaagcattttaaaatctattctctccccctttctccctggatgattcaggaagctgmacattgtttcctcaaggcagaattttcctggttctgttttctcagccagttgctgtggaaggagaatgctttctttgtggcctcatctgtggtttcgtgtccctctgaaggaaactagtttccactgtgtaacaggcagacatgtaactatttaaagcacagttcagtcctaaaagggtctgggagaaccagatgatgtactaggtgaagcattgcattgtgggaatcacaaagcaaatagtactccagaaagaccctgtctcaaaaaaaaaaaaaaaaaaaaaaaaaaaaaaaaaaaaaaa

SEQ ID NO: 419 - DNA, 2351 bp, Homo sapiens
ccacgcgtccggcagaagcagcagcagcagaagacacagcgccggtccaggaggcggctcgagctgttcgtaaagtcgcccgacagctttttctccgtagtatgcgagttgacaaaacagccagagaacagggctccccattacaatcttttcgagatcttttcccttgctaaccggatctgatttgtgcgaaaacatgccttgcacttgtacctggaggaactggagacagtggattcgacctttagtagcggtcatctacctggtgtcaatagtggttgcggttcccctatgcgtgtgggaattacagaaactggaggttggaatacacaccaaggcttggtttattgctggaatctttttgctgtgactattcctatatcactgtgggtgatattgcaacacttagtgcattatacacaacctgaactacaaaaaccaataataaggattctttgggatggtacctatttacagttttagatagttggatagctttgaaatatcccggaattgcaatatatgtggatacctgcagagaatgctatgaagcttatgtaatttacaactttatgggattccttaccaattatctaactaaccggtatccaaatctggtattaatccttgaagccaaagatcaacagaaacatttccctcctttatgttgctgtccaccatgggctatgggagaagtattgctgtttaggtgcaaactaagtgtattacagtacacagttgtcagacctttcaccaccatcgttgctttaatctgtgagctgcttggtatatatgacgaagggaactttagcttttcaaatgcttggacttatttggttataataaacaacatgtcacagttgtttgccatgtattgtctcctgctcttttataaagtactaaaagaagaactgagcccaatccaacctgttggcaaatttctttgtgtaaagctggtggtttttgtttctttttgatttggcgtttaccttttcctaacatataggcaagcagtagttattgctttgttggtaaaagttggcgttatttctgaaaagcatacgtgggaatggcaaactgtagaagctgtggccaccggactccaggattttattatctgtattgagatgttcctcgctgccattgctcatcattacacattctcatataaaccatatgtccaagaagcagaagagggctcatgctttgattcctttcttgccatgtgggatgtctcagatattagagatgatatttctgaacaagtaaggcatgttggacggacagtcaggggacatcccaggaaaaaattgtttcccgaggatcaagatcaaaatgaacatacaagtttattatcatcatcatcacaagatgcaatttccattgcttcttctatgccaccttcacccatgggtcactaccaagggtttggacacactgtgactccccagactacacctaccacagctaagatatctgatgaaatccttagtgatactataggagagaaaaaagaaccttcagataaatccgtggattcctgaacagtatggaaaagcaaactgtgcaactactacattatatcattacctggtatcccatggattttgtgcttgggacagaccataaatgatggaaaatgtcaacacaaaaatagctgaaagccaggtacaactactgcatttatatatgtaagttttgtatatcaaaaataattggtctaaatttcctagacttagacttgatttcttaacattagggtatcgcatactcaaatggtagacaatgaccccaactaaatcttcctgatgttacactgctttatcaagaggatggacttttttttttttgagacagacagagtcttgctctgtcacccaggctggagtgcagtggcgcaatctcgggtcactgcaagctctgcctcccaagttcatgccattctcctgcctcagccctcccaagtagctgggactacaggcacctgccaccatgcccagctaattttttttttttcagtagagacagggtctcaccatgttagccaggatggtcttgatctgacctcgtgatccgccgacctcggcctcccaaagtgctggaattacaggcgtgagccactgcgcctggccaagaatggacattttttaaaaaaacatcagtacttcctaccactgctgcatgagtataatgctccggaattatcagaaagcataatgcagaaatacgaattagtggaacttaatcatgtgccatataagcttacctaacaaacagttatatccctattcctcaactgaatgtctttcaataaataagaatttatcatttaaaaaaaaaaaaaaaaaaaa

SEQ ID NO: 420 - DNA, 1001 bp, Homo sapiens
cgcgctggaaccctgtggcggcggccatggccatatggcgctgcccgcctggctgcagccaggtataggaagaatgcgtatcttttcatctattacttaatccagttctgtggccactcttggatatttacaaatatgacagtcagattcttttcatttggaaaaggtaaaactccgaaacagtttttttatttttaacttttaatccttgttttcacctcatcctgcttatattaaatttctacacacctcaaccttctaccacgggatacagattcaatggttgacactttttatgctattggacttgtgatgcgactttgccaatccgtatctctcctggaactgctgcacatatatgttggcattgagtcaaaccatcttctcccaaggtttttgcagctcacagaaagaataatcatcctttttgtggtgatcaccagtcaagaggaagtccaagagaaatatgtggtgtgtgttttattcgtcttttggaatctattggatatggttaggtacacttatagcatgttatcagtcataggaatatcctatgctgtcttgacatggctcagtcaaacactatggatgccaatttatcctttgtgtgttcttgctgaagcatttgccatctatcaatcgctgccttattttgaatcatttggcacttattccaccaagctgccctttgacttatccatctatttcccatatgtgctgaaaatatatctcatgatgctctttataggtatgtattttacctacagtcatctatactcakaaagaagagacatcctcggaatctttcccattaaaaaaaagaagatgtgaagtacagcattccagtgtgacacgagaaaagacaggctgtggattcagtgcagtaaataaaacacaggaagtattctggtggaaaaaaaaaaaaaaaaaaaaaaaaaaraaraaaaaaaaawaaaaaaaaaaaaaaaaaaaaaaaaaaaaaaaaaaaaaaaaaaaaaaaa

SEQ ID NO: 421 - DNA, 669 bp, Homo sapiens
ccacgcgtccggacactttttatgctattggacttgtgatgcgactttgccaatccgtatctctcctggaactgctgcacatatatgttggcattgagtcaaaccatcttctcccaaggtttttgcagctcacagaaagaataatcatcctttttgtggtgatcaccagtcaagaggaagtccaagagaaatatgtggtgtgtgttttattcgccttttggaatctattggatatggttaggtacacttatagcatgttatcagtcataggaatatcctatgctgtcttgacatgggctcagtcaaacactatggatgccaatttatcctttgtgtgttcttgctgaagcatttgccatctatcaatcgctggcttattttgaatcatttggcacttattccaccaagctgccctttgacttatccatctatttcccatatgtgctgaaaatatatctcatgatgctctttataggtatgtattttacctacagtcatctatactcagaaagaagagacatcctcggaatctttcccattaaaaaaaagaagatgtgaagtacagcattccagtgtgacacgagaaaagacaggctgtggattcagtgcagtaaataaaacacaggaagtattctggtggaaaaaaaaaaaaaaaaaaaaaaaaaaaaa

SEQ ID NO: 422 - DNA, 417 bp, Homo sapiens
ccacgcgtccgctcctctagaggctccacatgaagtcccagtgctacagtcctagttattttgccttcttctgcctggttttctttcagatcacctcagccagttctcagacacttaggggacatgttctctgcaggaccactctgagggactcttctgcatattgctgacctgagaggatggcctcagagctgacttgggcaatcctccccaacaggaaggggagacattgcctgccactgaggaaacaggtcatgaaggtggagataagctgcaaggggcgaagcaactttatgtcagtggaaaacgtgtctctttaaagctgctatgtgaacagcttttacagtcattaaatttacctaaactaaggttaaaaaaaaaaaaaaaaaaaaaaaaaaaaaaaaaaaaaaaaaaaaa

SEQ ID NO: 423 - DNA, 1949 bp, Homo sapiens
  misc_feature (1130)..(1130): n equals a,t,g, or c
  misc_feature (1948)..(1948): n equals a,t,g, or c
gctacgccgtgggcacttcctcaacgacctgtgcgcgtccatgtggttcacctacctgctgctctacctgcactcggtgcgcgcctacagctcccgcggcgcgggctgctgctgctgctgggccaggtggcgacgggctgtgcacaccgctcgtgggctacgaggccgaccgcgccgccagctgctgcgcccgctacggcccgcgcaaggcctggcacctggtcggcaccgtctgcgtcctgctgtccttccccttcatcttcagcccctgcctgggctgtggggcggccacgccgagtgggctgccctcctctactacggcccgttcatcgtgatcttccagtttggctgggcctccacacagatctcccacctcagcctcatcccggagctcgtcaccaacgaccatgagaaggtggagctcacggcactcaggtatgcgttcaccgtggtggccaacatcaccgtctacggcgccgcctggctcctgctgcacctgcagggctcgtcgcgggtggagcccacccaagacatcagcatcagcgaccagctggggggccaggacgtgcccgtgttccggaacctgtccctgctggtggtgggtgtcggcgccgtgttctcactgctattccacctgggcacccgggagaggcgccggccgcatgcggaggagccaggcgagcacacccccctgttggcccctgccacggcccagcccctgctgctctggaagcactggctccgggagccggctttctaccaggtgggcatactgtacatgaccaccaggctcatcgtgaacctgtcccagacctacatggccatgtacctcacctactcgctccacctgcccaagaagttcatcgcgaccattcccctggtgatgtacctcagcggcttcttgtcctccttcctcatgaagcccatcaacaagtgcattgggaggaacatgacctacttctcaggcctcctggtgatcctggcctttgccgcctgggtggcgctggcggagggactgggtgtggccgtgtaygcagcggctgtgctgctgggtgctggctgtgccaccatcctcgtcacctcgctggccatgacggccgacctcatcggtccccacacgaacagcgganckttcgtgtacggctccatgagcttcttggataaggtggccaatgggctggcagtcatggccatccagagcctgcacccttgcccctcagagctctgctgcagggcctgcgtgagcttttaccactgggcgatggtggctgtgacgggcggcgtgggcgtggccgctgccctgtgtctctgtagcctcctgctgtggccgacccgcctgcgacgctgggaccgtgatgcccggccctgactcctgacagcctcctgcacctgtgcaagggaactgtggggacgcacgaggatgccccccagggccttggggaaaagcccccactgcccctcactcttctctggacccccaccctccatcctcacccagctcccgggggtggggtcgggtgagggcagcagggatgcccgccagggacttgcaaggaccccctgggttttgagggtgtcccattctcaactctaatccatcccagccctctggaggatttggggtgcccctctcggcagggaacaggaagtaggaatcccagaagggtctgggggaaccctaaccctgagctcagtccagttcacccctcacctccagcctgggggtctccagacactgccagggccccctcaggacggctggagcctggaggagacagccacggggtggtgggctgggcctggaccccaccgtggtgggcagcagggctgcccggcaggcttggtggactctgctggcagcaaataaagagatgacggcaaaaaaaaaaaaaaaaaaaaaaaaaaaaaaaaaaaaaaaaaaaaaaaaaaaaggggggggggctagttnt

SEQ ID NO: 424 - DNA, 1487 bp, Homo sapiens
  misc_feature (78)..(78): n equals a,t,g, or c
  misc_feature (948)..(948): n equals a,t,g, or c
ccgctgctgataactatggcatcccccgggcctgcaggaattcggcacggagctacggcgccgcctggctcctgctgncacctgcaggctcgtcgcgggtggagcccacccaagacatcagcatcagcgaccagctggggggccaggacgtgcccgtgttccggaacctgtccctgctggtggtgggtgtcggcgccgtgttctcactgctattccacctgggcacccgggagaggcgccggccgcatgcggasgagccaggcgagcacacccccctgttggcccctgccacggcccagcccctgctgctctggaagcactggctccgggagcsggctttctaccaggtgggcatactgtacatgaccaccaggctcatcgtgaacctgtcccagacctacatggccatgtacctcacctactcgctccacctgcccaagaagttcatcgcgaccattcccctggtgatgtacctcagcggcttcttgtcctccttcctcatgaagcccatcaacaagtgcattgggaggaacatgacctacttctcaggcctcctggtgatcctggcctttgccgcctgggtggcgctggcggagggactgggtgtggccgtgtacgcagcggctgtgctgctgggtgctggctgtgccaccatcctcgtcacctcgctggccatgacggccgacctcatcggtccccacacgaacagcggagckttcgtgtacggctccatgagcttcttggataaggtggccaatgggctggcagtcatggccatccagagcctgcacccttgcccctcagagctctgctgcagggcctgcgtgagcttttaccactgggcgatggtggctgtgacgggcggcgtgggcgtggccgctgccctgtgtctctgtagcctcctgctgtggccgacccgcctgcgacgctgatgagacctgcacgcantggctcacagcagcacgatttgtgacagcccgaggcggagaacaccgaacacccagtgaaggtgaggggatcagcacggcgcggccacccacgcacccacgcgctggaatgagactcagccacaaggaggtgcgaagctctgacccaggccacagtgcggatgcaccttgaggatgtcacgctcagtgagagacaccagacacagaagggtacgctgtgatcccacttctatgaaatgtccaggacagaccaatccacagaatcagggagaggattcgtgggtgccgggactggggagggggacctgggggtgactaggtgacataatggggacagggctgccttctgggtgatgagaatgttctggaatcagatgggatggctgcacggcgtggtgaaggtactgaacgccacctcactgtaagacggtagattttgtattttaccacaataaacaaaacaaaacaaaaccaaaaaaaaaaaaaaaaaaaaaaaaaaaaggaattcgatatcaagcttatcgataccgtcgacctcga

SEQ ID NO: 425 - DNA, 1525 bp, Homo sapiens
  misc_feature (78)..(78): n equals a,t,g, or c
ccgctgctgataactatggcatcccccgggcctgcaggaattcggcacggagctacggcgccgcctggctcctgctgncacctgcaggctcgtcgcgggtggagcccacccaagacatcagcatcagcgaccagctggggggccaggacgtgcccgtgttccggaacctgtccctgctggtggtgggtgtcggcgccgtgttctcactgctattccacctgggcacccgggagaggcgccggccgcatgcggasgagccaggcgagcacacccccctgttggcccctgccacggcccagcccctgctgctctggaagcactggctccgggagcsggctttctaccaggtgggcatactgtacatgaccaccaggctcatcgtgaacctgtcccagacctacatggccatgtacctcacctactcgctccacctgcccaagaagttcatcgcgaccattcccctggtgatgtacctcagcggcttcttgtcctccttcctcatgaagcccatcaacaagtgcattgggaggaacatgacctacttctcaggcctcctggtgatcctggcctttgccgcctgggtggcgctggcggagggactgggtgtggccgtgtacgcagcggctgtgctgctgggtgctggctgtgccaccatcctcgtcacctcgctggccatgacggccgacctcatcggtccccacacgaacagcggactktcgtgtacggctccatgagcttcttggataaggtggccaatgggctggcagtcatggccatccagagcctgcacccttgcccctcagagctctgctgcagggcctgcgtgagcttttaccactgggcgatggtggctgtgacgggcggcgtgggcgtggccgctgccctgtgtctctgtagcctcctgctgtggccgacccgcctgcgacgctgggaccgtgatgcccggccctgactcctgacagcctcctgcacctgtgcaagggaactgtggggacgcacgaggatgccccccarggccttggggaaaagcccccactgcccctcactcttctctggacccccaccctccatcctcacccagctcccgggggtggggtcgggtgagggcagcagggatgcccgccagggacttgcaaggaccccctgggttttgagggtgtcccattctcaactctaatccatcccagccctctggaggatttggggtgcccctctcggcagggaacaggaagtaggaatcccagaagggtctgggggaaccctaaccctgagctcagtccagttcacccctcacctccagcctgggggtctccagacactgccagggccccctcaggacggctggagcctggaggagacagccacggggtggtgggctgggcctggaccccaccgtggtgggcagcagggctgcccggcaggcttggtggactctgctggcagcaaataaagagatgacggcaaaaaaaaaaaaaaaaaaaaaaaaaaaaaaaaaaaaaaaaaaaaaaaaaaacccaccgtccgc

SEQ ID NO: 426 - DNA, 1050 bp, Homo sapiens
ccacgcgtccggccagccagtccgcccgtccggagcccggctcgctggggcagcatggcggggtcgccgctgctctgggggccgcgggccgggggcgtcggccttttggtgctgctgctgctcggcctgtttcggccgccccccgcgctctgcgcgcggccggtaaaggagccccgcggcctaagcgcagcgtctccgcccttggctagactggcgctcctcgccgcttccggcggtcagtgccccgaggtgaggcggcgggggcggtgcagacctggcgcgggcgctggcgcatctgctggagccgaacgtcaggagcgggcgcgggccgaggcgcagaggctgaggatcagcaggcgcgcgtcctggcgcagctgctgcgcgtctggggcgccccccgcaactctgatccggctctgggcctggacgacgaccccgacgcgcctgcagcgcagctcgctcgcgctctgctccgcgcccgccttgaccctgccgccctagcagcccagcttgtccccgcgcccgtccccgccgcggcgctccgaccccggcccccggtctacgacgacggccccgcgggcccggatgctgaggaggcaggcgacgagacacccgacgtggaccccgagctgttgaggtacttgctgggacggattcttgcgggaagcgcggactccgagggggtggcagccccgcgccgcctccgccgtgccgccgaccacgatgtgggctctgagctgccccctgagggcgtgctgggggcgctgctgcgtgtgaaacgcctagagaccccggcgccccaggtgcctgcacgccgcctcttgccaccctgagcactgcccggatcccgtgcaccctgggacccagaagtgcccccgccatcccgccaccaggactgctccccgccagcacgtccagagcaacttaccccggccagccagccctctcacccgaggatccctaccccctggccccacaataaacatgatctgaagcagcaaaaaaaaaaaaaaaaaaaaaaaaaaaaaaaaaaaaaaaaaaaaaaaaaaa

SEQ ID NO: 427 - DNA, 718 bp, Homo sapiens
  misc_feature (1)..(1): n equals a,t,g, or c
  misc_feature (678)..(678): n equals a,t,g, or c
  misc_feature (687)..(687): n equals a,t,g, or c
  misc_feature (699)..(699): n equals a,t,g, or c
  misc_feature (708)..(708): n equals a,t,g, or c
natccccctggctgcaggaattcggcacgaggaactctgagcaccgtggcttccagcatcaatgccttggcaacagtgacctttgaggattttgtcaagagctgttttcctcatctctccgacaagctgagcacctggatcagtaaaggcttatgtctcttatttggcgtgatgtgtacctctatggctgtggctgcatctgtcatgggaggtgttgtgcaggcttccctcagcattcacggcatgtgtggaggaccaatgctgggcttattctccctgggaatcgtgttcccttttgtgaattggaagggtgcactaggaggtcttcttactggaatcaccttgtcattttgggtggccattggggccttcatttaccctgcaccagcctctaagacatggcctttgcctctatcaacagaccaatgtatcaaatcaaatgtgacagcaacagggcctccagtactatccagcagacctggaatagctgatacctggtactcgatctcctacctttactacagtgcagtgggctgcttaggatgcattgttgctggagtaatcatcagcctcataacaggtcgccaaagaggtgaggatattcaaccactggttaattagaccagtttgtaatttaatttgcttttggtctaagaaagtacaaaaccactatgctgngtgtggagntcagcatgacantggggacanagcaggaaaa

SEQ ID NO: 428 - DNA, 614 bp, Homo sapiens
  misc_feature (52)..(52): n equals a,t,g, or c
aatcccaaaggttgtctttaaatatttctcaaaagagaaagccttgaaagangcatacaatagagtaaaaatwaattaccagtatttattattagaaaagatagaaagacagacaaatcagtggaggaattaaaacagagaaactggagtttataaaacagagcccaatccttgccttctctccctccactcaaatagaaaaggagaatggagaaagagaaagaaggtattaggctacagtttataagagagatgagaaaaaaatacatttgggaatagagggaaagggtcaaaaggggtcacatttggagaaatatctgaaaatgagaaggagcagaatttttggaaacattttttaaagtctggcaacgctaattaagctgttgatctaaggatttgcaaattgagaggtgcaattattttccaaatgatttgtgacactcttattaattagaatatatattctgtgaatattgaaatctgagccaaaactagttagctttattaatatcttagggaaagaagagagaaagaaagagggagggagagagagaaagaaagaaagaaagaaagaaagaaagaaagaaagaaaaaaaaaaaaaaaaaactcgtag

SEQ ID NO: 429 - DNA, 1194 bp, Homo sapiens
gagcccagcaacgtgcaaggggaaaggggacaggattctggatggccatttgcttcactgggatgcaaaacctcttttgagtactagaatcagtatttcttcttccatctctgctgtacctgagaagaaatggccaaacgcaccttctctaacttggagacattcctgattttcctccttgtaatgatgagtgccatcacagtggcccttctcagcctcttgtttatcaccagtgggaccattgaaaaccacaaagatttaggaggccattttttttcaaccacccaaagccctccagccacccagggctccacagccgcccaacgctccacagccacccagcattccacagccacccagagctccaacagccaactcaaacttctccagtgcctttaaccccagagtctcctctatttcagaacttcagtggctaccatattggtgttggacgagctgactgcacaggacaagtagcagatatcaatttgatgggctatggcaaatccggccagaatgcacagggcatcctcaccaggctatacagtcgtgccttcatcatggcagaacctgatgggtccaatcgaacagtgtttgtcagcatcgacataggcatggtatcccaaaggctcaggctggaggtcctgaacagactgcagagtaaatatggctccctgtacagaagagataatgtcatcctgagtggcactcacactcattcaggtcctgcaggatatttccagtataccgtgtttgtaattgccagtgaaggatttagcaatcaaacttttcagcacatggtcactggtatcttgaagagcattgacatagcacacacaaatatgaaaccaggcaaaatcttcatcaataaaggaaatgtggatggtgtgcagatcaacagaagtccgtattcttaccttcaaaatccgcagtcagagagagcaaggtattcttcaaatacagacaaggaaatgatagttttgaaaatggtagatttgaatggagatgacttgggccttatcagtttttcattcagcaagtctgcactagggacctactatgagccacgcaatacttccttggaatgatgtattccctggccttgaaataaggaatctagtacccatgtttgtgctactggaatgaatccattaaactctctgagactcaaaaaaaaaaaaaaaaaaaaaaaaa

SEQ ID NO: 430 - DNA, 2334 bp, Homo sapiens
  misc_feature (2278)..(2278): n equals a,t,g, or c
  misc_feature (2290)..(2290): n equals a,t,g, or c
gggagtgtggctgcagaacccaggtggcagggctttcctcaggccccttactcctgacctggacgaggccggggcttcctcaaggaggctctctgactgccacccctgcctgcctgcccggccctgcacaacatgcagccctccggcctcgagggtcccggcacgtttggtcggtggcctctgctgagtctgctgctcctgctgctgctgctccagcctgtaacctgtgcctacaccacgccaggcccccccagagccctcaccacgctgggcgcccccagagcccacaccatgccgggcacctacgctccctcgaccacactcagtagtcccagcacccagggcctgcaagagcaggcacgggccctgatgcgggacttcccgctcgtggacggccacaacgacctgcccctggtcctaaggcaggtttaccagaaagggctacaggatgttaacctgcgcaatttcagctacggccagaccagcctggacaggcttagagatggcctcgtgggcgcccagttctggtcagcctatgtgccatgccagacccaggaccgggatgccctgcgcctcaccctggagcagattgacctcatacgccgcatgtgtgcctcctattctgagctggagcttgtgacctcggctaaagctctgaacgacactcagaaattggcctgcctcatcggtgtagagggtggccactcgctggacaatagcctctccatcttacgtaccttctacatgctgggagtgcgctacctgacgctcacccacacctgcaacacaccctgggcagagagctccgctaagggcgtccactccttctacaacaacatcagcgggctgactgactttggtgagaaggtggtggcagaaatgaaccgcctgggcatgatggtagacttatcccatgtctcagatgctgtggcacggcgggccctggaagtgtcacaggcacctgtgatcttctcccactcggctgcccggggtgtgtgcaacagtgctcggaatgttcctgatgacatcctgcagcttctgaagaagaacggtggcgtcgtgatggtgtctttgtccatgggagtaatacagtgcaacccatcagccaatgtgtccactgtggcagatcacttcgaccacatcaaggctgtcattggatccaagttcatcgggattggtggagattatgatggggccggcaaattccctcaggggctggaagacgtgtccacatacccagtcctgatagaggagttgctgagtcgtggctggagtgaggaagagcttcagggtgtccttcgtggaaacctgctgcgggtcttcagacaagtggaaaaggtacaggaagaaaacaaatggcaaagccccttggaggacaagttcccggatgagcagctgagcagttcctgccactccgacctctcacgtctgcgtcagagacagagtctgacttcaggccaggaactcactgagattcccatacactggacagccaagttaccagccaagtggtcagtctcagagtcctccccccacatggccccagtccttgcagttgtggccaccttcccagtccttattctgtggctctgatgacccagttagtcctgccagatgtcactgtagcaagccacagacaccccacaaagttcccctgtttgcaggcacaaatatttcctgaaataaatgttttggacatagaaaaaaaaaaaaaaaaaagggcggccgctctagaggatccctcgaggggcccaagcttacgcgtgcatgcgacgtcatagctctctccctatagtgagtcgtattataagctaggcactggccgtcgttttacaacgtcgtgactgggagatctgctagcttgggatctttgtgaaggaaccttacttctgtggtgtgacataattggacaaactacctacagagatttaaagctctaaggtaaatataaaatttttaagtgtataatgtgttaaactagctgcatatgcttgctgcttgagagttttgcttactgagtatgatttatgaaaatattatacacaggagctagtgattctaattgtttgtgtattttagattcacagtcccaaggctcatttcaggcccctcagtcctcacagtctgttcatgatcataatcagccataccacatttgtagaggttttacttgctttaaaaaacctyccacacctccccctgaacctgaaacataaaatgaatgcaattggtggtggtaacttggttaatggagcttataatggtaccaataaagcantgcatcacaaanttcccaaataaagcattttttcctggaatttaaatgggggttgg

SEQ ID NO: 431 - DNA, 759 bp, Homo sapiens
  misc_feature (16)..(16): n equals a,t,g, or c
  misc_feature (22)..(22): n equals a,t,g, or c
  misc_feature (36)..(36): n equals a,t,g, or c
  misc_feature (51)..(52): n equals a,t,g, or c
  misc_feature (57)..(58): n equals a,t,g, or c
ggattaacaaattttncacacnaggaaaacaggttnttgacccaattaggnnttttnncaaaaaagcttatttttaggttgacacttattagaagttacgccttgcaggttaccggttccggaattcccgggtcgaaccccaaggggttcgcggaccccagacatgaggaggctcctcctggtcaccagcctggtggttgtgctgctgtgggaggcaggtgcagtcccagcacccaaggtccctatcaagatgcaagtcaaacactggccctcagagcaggacccagagaaggcctggggcgcccgtgtggtggagcctccggagaaggacgaccagctggtggtgctgttccctgtccagaagccgaaactcttgaccaccgaggagaagccacgaggtcagggcaggggccccatccttccaggcaccaaggcctggatggagaccgaggacaccctgggccgtgtcctgagtcccgagcccgaccatgacagcctgtaccaccctccgcctgaggaggaccagggcgaggagaggccccggttgtgggtgatgccaaatcaccaggtgctcctgggaccggaggaagaccaagaccacatctaccacccccagtagggctccaggggccatcactgcccccgccctgtcccaaggcccaggctgttgggactgggaccctccctaccctgccccagctagacaaataaaccccagcaggccgggaaaaaaaaaaaaaaaaaaaaaagggcggccgc

SEQ ID NO: 432 - DNA, 647 bp, Homo sapiens
  misc_feature (525)..(525): n equals a,t,g, or c
  misc_feature (578)..(578): n equals a,t,g, or c
  misc_feature (581)..(581): n equals a,t,g, or c
  misc_feature (620)..(620): n equals a,t,g, or c
  misc_feature (629)..(630): n equals a,t,g, or c
gtgaaacgcctgggctcaagctgattcacctgcctccacctcccacagtgctgggattacaaacatgatcccccacgcccagccaacacaaaacttctgatgctctgttttctcatctgtgaactggagctaaggctaagtggtctgtctgtttaataagagtttgaatcagatggcctggcatgaagagtcactggcctgagagaatgtcaggggcatttgtaaatgtgtaaagggctgaaaaatcctgagggattattattattgctattgttgttattattcacagacacatycaacagccattgtctgcctccttatctgtcatgctttctgcacgagcgtcagcctgagcttcaatctgtgtgtatatctgcagcttacgtccttgcacccctccagaacccagtttcatccttgtaggtttttccraagcaggatttgcacaagtggcgtgttttcttaagtatttattttgcaggccatttactcggcatggctatttttacagtgggtaaggagcanggctaaaaataacttagctcataaccagacaggttctgcatttgacattacgnggnattcatttgcatcccatttggtcgcctttctggttaacnggtagaatnnaagaaagctcacccgaa

SEQ ID NO: 433 - DNA, 1321 bp, Homo sapiens
gcgggggggaggaggagggggaggagggagcggagatctcggggctcggagccggccgccgctccgctccgatcgctgtggggcttggttttttgggggtgggggggcgggggggctcagatatggaggcaaatgggagccaaggcacctcgggcagcgccaacgactcccagcacgaccccggtaaaatgtttatcggtggactgagctggcagacctcaccagatagccttagagactattttagcaaatttggagaaattagagaatgtatggtcatgagagatcccactacgaaacgctccagaggcttcggtttcgtcacgttcgcagacccagcaagtgtagataaagtattaggtcagccccaccatgagttagattccaagacgattgaccccaaagttgcatttcctcgtcgagcgcaacccaagatggtcacaagaacaaagaaaatatttgtaggcgggttatctgcgaacacagtagtggaagatgtaaagcaatatttcgagyagtttkgcaaggtggaagatgcaatgctgatgtttgataaaactaccaacaggcacagagggtttggctttgtcacttttgagaatgaagatgttgtggagaaagtctgtgagattcatttccatgaaatcaataataaaatggtagaatgtaagaaagctcagccgaaagaagtcatgttcccacctgggacaagaggccgggcccggggactgccttacaccatggacgcgttcatgcttggcatggggatgctgggtgagtctggacaggaccgcaggtcaccatggactgggagggctatggaggcctctactcccaactgggtcacctaccagtggggcaaactgcttcacctttctaagcctcagtttccttgtctgtagatgaggatgataattccccgttccaagacagttgtgatgattaagtgtgggtgtgtgtgtgtgcatgcatgtgtgtgtgtgtgtgtgtgtgtttgtatttataatattgccccatgcctggcttataggatatgttagactattttctctcttttccatctccttcctcaaaagaaggaaaagtccccctctatctgcctcagccctctcatctgagtgggagttyttaagatgtaaggactcctggctgacttgacttgtgtgggctaaggctacgttttctaaaacttgggagaggagggaagtggtaagggtgggcgataatcctgtctatttaaatgattaacatttttctcttgggatatcaaaatttgcatttaaatggatgttttaaatagcctgttttactctttatttgc

SEQ ID NO: 434 - DNA, 1636 bp, Homo sapiens
  misc_feature (1624)..(1624): n equals a,t,g, or c
tcgacccacgcgtccggctgagtgtgagctgagcctgccccaccaccaagatgatcctgagcttgctgttcagccttgggggccccctgggctgggggctgctgggggcatgggcccaggcttccagtactagcctctctgatctgcagagctccaggacacctggggtctggaaggcagaggctgaggacaccagcaaggaccccgttggacgtaactggtgcccctacccaatgtccaagctggtcaccttactagctctttgcaaaacagagaaattcctcatccactcgcagcagccgtgtccgcagggagctccagactgccagaaagtcaaagtcatgtaccgcatggcccacaagccagtgtaccaggtcaagcagaaggtgctgacctctttggcctggaggtgctgccctggctacacgggccccaactgcgagcaccacgattccatggcaatccctgagcctgcagatcctggtgacagccaccaggaacctcaggatggaccagtcagcttcaaacctggccaccttgctgcagtgatcaatgaggttgaggtgcaacaggaacagcaggaacatctgctgggagatctccagaatgatgtgcaccgggtggcagacagcctgccaggcctgtggaaagccctgcctggtaacctcacagctgcagtgatggaagcaaatcaaacagggcacgaattccctgatagatccttggagcaggtgctgctaccccacgtggacaccttcctacaagtgcatttcagccccatctggaggagctttaaccaaagcctgcacagccttacccaggccataagaaacctgtctcttgacgtggaggccaaccgccaggccatctccagagtccaggacagtgccgtggccagggctgacttccaggagcttggtgccaaatttgaggccaaggtccaggagaacactcagagagtgggtcagctgcgacaggacgtggaggaacgcctgcacgcccagcactttaccctgcaccgctcgatctcagagctccaagccgatgtggacaccaaattgaagaggctgcacaaggctcakgaggccccagggaccaatggcagtctggtgttggcaacgcctggggctggggcaaggcctgagccggacagcctgcaggccaggctgggccagctgcagaggaacctctcagagctgcacatgaccacggcccgcagggaggaggagttgcagtacaccctggaggacatgagggccaccctgacccggcacgtggatgagatcaaggaactgymctccgaatcggacgagactttcgatcagattagcaagktgkwgcggcaggtggaggagctgcaggtgaaccacacggcgctccgtgagctgcgcgtgatcctgatggagaagtctctgatcatggaggagaacaaggaggaggtggagcggcagctcctggagctcaacctcacgctgcagcacctgcagggtggcatgccgacctcatcaagtacgtgaaggactgcaattgccagaagctctatttagacctggacgtcatccgggagggcagagggacgccacgcgtgccctggaggagacccaggtgagcctggacgarcggnggcaagctggac

SEQ ID NO: 435 - DNA, 645 bp, Homo sapiens
tcgacccacgcgtccgccaaaagcagacatagcttcagatgcagcttgatccagggctcagatgccatgatcagaatccaattcttgcatctgtttctttgggttggcttcattttcaggcagcccccttcctcatatcctcaagatggcagagacagcccatggtctttcccttgcagagacagatcaccaggaaacaatacctctatccctagccatgaaacagtcttgaactttattctgacttgatcagccaagtccctgttggaaccatcactgcctagcttaggcctgagacagtgctgcacctctactaccaaaggccgggctggccttccctaaagtgtatgtgctgcgtgggggagaggtacggatctgaaccaaaacgagggctgtccagcgtcagcaaatatctcccgcagtcccagtgcctccagcaggaggcaaagcatcaacccctccgtctggctcctctactgaaaattccctcagcagcctcacaggccttaggcttgtcttagctacttcttcatctacttttttgctttcttaattatttttcttttcttttttcttattttattttattttattttagatggagtttcgctccgtcgcccaggctgaagtgcagtttcagacatg

SEQ ID NO: 436 - DNA, 1084 bp, Homo sapiens
ggatggcgctacgtctgctgcggagggcggcgcgcggagctgcggcggcggcgctgctgaggctgaaagcgtctctagcagctgatatccccagacttggatatagttcctcatcccatcacaagtacatcccccggagggcagtgctttatgtacctggaaatgatgaaaagaaaataaagaagattccatccctgaatgtagattgtgcagtgctcgactgtgaggatggagtggctgcaaacaaaaagaatgaagctcgactgagaattgtaaaaactcttgaagacattgatctgggccctactgaaaaatgtgtgagagtcaactcagtttccagtggtctggcggaagaagacctagagacccttttgcaatcccgggtccttccttccagcctgatgctaccaaaggtggaaagtcctgaagaaatccagtgggcagtgtgtgaagaaaccctgaaggtcgggcctcaagtaggtctctttctagatgcagtccgtttttggaggaraagactttcgagccacataggtgcamcaagtartaaagaaaccctggatawtctctacgcccggcaaaagattgttgtcatagcgaaagcctttggtctccaagccgtaratctggkgkacattgactttcgagatggarctkggctgcttagacagtcacgagaaggagccgccatgggcttcactggtaagcaggtgattcaccctaaccaaattgccgtggtccaggagcagttttctccttcccctgaaaaaattaagtgggctgaagaactgattgctgcctttaaagaacatcaacaattaggaaagggggcctttactttccaagggagtatgatcgacatgccattactgaagcaggcccagaacactgttacgcttgccacctccatcaaggaaaaatgatctgttaaatgaagctgtcatcaggctaaagggtattgaagctgcagagggatcaacttgtgcttgccagaggacgccaatgaagtttgaaacaccaacaatcagagattttgtttctgttcctcattaaatcatgagcttttgtgccgagaaaaaaaaaa

SEQ ID NO: 437 - DNA, 1168 bp, Homo sapiens
ggcacgagcccccgccccctccctccctcccctcccttccccggccccggctctggccccggcccattcgctgttgggtcttctgctagggaggatgtcgggttcgtcgctgcccagcgccctggccctctcgctgttgctggtctctggctccctcctcccagggccaggcgccgctcagaacgtgagagtacaatctggacaggatcagaagtagagaatgaagttgtaagagaaagggaaagacagaagaaaggctgcagtagtacaaggagaaaagcaggatgcaagaatgaggaatgaatctttgtttgaggagcatccggaaaaatataagctgtcagaaagagtaaatagaccagggacctctaaagtaaattcacacatcaaagttaaaataatgttggagaatcacctcctgtgaaaaattggcttagctttcagtatgcctctttaaacaaaacattatcattttatacaaatttttaaaatgttgttcataatatggagtttaattttaagcaccttagataatgcatttgttagcttgtttgtgaaatttttatggattttttttttcaaaattcctaattttagttggtaaggattaacttcgggaagacaggaaacccctccagtaaaattaattggttataaatggttacatattttaggcttatatacataacaaaacttctaactgaatttaaaagtgatcttgtgtaaaaacattattctagtgatattgatgtctaaatttaaaagagtgaatacacaagtaaaatatatctgctttttaaggatctattcagtttaggaaggagagtcaaaatttgtatttaatttcaatttattatattgtctgaaactgaaagtaggcctaacttttgtttgcttttgtgtatgtacaaaggcaaacatttatcaatcaactcttattaatttgagattattttgacctgattgctcagaacttttgtctatctgtatagaaatggggttttctaaatatttaaagaatttcctacgtatgtaaatttacttgcacacagtaagttaggggagacatttaatattcctcagatacctgctgttttcttgttgtgtttcttgtttttcaaataaataaactgagtgttatctgttcattaaaatagaatgtagtcag

SEQ ID NO: 438 - DNA, 1776 bp, Homo sapiens
  misc_feature (1748)..(1748): n equals a,t,g, or c
agccactgtgcccagcctcggctcaggtttttmaatacagtcttgaccttggcattcagtatcctcacagcatggttctaattaactttctagctctatttcccttttcctgctccctctctctacaactagtctttctctgattgccccgccctcaacccatctaaactagaccccagggaagcaccttggtccccttcctctctcccactcaccatccaaccaatcaccagagcctgtacattctatattttcaacatcgattcaattgtctacttctttctagcctgccctctctgactgggactccttgagccagcctgatcaccccaatccatccctcacactgtgcccatctttctgaagtaggaatctgatcacaccamcctgctaaaaacactctggttctccccacggcatgtggtgcccttgtatagctggcaaagccttgcatggcacggccccagcctgtgcttcaactcaattgcccgactctctccagctctgctgagccacctaagtcacagatggtttctcctctcatctctgctctcttccatgtgccatttctgtggcttggaatgttcttccctcattctctttctggccctttcccgtcacaccttagacgtgcatcttcctctcgaaaacctctagtgaagcctcccagggccaggcagtaccctcctctggcttcttctggatacagaggaagaatctgagcatcgattctccatctcagcaggcctctgtgtgcctgctgactccgactagaccagagatccgtaaggacagggatcgagttttttttcttttaatkcactgcctcaaaaatcctctgtgcattacctattcatcctcttctctcccttaacctgaaccagtgatcttactgtctccatcattgtttttttcttttcttttcttttcttttttttttttgaggtggagtctggctcttcacccaggctggagtgcagtgatgcgatctcgactcactgcaacctccatctcctgggttcaagcgattctcctgcctcagcctccccagtagctgggattacaggcatgcgctaccatccccaactaatttttgcctccataattytgccttttstagaatgtcatacaggtggaattactcagtatgctgcctttttcagattggcttctttcacttagtaatatgstygttttttgagacagggtcttgctctgtcgcccaggctagagtgtggtggtgcgatcttagctcactgaaacctccacctcccaggttcaagtgaytctsctgcctcagcctcccgagtagctgggactacaggcacgtgccaccatacccggctaatttgtggatttttagtacagacggsgtttcgtcatgttggccagtgtgytgttgaattcctgacctcaagtgatccacctgcctcagcctcccaaagtgttgcgattacaggtgtgagccactgcgccaagcctcatttagtaataygcatttaaactttctccatgkctttaatggcttgatagctcatttatttttatcawggaatatttcattgtctggatggaccacagtttatttctccattcacctactgaaggacatctcggttgcttctaagttttggcaattatgaataaagctgctataaccatcaagtgcaggtttttgtgtggacctattatcaactaattcgggtaaatctcaaggagtgcaattgctggatccacagtaagagtgngtttagttttaagtgcttggccattttc

SEQ ID NO: 439 - DNA, 784 bp, Homo sapiens
  misc_feature (1)..(1): n equals a,t,g, or c
  misc_feature (6)..(6): n equals a,t,g, or c
  misc_feature (32)..(32): n equals a,t,g, or c
ngagtntaattgctggatcacacagtaagagngtggttagttttaagtggctgtgccattttgcattcccaccagcaatgaatgagagtttctgttgctccacattctcactaccattcggtgttgtcagtgttttgcattttggccattctagtaggtgtttacatggtatctagtcatttgaatgggcatatgatgtggaacatctttttttttttattttwttattattatactttaagttttagggtacatgtgcacaaygtgcaggttwgttacatatgtatacatgtgccatgytggtgtgctgcacccaytaactcgtcatytagcattaggtatatctccyaatgctattggaacatcttttcatgtgtttatttgccatctgtatatcttccctgatgagttggggatgcattctttccatctcagagtccccagaaactaacatagcagttggtacagagttggtgctcaacaaacatcagcttaggaactatgtcctatgtttttttgtttttttttttttttaaaaaggaatgtgagctgttcccaaaacgtatgtccttcccccatgcctctaccctgcccttccacaaactttctgatcttcagcacacactacccaaccatcaaggctgagacttcccgtggccagcagtgtctcatgctggcttcaagccccacagcactgcttttttcaacttctcttgtggtttagactgtctttagcccagcaagagaattcgatatcaagcttatcgataccgtcgacctcgag

SEQ ID NO: 440 - DNA, 699 bp, Homo sapiens
  misc_feature (12)..(12): n equals a,t,g, or c
  misc_feature (30)..(30): n equals a,t,g, or c
  misc_feature (46)..(46): n equals a,t,g, or c
  misc_feature (66)..(66): n equals a,t,g, or c
ggttcatgcttnaaccccatttgctggatnctgctttgaccctgtntccctgtactggtgttatgngaatcctggcacacattgctatcccactctgagaggmcwtgagcaaagaamccccagtrgcagaagccacattgtgctcaggtcttagttctaacaaacaccattccccattaaaaggaaccaggctccttagagaaatggatgattccagggctgtggcagggtaggtacaagatgaacctaaagtgtcgttttataccagaaagtaagaaagtattaaagtgtttaaaaaagtgatgggagcatatcacaaggattcagaagggataccaactggctaaatctggaacaatttgatcaccaaagtaagtacaataataaattctaagctattgaagtaaaggcatttattatgtgtagtaataataaatagataatgagagagaaatgaggactcatgcttacagtaaaatgccaggagctgactggcataaatgtggaaggaaggctggagtgggaaaattattattttgcaaccatcatggtaattaccagatcagataaggatcaacagatgccaaatctagggcaaatttgatgaggagcagaatatttgcactgtctttgagagtttctcccagagatcacttatttgttgtaaaaaaaaagaaaaaaaaaaaaaaaaaactcgag

SEQ ID NO: 441 - DNA, 616 bp, Homo sapiens
  misc_feature (3)..(3): n equals a,t,g, or c
  misc_feature (592)..(592): n equals a,t,g, or c
  misc_feature (611)..(611): n equals a,t,g, or c
  misc_feature (613)..(613): n equals a,t,g, or c
agngacagcagttccctggcttctggaaggagtgtcggtctatccaaaaaatgtactaacagatatgtaaaccctgatgaatacagtatgtgttatgagaagtggcccaacgaagcagctcatccaagtgagattctgaagttgggctggcgagtacacgaatggctttcttactagagagaagtgggaccctgctaatctgtagcatgtggtggcatcatggttactcaaatatcactggaacagaaggtgaaagaagaaatctgaagagaaataaaacaaattttcggcggttccaagatggccgaataggaacagctccagtctacagctcccagtgtgagagatgcagaagatgggtgatttctgcatttccaactgagcaaacggsacaccagaagattatatcccatgcctggctgggagggtcccatgcccacggagcctcgctcattgctagcacagcagtctgagatccatctgcaaggtgggcagtawggctggsggaggggcacccaccattgctgaggcttgagtaggtaaacgaagcarycaggaagctcgaactgggtggagcccaccgcaactcaangaggcctggctacctctgnanact

SEQ ID NO: 442 - DNA, 1842 bp, Homo sapiens
  misc_feature (67)..(67): n equals a,t,g, or c
  misc_feature (98)..(98): n equals a,t,g, or c
  misc_feature (212)..(212): n equals a,t,g, or c
  misc_feature (1838)..(1838): n equals a,t,g, or c
gcgaccgcgcccttcagctagctcgctcgctcgctctgcttccctgctgccggctgcgcatggcttnggcgttggcggcgctggcggcggctcgagcngcctgcgsagccggtaccagcagttgcagaatgaagaagagtctggagaacctgaacaggctgcaggtgatgctcctccaccttacagcagcatttctgcagagagcgcacatnattttgactacaaggatgagtctgggtttccaaagcccccatcttacaatgtagctacaacactgcccagttatgatgaagcggagaggaccaaggctgaagctactatccctttggttcctgggagagatgaggattttgtgggtcgggatgattttgatgatgctgaccagctgaggataggaaatgatgggattttcatgttaacttttttcatggcattcctctttaactggattgggtttttcctgtctttttgcctgaccacttcagctgcaggaaggtatggggccatttcaggatttggtctctctctaattaaatggatcctgattgtcaggttttccacctatttccctggatattttgatggtcagtactggctctggtgggtgttccttgttttaggctttctcctgtttctcagaggatttatcaattatgcaaaagttcggaagatgccagaaactttctcaaatctccccaggaccagagttctctttatttattaaagatgttttctggcaaaggccttcctgcatttatgaattctctctcaagaagcaagagaacacctgcaggaagtgaatcaagatgcagaacacagaggaataatcacctgctttaaaaaaataaagtactgttgaaaagatcatttctctctatttgttcctaggtgtaaaattttaatagttaatgcagaattctgtaatcattgaatcattagtggttaatgtttgaaaaagctcttgcaatcaagtctgtgatgtattaataatgccttatatattgtttgtagtcattttaagtagcatgagccatgtccctgtagtcggtagggggcagtcttgctttattcatcctccatctcaaaatgaacttggaattaaatattgtaagatatgtataatgctggccattttaaaggggttttctcaaaagttaaacttttgttatgactgtgtttttgcacataatccatatttgctgttcaagttaatctagaaatttattcaattctgtatgaacacctggaagcaaaatcatagtgcaaaaatacatttaaggtgtggtcaaaaataagtctttaattggtaaataataagcattaattttttatagcctgtattcacaattctgcggtaccttattgtacctaagggattctaaaggtgttgtcactgtataaaacagaaagcactaggatacaaatgaagcttaattactaaaatgtaattcttgacactctttctataattagcgttcttcacccccacccccacccccaccccccttattttccttttgtctcctggtgattaggccaaagtctgggagtaaggagaggattaggtacttaggagcaaagaaagaagtagcttggaacttttgagatgatccctaacatactgtactacttgcttttacaatgtgttagcagaaaccagtgggttataatgtagaatgatgtgctttctgcccaagtggtaattcatcttggtttgctatgttaaaactgtaaatacaacagaacattaataaatatctcttgtgtagcaccttttaaaaaaaaaaaaaaaaaaaaaaaaaaaaaaaaaaaaaaaaaaaaaaaaaaaaaaaaaaaanaaaa

SEQ ID NO: 443 - DNA, 1963 bp, Homo sapiens
  misc_feature (335)..(335): n equals a,t,g, or c
  misc_feature (1959)..(1959): n equals a,t,g, or c
ggatcctcgcggcggcggcggtgcttacagcctgagaagagcgtctcgcccgggagcggcggcggccatcgagacccacccaaggcgcgtccccctcggcctcccagcgctcccaagccgcagcggccgcgccccttcagctagctcgctcgctcgctctgcttccctgctgccggctgcgcatggckttggcgttggcggcgctggcggcggtcgagccgcctgcgcagccggtaccagcagttgcagaatgaagaagagtctggagaacctgaacaggctgcaggtgatgctcctccaccttacagcagcatttctgcagagagcgcagcatnattttgactacaaggatgagtctgggtttccaaagcccccatcttacaatgtagctacaacactgcccagttatgatgaagcggagaggaccaaggctgaagctactatccctttggttcctgggagagatgaggattttgtgggtcgggatgattttgatgatgctgaccagctgaggataggaaatgatgggattttcatgttaacttttttcatggcattcctctttaactggattgggtttttcctgtctttttgcctgaccacttcagctgcaggaaggtatggggccatttcaggatttggtctctctctaattaaatggatcctgattgtcaggttttccacctatttccctggatattttgatggtcagtactggctctggtgggtgttccttgttttaggctttctcctgtttctcagaggatttatcaattatgcaaaagttcggaagatgccagaaactttctcaaatctccccaggaccagagttctctttatttattaaagatgttttctggcaaaggccttcctgcatttatgaattctctctcaagaagcaagagaacacctgcaggaagtgaatcaagatgcagaacacagaggaataatcacctgctttaaaaaaataaagtactgttgaaaagatcatttctctctatttgttcctaggtgtaaaattttaatagttaatgcagaattctgtaatcattgaatcattagtggttaatgtttgaaaaagctcttgcaatcaagtctgtgatgtattaataatgccttatatattgtttgtagtcattttaagtagcatgagccatgtccctgtagtcggtagggggcagtcttgctttattcatcctccatctcaaaatgaacttggaattaaatattgtaagatatgtataatgctggccattttaaaggggttttctcaaaagttaaacttttgttatgactgtgtttttgcacataatccatatttgctgttcaagttaatctagaaatttattcaattctgtatgaacacctggaagcaaaatcatagtgcaaaaatacatttaaggtgtggtcaaaaataagtctttaattggtaaataataagcattaattttttatagcctgtattcacaattctgcggtaccttattgtacctaagggattctaaaggtgttgtcactgtataaaacagaaagcactaggatacaaatgaagcttaattactaaaatgtaattcttgacactctttctataattagcgttcttcacccccacccccacccccaccccccttattttccttttgtctcctggtgattaggccaaagtctgggagtaaggagaggattaggtacttaggagcaaagaaagaagtagcttggaacttttgagatgatccctaacatactgtactacttgcttttacaatgtgttagcagaaaccagtgggttataatgtagaatgatgtgctttctgcccaagtggtaattcatcttggtttgctatgttaaaactgtaaatacaacagaacattaataaatatctcttgtgtagcacctttaaaaaaaaaaaaaaaaaaaaaaaaaaaaaaaaaaaaaaaaaaaaaaaaaaaaaaaaaaanaaaa

SEQ ID NO: 444 - DNA, 1487 bp, Homo sapiens
  misc_feature (1470)..(1470): n equals a,t,g, or c
  misc_feature (1487)..(1487): n equals a,t,g, or c
gcgaccgcgcccctttcagctagctcgctcgctcgctctgcttccctgctgccggctgcgcatggckwtggcgttggcggcgctggcggcggtcgagccggcctgcgcagccggtaccagcagttgcagaatgaagaagagtctggagaacctgaacaggctgcaggtgatgctcctccaccttacagcagcatttctgcagagagcgcagttttccacctatttccctggatattttgatggtcagtactggctctggtgggtgttccttgttttaggctttctcctgtttctcagaggatttatcaattatgcaaaagttcggaagatgccagaaactttctcaaatctccccaggaccagagttctctttatttattaaagatgttttctggcaaaggccttcctgcatttatgaattctctctcaagaagcaagagaacacctgcaggaagtgaatcaagatgcagaacacagaggaataatcacctgctttaaaaaaataaagtactgttgaaaagatcatttctctctatttgttcctaggtgtaaaattttaatagttaatgcagaattctgtaatcattgaatcattagtggttaatgtttgaaaaagctcttgcaatcaagtctgtgatgtattaataatgccttatatattgtttgtagtcattttaagtagcatgagccatgtccctgtagtcggtagggggcagtcttgctttattcatcctccatctcaaaatgaacttggaattaaatattgtaagatatgtataatgctggccattttaaaggggttttctcaaaagttaaacttttgttatgactgtgtttttgcacataatccatatttgctgttcaagttaatctagaaatttattcaattctgtatgaacacctggaagcaaaatcatagtgcaaaaatacatttaaggtgtggtcaaaaataagtctttaattggtaaataataagcattaattttttatagcctgtattcacaattctgcggtaccttattgtacctaagggattctaaaggtgttgtcactgtataaaacagaaagcactaggatacaaatgaagcttaattactaaaatgtaattcttgacactctttctataattagcgttcttcacccccacccccacccccaccccccttattttccttttgtctcctggtgattaggccaaagtctgggagtaaggagaggattaggtacttaggagcaaagaaagaagtagcttggaacttttgagatgatccctaacatactgtactacttgcttttacaatgtgttagcagaaaccagtgggttataatgtagaatgatgtgctttctgcccaagtggtaattcatcttggtttgctatgttaaaactgtaaatacaacagaacattaataaatatctcttgtgtagcacctttaaaaaaaaaaaaaaaaaaaaaaaaaaaaaaaaaaancccgggggggggccccn

SEQ ID NO: 445 - DNA, 1653 bp, Homo sapiens
  misc_feature (67)..(67): n equals a,t,g, or c
  misc_feature (212)..(212): n equals a,t,g, or c
  misc_feature (1636)..(1636): n equals a,t,g, or c
  misc_feature (1653)..(1653): n equals a,t,g, or c
gcgaccgcgcccttcagctagctcgctcgctcgctctgcttccctgctgccggctgcgcatggcttnggcgttggcggcgctggcggcggctcgagccgcctgcgsagccggtaccagcagttgcagaatgaagaagagtctggagaacctgaacaggctgcaggtgatgctcctccaccttacagcagcatttctgcagagagcgcacatnattttgactacaaggatgagtctgggtttccaaagcccccatcttacaatgtagctacaacactgcccagttatgatgaagcggagaggaccaaggctgaagctactatccctttggttcctgggagagatgaggattttgtgggtcgggatgattttgatgatgctgaccagctgaggataggaaatgatgggattttcatgttaacttttttcatggcattcctctttaactggattgggtttttcctgtctttttgcctgaccacttcagctgcaggaaggtatggggccatttcaggatttggtctctctctaattaaatggatcctgattgtcaggttttccacctatttccctgcatttatgaattctctctcaagaagcaagagaacacctgcaggaagtgaatcaagatgcagaacacagaggaataatcacctgctttaaaaaaataaagtactgttgaaaagatcatttctctctatttgttcctaggtgtaaaattttaatagttaatgcagaattctgtaatcattgaatcattagtggttaatgtttgaaaaagctcttgcaatcaagtctgtgatgtattaataatgccttatatattgtttgtagtcattttaagtagcatgagccatgtccctgtagtcggtagggggcagtcttgctttattcatcctccatctcaaaatgaacttggaattaaatattgtaagatatgtataatgctggccattttaaaggggttttctcaaaagttaaacttttgttatgactgtgtttttgcacataatccatatttgctgttcaagttaatctagaaatttattcaattctgtatgaacacctggaagcaaaatcatagtgcaaaaatacatttaaggtgtggtcaaaaataagtctttaattggtaaataataagcattaattttttatagcctgtattcacaattctgcggtaccttattgtacctaagggattctaaaggtgttgtcactgtataaaacagaaagcactaggatacaaatgaagcttaattactaaaatgtaattcttgacactctttctataattagcgttcttcacccccacccccacccccaccccccttattttccttttgtctcctggtgattaggccaaagtctgggagtaaggagaggattaggtacttaggagcaaagaaagaagtagcttggaacttttgagatgatccctaacatactgtactacttgcttttacaatgtgttagcagaaaccagtgggttataatgtagaatgatgtgctttctgcccaagtggtaattcatcttggtttgctatgttaaaactgtaaatacaacagaacattaataaatatctcttgtgtagcaccttttawaaaaaaaaaaaaaaaaaaaaaaaaaaaaaaaaaaancccgggggggggccccn

SEQ ID NO: 446 - DNA, 1830 bp, Homo sapiens
  misc_feature (67)..(67): n equals a,t,g, or c
  misc_feature (97)..(97): n equals a,t,g, or c
  misc_feature (211)..(211): n equals a,t,g, or c
  misc_feature (1813)..(1813): n equals a,t,g, or c
  misc_feature (1830)..(1830): n equals a,t,g, or c
gcgaccgcgcccttcagctagctcgctcgctcgctctgcttccctgctgccggctgcgcatggcttnggcgttggcggcgctggcggcggtcgagcngcctgcgsagccggtaccagcagttgcagaatgaagaagagtctggagaacctgaacaggctgcaggtgatgctcctccaccttacagcagcatttctgcagagagcgcacatnattttgactacaaggatgagtctgggtttccaaagcccccatcttacaatgtagctacaacactgcccagttatgatgaagcggagaggaccaaggctgaagctactatccctttggttcctgggagagatgaggattttgtgggtcgggatgattttgatgatgctgaccagctgaggataggaaatgatgggattttcatgttaacttttttcatggcattcctctttaactggattgggtttttcctgtctttttgcctgaccacttcagctgcaggaaggtatggggccatttcaggatttggtctctctctaattaaatggatcctgattgtcaggttttccacctatttccctggatattttgatggtcagtactggctctggtgggtgttccttgttttaggctttctcctgtttctcagaggatttatcaattatgcaaaagttcggaagatgccagaaactttctcaaatctccccaggaccagagttctctttatttattaaagatgttttctggcaaaggccttcctgcatttatgaattctctctcaagaagcaagagaacacctgcaggaagtgaatcaagatgcagaacacagaggaataatcacctgctttaaaaaaataaagtactgttgaaaagatcatttctctctatttgttcctaggtgtaaaattttaatagttaatgcagaattctgtaatcattgaatcattagtggttaatgtttgaaaaagctcttgcaatcaagtctgtgatgtattaataatgccttatatattgtttgtagtcattttaagtagcatgagccatgtccctgtagtcggtagggggcagtcttgctttattcatcctccatctcaaaatgaacttggaattaaatattgtaagatatgtataatgctggccattttaaaggggttttctcaaaagttaaacttttgttatgactgtgtttttgcacataatccatatttgctgttcaagttaatctagaaatttattcaattctgtatgaacacctggaagcaaaatcatagtgcaaaaatacatttaaggtgtggtcaaaaataagtctttaattggtaaataataagcattaattttttatagcctgtattcacaattctgcggtaccttattgtacctaagggattctaaaggtgttgtcactgtataaaacagaaagcactaggatacaaatgaagcttaattactaaaatgtaattcttgacactctttctataattagcgttcttcacccccacccccacccccaccccccttattttccttttgtctcctggtgattaggccaaagtctgggagtaaggagaggattaggtacttaggagcaaagaaagaagtagcttggaacttttgagatgatccctaacatactgtactacttgcttttacaatgtgttagcagaaaccagtgggttataatgtagaatgatgtgctttctgcccaagtggtaattcatcttggtttgctatgttaaaactgtaaatacaacagaacattaataaatatctcttgtgtagcaccttttaaaaaaaaaaaaaaaaaaaaaaaaaaaaaaaaaaaancccgggggggggccccn

SEQ ID NO: 447 - DNA, 2027 bp, Homo sapiens
  misc_feature (294)..(294): n equals a,t,g, or c
  misc_feature (1976)..(1976): n equals a,t,g, or c
  misc_feature (1981)..(1981): n equals a,t,g, or c
  misc_feature (1985)..(1985): n equals a,t,g, or c
  misc_feature (2021)..(2021): n equals a,t,g, or c
ggcacgagttgggagcagctctgcgtgcggggcctcagagaatgaggccggcgttcgccctgtgcctcctctggcaggcgctctggcccgggccgggcggcggcgaacaccccactgccgaccgtgctggctgctcggcctcgggggcctgctacagcctgcaccacgctaccatgaagcggcaggcggccgaggaggcctgcatcctgcgaggtggggcgctcagcaccgtgcgtgcgggcgccgagctgcgcgctgtgctcgcgctcctgcgggcaggcccagggcccgganggggctccaaagacctgctgttctgggtcgcactggagcgcaggcgttcccactgcamcctggagaacgagcctttgcggggtttctcctggctgtcctccgaccccggcggtctcgaaagcgacacgctgcagtgggtggaggagccccaacgctcctgcaccgcgcggagatgggtacttccaggccaccggtggggtcgagcccgcagctggaaggagatgcgatgccacctgygcgccaacgctacctgtgcaagtaccagtttgaggtcttgtgtcctgcgccgcgccccggggccgcctctaacttgagctatcgcgcgcccttccagctgcacagcgccgctctggacttcagtccacctgggaccgaggtgagtgcgctctgccggggacagctcccgatctcagttacttgcatcgcggacgaaatcggcgctcgytgggacaaactytcgggcgatgtgttgtgtccctgccccgggaggtacctccgtgctggcaaatgcgcagagctccctaactgcctagacgacttgggaggctttgcctgcgaatgtgctacgggcttcgagctggggaaggacggccgctcttgtgtgaccagtggggaaggacagccgacccttggggggaccggggtgcccaccaggcgcccgccggccactgcaaccagccccgtgccgcagagaacatggccaatcagggtcgacgagaagctgggagagacaccacttgtccctgaacaagacaattcagtaacatctattcctgagattcctcgatggggatcacagagcacgatgtctacccttcaaatgtcccttcaagccgagtcaaaggccactatcaccccatcagggagcgtgatttccaagtttaattctacgacttcctctgccactcctcaggctttcgactcctcctctgccgtggtcttcatatttgtgagcacagcagtagtagtgttggtgatcttgaccatgacagtactggggcttgtcaagctctgctttcacgaaagcccctcttcccagccaaggaaggagtctatgggcccgccgggctggagagtgatcctgaagcccgctgctttgggctccagttctgcacattgcacaaacaatggggtgaaagtcggggactgtgatctgcgggacagagcagagggtgccttgctggcggagtcccctcttggctctagtgatgcatagggaaacaggggacatgggcactcctgtgaacagtttttcacttttgatgaaacggggaaccaagaggaacttacttgtgtaactgacaatttctgcagaaatcccccttcctctaaattccctttactccactgaggagctaaatcagaactgcacactccttccctgatgatagaggaagtggaagtgcctttaggatggtgatactgggggaccgggtagtgctggggagagatattttcttatgtttattcggagaatttggagaagtgattgaacttttcaagacattggaaacaaatagaacacaatataatttacattaaaaaataatttctaccaaaatggaaaggaaatgttctatgttgttcaggctaggagtatattggttcgaaatcccagggaaaaaaataaaaataaaaaattaaaggattgttgataaaaaaaaaaaaaaagggcggccgcnctagngggnccaagctttacgtacgcgggcatgcgacgtcaagcncttcca

SEQ ID NO: 448 - DNA, 699 bp, Homo sapiens
aattcggcacgagttacaggcataagccaccatgcttggtcctcattatattttaacacacccctttcattatttctaaatgctggaaagttctttattacattgagctacagttcattttgccttaatagtcacaaacttaatcctaattaaatacatacctttcccctaagttttcttatcttcaggctacagaattattgagattactctcaaccattcctcatgttagaaactctttctcaatttatttccatcctctttgtccttctctggataatctcagatttgatactgtgttttcttaaatgtggtaatcccggaactctagatatggttcttcctatttggactaatcagtatatacattccagtagatccattttgtcctttatctagatacagtatttctagtagcttgaaasycattgccttttaaaagttgttttaggattaaaaatcacaaaccaaatatccactgtcctcaagagaatcacctaacacccataaggattcttgtagactcatggtaaaggggtagctattgttttatatcagatagcaggagtagctattcttttatatcagataaaacacattaaagcaacatgaataggcatttgttaaaagraggatattccaaatagtcaacacatattaaaggaattccccaaccatccactaaatgatccaggggaa

SEQ ID NO: 449 - DNA, 1649 bp, Homo sapiens; identical to SEQ ID NO: 217
  misc_feature (1249)..(1249): n equals a,t,g, or c

SEQ ID NO: 450 - DNA, 1570 bp, Homo sapiens
ggatctgtgtggcatggtatgtgtgtttatgtgtattgtgggtgtctgtgtggcatgctgtgcgtgtgtgtattgtggatgtttactgtcccgggcagtagaaaggacgtcggggaagcagccccagcatcagggacaggccaggagtgcagaatgcatggaagctggtcaggtcggagcctgggatgaaggaagcacagagatgcaagggtgccagggcccatggaaccaagagccgatgatcaaggccacagtgcacacagccctggaggcaaaggacatattcatttcacaaggattaaaaagcatgggccaaggctgggccccaggccaggactggggatacagagtggatcagtccccatccctgcccccaggtgcttacccacacccattcacctcacaggtttccccaccccagccccttggcgagctcctcctcattcctcaaaacgtcgctgaggtcacgctccttcccgaggcctctccccatcctctaaaacaccctctccctgctgcccacttgcagcacagtcagagagctccgtggcctgtttccactggactgagtcttctggggggtgctggtgcagagcagagccctgggctgggagtcccggcacctcgttccactccctcacccacagcctcgctgtttaacctcaggcaggccgtgtccctcctcagcctcactttccccttgtgtaaaatgagggaagggactacgccttacatcttcagcttaaacctctttgaccttctatctggctaatggaggtgctgaccaggggcaagaagggatttgaaaaacgctttgaaaaattcatagcaggaggcaaaggagaaagagtctttattttcgtagagcgggaggcaggaggagttatggacagaggctgtcgatgaaaaggacagcatctcagagcactttgtggcatttaatgtctaatgcctcctcccattaaagcagtggcatcaaatatttaccaaagcagcattaaaaattaacctttaccatggggatgtataaaggccctaagttccctgagaagtgaccgaacatcaggagggtaaagtgacaggaaggaaggctacaagcgggttgtgaataatggaagcccccaaaggtcccccaacacagctccctgttgaccccactcccaaagccagggcagcctccggccgtgtctctgcagaggctcccagcccttcggagactcccagagggcctgcaggataaggacaggccctcagctgggcatccacagccttccatggcctggccctgcctctctgggcagctgggatctgtaggatggaaaggaatgagtctgtcggagttggaagagaccaggggaggaagtggggagtggtccgggcactggaaatagcacgtgcagaggcactgaggcagagacagctgcacatcaatccatcagaagagcagccaggtggcatgagtgtgggggaggaaggaagcgcaggaggggacaggtgggagatgcaggtaggtctgactgtgcagggccatggtaagatgtgggcttctcggtccagggacaggggtgcc

SEQ ID NO: 451 - DNA, 774 bp, Homo sapiens
  misc_feature (618)..(618): n equals a,t,g, or c
  misc_feature (715)..(715): n equals a,t,g, or c
gtctacctccgggctgaaacgtcaccatgcctccccacagacagacggatggacagatgggcctccctgcacctgctctgtgggtgtgggggctcctgctcagcagcagtttccagacccttctccctgctttccccaagccacccgccttgaatctggggtgctctaccagacccatcccctcatttctaaagatttgagccactagtcgtgtccctctccctcagaaatgccttggtgacacttggctgctttcaactcttccacccatctgcctcttggtctcatctttaccttctgctaaaggtcctgacccccacccccgccacgccatggggcaccccatggtggtgcgtccttgggagcagctctgtccctttccccgtggcctttgccccgcctcctatgacttcgattcccacctgtccccgacccctgggaccactgaccgggcccgatcaccctgtcactgccctgtcatctgcttaccccacacggtgctctgctgacccaggtcttgctgtctcccaayagccccacgaggcttyccgtcgctcctggacactrmaggctgagcccgctgccccgccgcctccatgaggaaggcttttcctctgngagccccaggccaccctttccctcctttaagtaattacttaagtcccttgccagggccctcccagtaccctttctaaagacacccctgccccagcangctgcaggctcctgctccactttcctctcaggccctcgtcgctgtggtgctgcctttga

SEQ ID NO: 452 - DNA, 1396 bp, Homo sapiens
  misc_feature (1187)..(1187): n equals a,t,g, or c
  misc_feature (1325)..(1325): n equals a,t,g, or c
  misc_feature (1327)..(1327): n equals a,t,g, or c
cctcgagccatgtgtccaggtggggcagatcatggagggcgcccaggtgcggtgctgaggctgagcatgcactggctggggagggtgggcagagcaggaggaaatcccttgttctccggagctggagagccagaaagagccctgcagcctgggcctcatcatcacacctcgccctcaaggcctccaggcacagcatccactgccagcctctgctcctgcctctgagggtctgtctccaaggtcttttgggggctgccccagctcccccaacacagacagcaccagagctgggcccacctgtgaggtgctgagttccccatctcagagactgtgcgagcagaggcagggaggcgcttgatgtcggatggagaaaggacaggggaggggtgtggggctcagggccccgccaggtgaaggaacaagcttggaagggtgtccttatgtctgagagttggggagacacccccaagccccagatggrcctcgaatgccaggcagggccaagctgggcccagaagtgggawggwtcccttggctgccccaggaatgcaggttccggggcaagaatccagccctggctggttgaagtccatcccaagtctccctccccacgaggctcctgcagatgccaggaatggggctggattccagattccaagcctggcsgcccagcccctatctgggaccccagcccagagcccccaggcctggcctccaacctggccccagcctcaggggagctgaattcagagaatcctgtcctaggagccagaagcgggggagggaggragggcggccctgtcctgggtgcaggcccgggggctgggggytgcccgcccgtctgggtcagccgcagctgcaaaccggccctggctgagtcatggsgcctccatctccagggcctggcttgaggtggggaatagcagtgaggttggacatccaggcacctgagggtgggcagggctccctgcggctggggtggccagtggcacctggctgttgcccccctgcaccccagccctttggcccccaagtctctgccacctccctggggttctgctcccatattcctcacacccagcacagaacccagcatgtctcctgtagacacctgcatataaaccctgactcacacacacacacacacacacacacacgcacacatgcaggccaggctcctcggccangtcaccctaccggcagagctctagacatttctggcctctggtgactattcttcaggcagctcaccctgcaagtctttattgagcacctactgtgtgccaggcagtggtacagcaagggcagaagccccacctccaagnanctgaacccctgccgtggcagagacagaaaacaaaggcagcaccacggcgacgagggctaaagagaacgc

SEQ ID NO: 453 - DNA, 1397 bp, Homo sapiens
tcgacccacgcgtccgctgaattgcggccgtatgcgcggctctgtggagtgcacctggggttgggggcactgtgcccccagccccctgctcctttggactctacttctgtttgcagccccatttggcctgctgggggagaagacccgccagctgcttgagtttgacagcaccaacgtgtccgatacggcagcaaagcctttgggaagaccatatcctccatactccttggccgatttctcttggaacaacatcactgattcattggatcctgccaccctgagtgccacatttcaaggccaccccatgaacgaccctaccaggacttttgccaatggcagcctggccttcagggtccaggccttttccaggtccagccgaccagcccaaccccctcgcctcctgcacacagcagacacctgtcagctagaggtggccctgattggagcctctccccggggaaaccgttccctgtttgggctggaggtagccacattgggccagggccctgactgcccctcaatgcaggagcagcactccakcgaacgatgaatatgcaccggccgtcttccagttggaccagctactgtggggctccctcccatcaggctttgcacagtggcgaccagtggcttactcccagaagccggggggccgagaatcagccctgccctgccaagcttcccctcttcatcctgccttagcatactctcttccccagtcacccattgtccgagccttctttgggtcccagaataacttctgtgccttcaatctgacgttcggggcttccacaggccctggctattgggaccaacactacctcagctggtcgatgctcctgggtgtgggcttccctccagtggacggcttgtccccactagtcctgggcatcatggcagtggccctgggtgccccagggctcatgctgctagggggcggcttggttctgctgctgcaccacaagaagtactcagagtaccagtccataaattaaggcccgctctctggagggaaggacattactgaacctgtcttgctgtgcctcgaaactctggaggttggagcatcaagttccagccggccccttcactcccccatcttgcttttctgtggaacctcagaggccagcctcgacttcctggagacccccaggtggggcttccttcatactttgttgggggactttggaggcgggcaggggacagggctattgataaggtccccttggtgttgccttcttgcatctccacacatttcccttggatgggacttgcaggcctaaatgagaggcattctgactggttggctgccctggaaggcaagaaaatagatttattttttttcamaaaaaaaaaaaaaaaaaaaaaaaaaaaaaaaaaaaaaaaagggcggccgc

SEQ ID NO: 454 - DNA, 1368 bp, Homo sapiens
ctgaattgcggccgtatgcgcggctctgtggagtgcacctggggttgggggcactgtgcccccagccccctgctcctttggactctacttctgtttgcagccccatttggcctgctgggggagaagacccgccagctgcttgagtttgacagcaccaacgtgtccgatacggcagcaaagcctttgggaagaccatatcctccatactccttggccgatttctcttggaacaacatcactgattcattggatcctgccaccctgagtgccacatttcaaggccaccccatgaacgaccctaccaggacttttgccaatggcagcctggccttcaggtccaggccttttccaggtccagccgaccagcccaaccccctcgcctcctgcacacagcagacacctgtcagctagaggtggccctgattggagcctctccccggggaaaccgttccctgtttgggctggaggtagccacattgggccagggccctgactgcccctcaatgcaggagcagcactccatcgacgatgaatatgcaccggccgtcttccagttggaccagctactgtggggctccctcccatcaggctttgcacagtggcgaccagtggcttactcccagaagccggggggccgagaatcagccctgccctgccaagcttcccctcttcatcctgccttagcatactctcttccccagtcacccattgtccgagccttctttgggtcccagaataacttctgtgccttcaatctgacgttcggggcttccacaggccctggctattgggaccaacactacctcagctggtcgatgctcctgggtttgggcttccctccagtggacggcttgtccccattagtcctgggcatcatggcagtggcctgggtgccccagggctcatgctgctagggggcggcttggttctgctgctgcaccacaagaagtactcagagtaccagtccataaattaaggcccgctctctggagggaaggacattactgaacctgtcttgctgtgcctcgaaactctggaggttggagcatcaagttccagccggccccttcactcccccatcttgcttttctgtggaacctcagaggccagcctcgacttcctggagacccccaggtggggcttccttcatactttgttgggggactttggaggcgggcaggggacagggctattgataaggtccccttggtgttgccttcttgcatctccacacatttcccttggatgggacttgcaggcctaaatgagaggcattctgactggttggctgccctggaaggcaagaaaatagatttattttttttcaaaaaaaaaaaaaaaaaaaaaaaaaaaaaaaaaaaaaaaaaa

SEQ ID NO: 455 - DNA, 1763 bp, Homo sapiens
ccacgcgtccgattcaagtgatcaagattttaaaatatgaaaagaaactggccaaaatgtgctttttaatgatattcaccttcctggtctgttggatgccttatatcgtgatctgcttcttggtggttaatggtcatggtcacctggtcactccaacaatatctattgtttcgtacctctttgctaaatcgaacactgtatacaatccagtgatttatgtcttcatgatcagaaagtttcgaagatcccttttgcagcttctgtgcctccgactgctgaggtgccagaggcctgctaaagacctaccagcagctggaagtgaaatgcagatcagacccattgtgatgtcacagaaagatggggacaggccaaagaaaagtgactttcaactcttcttccatcatttttatcatcaccagtgatgaatcactgtcagttgacgacagcgacaaaaccaatgggtccaaagttgatgtaatccaagttcgtcctttgtaggaatgaagaatggcaacgaaagatggggccttaaattggatgccacttttggactttcatcataagaagtgtctggaatacccgttctatgtaatatcaacagaaccttgtggtccagcaggaaatccgaattgcccatatgctcttgggcctcaggaagaggttgaacaaaaacaaattcttttaattcaacgggtgctttacataatgaaaaaaccacttgtggcacacgatgggcatctaacatcatcatcttctaatgtgttggagattttcatttcaaatatattttttaaattactctattttccaaaacacgtaatgcatttttctcgaaaataccttactgtaaaaataactgtcgcgtacacatgtgtgaagtagctagaacatactgaatttttttttgtactgttggactctattcagtgtcatgtcctatatctgatcaagttatcaaggagataattctagaatgaaaaagaaaatcctcttgttggaaacaaaagacgttttatatgtgcagtatgacaaagaggagtttcagagacaactttgaatccttgtcagcctggagaccagcaccagaggaatctacaaggcaaactcccatatatttgcttcccccaaattgctgcccctacagactcaaagctctttttctttgttttgttgtttctctaaaaatttactgttctttgtcgatgctatataagccagggagttctaagacgccagctctttgagatttgctcattcccctgtatttcccacatatatattacatatacccgctaataaatttatgtttgtttttctcttgtcaatctgtcttttgttataggggccccagccaaggaacctaaagtgggtagaaggaaaaattattttttctttccctacaaactgaacatggattattagaactcaaggttttcattgacaatatagaaaagaaacactgaatcattttattttattgcccaatttttatttcttatatgactctagtgtttcatcttcataattaatcatgtttgaaggatttctgagtgactcagcagcctgttaaagaaggatgaaccaaagaaaacatttcactaaatgtgcttttaaaaatcaagtgtattgctggttctgctgcagtatgtagtcgaagaataaattagtaaattgcttctgagggtctgaaattgaataaagtaatggctttgtatttctataaaaaaaaaaaaaaaaaaaaaaaaaaaaaaaaaaaaaaaaaa

SEQ ID NO: 456 - DNA, 1274 bp, Homo sapiens
gcccacgcgtccgctgttgctcaaaggaaataggagttggtgtgcttgtgaccaaggggttacacttmcagcttttaaaattctcctttacatgtgctcagtgttttgktttgtgttttggtttctgttttttattttaattcccacattgggcacaagaatcagaatatggatagctagtttaagaaacttttgtgggtgcactgtagcatagatgacagaatttgatgttccccccatctccaattcagttcagggcattccacagttaaacagaaatgggaacgtggggctcttataaatgaatgggcgctcacagttttggttttcagctcttcatgtctgtaagtgtgctttggggraggctatgtctgtatggtcgattctcagttatcacatttgcctctcctcccactaccttcatgamcattcagtgctgttcgcactgcagttagagagaagggacggacagttggtgacactcagccacattgctacttttatctgttctggtaagaagttagatagatggtagattgaagcaattgggtagaattagttgggggaatatttatgagttgctgtgtttgttgattagttccatctctttcccattttaactgagaattgattatatatagctctaagtatataggtatttaaacaaccccacaagcggctgtatcagtaacatttattaattccactatagtgagggaggatttccattctaaataccttattttgagggatttataaaacttagttgtaaaagagaaagcccacatagtgggaataaattgcttcagccatttttagtatttgagagcactagggaagatgtttagtagctgtgtggatgccttttttcacaccctgtctattgaatgctgcatccattcacgaagttaaatgttacatgcagttagtccttaatgtggactggatctgtacttttgttttggattaaaacatttaaagatttttgaagtgcagctactccccacgtgcatttgmtacacataaaagtcatactgtgtgtgcacaaagagtacatggattttccagcataytgctttaaaaaattatataaactgttaaaatattaacacctcaggctacctgctgtattctgtcccattgacccctggaattggatttactgcaagtgattgataattcaattatgtggcttttcccctttaatcttgccatttaaattacagtagaaagacaaaatcaagtaaaataaagtgttagataatagaaagagt

SEQ ID NO: 457 - DNA, 1124 bp, Homo sapiens
gattgcctacaaatgtcagaggtataatggtttggttttcatgctggcttctcacacagtccatcacagtgattcttggagccagagggaggtatggaagactgtgtgttctccaagggaggcactgtggtctggtggataagagtgggagtcccaatcctttctccgcagatgtgctagctgtgcactctgggcaagtttctcactctcctgagcctcagcgtctttatcaatatgacgagaataaatacagcacctgcctacctcatggggttgtttcagcagtcaatgagatcatgtatatgaagcatttagtatacctagcacctaataaaagctcaacaaccagtagtcttattactaacaaaatggagctagaaggatgcattagtttaaacaaaatcttgaggcagatactgggagtacctgtctttattcttcaacttgagtctcctcccagtttgtttggataaaaactcaaatgtaatatttttaatttgggtaaaagaacttctgagaaagggttgaacatctatccacttgcctttttatgcctagggaactagagatacttgttggcggcatcgcaaatgttgctgacttatgaagtactgcagtatctgaatacctttttgtaggataatctaaagtttccaaaaaatagtatagtgttgtagtgaagaacttggactcttaagccagattattttgttcagattcagaaatcccctccactccacccactggctgtatagccttgcccaaatcactgaatctctgtgtgtctgcgtcctggtgtgtgaaatgaggacaatagtagctattgggtagggttggcctggggtctaagtgatgactgcctgtaaggtgtttagaacagtatttggtaaacaactggcactcaatcagtgttgctgtgattatgatgatttattccaaggttgcttgctttccagtacatcatagactactacttgaccaaatttactagcaatggagtacctgaaagttttacatgtgcacatttgcatgaaaaccccacaaaatttccctttgaacagtgaaggggacggcacaaagataattcttggcactaagcttaaaaaaaaaaaaaaaaaactcga

SEQ ID NO: 458 - DNA, 2409 bp, Homo sapiens
ccacgcgtccgcttcgacgacgacacctgcagaagtgcggacccgccatgccgcgccacctctcgggactgctcctgctgctctggccgctgctgctgctgctgccgccgacccccgccgcccccggccccctggcccgcccgggtttgcggaggctgggcacgcggggcccagggggcagtcccgggcgccgccctggctctgctgtccccacccgcgcgccctattccggggccggccagcccggcggggcccgaggcgcaggtgtttgcaggagcaggcccttggatttggtgttcatcatcgatagttcccgcagtgtgcggcccctggagttcaccaaagtgaagacctttgtctcccagataattgacactctggacattggggcggcagatacacgggtggcagtggtgaactatgctagcaccgtgaagattgagttccatctccagacccactcagataaacagtccttgaaacaggctgtggctcggatcacacccctgtctacaggcaccatgtccggcctggctatccagacagcaatggatgaggccttcacggtggaggcaggagctcgggggcccacttccaacatccctaaggtggccatcatcgtgacagatgggaggccccaggaccaggtgaatgaggtggcggctcgggcccgggcatctggtattgaactctacgccgtgggcgtggaccgggcagacatggagtccctcaagatgatggccagcgagcccctagacgagcacgttttctatgtggagacctacggggtcattgagaaactctcctctagattccaggaaaccttttgcgctctggacccgtgtgtgcttggcacacaccggtgccagcacgtgtgtgtcagtgatggggaaggcaagcaccactgtgagtgcagccaaggctactccttgaacgccgatcagaagacgtgttcagctatcgataagtgtgctctgaacactcacggttgtgaacacatctgtgtgaacgacagaactggctcttaccactgtgagtgctacgaaggttacaccctgaaccaagacaggaagacttgttcggctcaagaccaatgtgcctttggtacacatggctgccagcacatttgtgtaaatgacagagatgggtcccatcactgtgaatgctacgagggttatactctgaatgctgacaacaaaacgtgttcagttcgcagcgagtgtgctgggggctcgcacggctgccagcacctgtgtgtggacgacgggcccgcggcctatcactgcgattgtttccccggctacaccctgaccgaagaccggaggacgtgcgcagccattgaagaagcacgaagactcgtctctacagaagatgcttgtgggtgtgaagccaccctggccttccaggagagggccagctcatatctgcagagactgaatgccaaactcgatgatattttgggcaagttgcaagcagatgcgtatggacaaatacatcgttgaattactcagatttttcacctggatatacggagagcttggtctatttaatatttttgcatacttcaatgttcctgctaataatttgccattgcaaatgctttaatattactggataagtagtatgaggatcttctagagaatcagtaggacataaacgttcacatccttaagagcaaactttagtgtctctaagctatgactgtgaaatgattcatggggaatagaatgaaaagtttggtatctctttatttaccaattgagccatttaatttttaaatgtttatattagtaagataaccattcttacaatgggaactttttatctattttctcttgatagtatttatagtataaaccagttttattattgagagtgtaaattatacaagtatttacacataaaaaagttcatataattgaggtaaatataatttagaactgtttctttaatgctttgttttttgctcactttttgctggaatatcactgaagctgtgatcaggggattataacacatatcaagatcaagtgaacactacatgaaatattgtaagaaacacataactaaagactttagttttgaattaagtgttataacttcttaccaagttttggtaaaaaatcctacattatctttactgtttcactttaggattcaatcaagaaaattatatacttataaatattgatctaaaaagttaacaacaaacccaatgtcgccattttaaagtttaagcttaacttttcttcacttacatatttagtatatgtattttatttttccgcttgaaagcttatagctcttaggagaaaaccatcctttaaattgtgactactcattttttctgtttgtattgtctttagtataataaaaagttactatctttataaaaaaaaaaaaaaaaaa

SEQ ID NO: 459 - DNA, 876 bp, Homo sapiens
caggtaccggtccggaattcccgggtcgacccacgcgtccgcttcgacgacgacacctgcaraagtgcggacccgccatgccgcgccacctctcgggactgctcctgctgctctggccgctgctgctgctgctgccgccgacccccgccgcccccggccccctggcccgcccgggtttgcggaggctgggcacgcggggcccagggggywktcccgkkcgccgccctgkctctgctgtccccacccgcgcgccctattccggggccggccagcccggcggkgcccgaggcgcaggtgtttgcaggagcaggcccttggatttggtgttcatcatcgatagttcccgcagtgtgcggcccctggagttcaccaaagtgaagacctttgtctcccagataattgacactctggacattggggcggcagatacacgggtggcagtggtgaactatgctagcaccgtgaagattgarttccawctccagacccactcagataaacagtccttgaaacaggctgtggctcggatcacacccctgtctacaggcaccatgtccggcctggctatccagacagcaatggatgargccttcacggtggaggcaggagctcgggggcccacttycaacatccctaaggtggccatcatcgtgacagatgggaggccccaggaccaggtgaatgargtggcggctcgggcccgggcatctggtattgaactctacgccgtgggcgtggaccsggcaracatggagtcccttcaagatgaatggccagcgaagcccctagacgagcacgttttctatgtggagacctacggggtyattgagaaaccttcctytagattccaggaaacccttttgcgctcttggaacc

SEQ ID NO: 460 - DNA, 1586 bp, Homo sapiens
tttattatactaaagmcaatacaamcagaaaaaatgagtagtcacaatttaaaggatggttttctcctaagagctataagctttcaagcggaaaaataaaatacatatactaaatatgtaagtgaagaaaagttaagcttaaactttaaaatggcgacattgggtttgttgttaactttttagatcaatatttataagtatataattttcttgattgaatcctaaagtgaaacagtaaagataatgtaggattttttaccaaaacttggtaagaagttataacacttaattcaaaactaaagtctttagttatgtgtttcttacaatatttcatgtagtgttcacttgatcttgatatgtgttataatcccctgatcacagcttcagtgatattccagcaaaaagtgagcaaaaarcaaagcattaaagaaacagttctaaattatatttacctcaattatatgaacttttttatgtgtaaatacttgtataatttacactctcaataataaaactggtttatactataaatactatcaagagaaaatagataaaaagttcccattgtaagaatggttatcttactaatataaacatttaaaaattaaatggctcaattggtaaataaagagataccaaacttttcattctattccccatgaatcatttcacagtcatagcttagagacactaaagtttgctcttaaggatgtgaacgtttatgtcctactgattctctagaagatcctcatactacttatccagtaatattaaagcatttgcaatggcaaattattagcaggaacattgaagtatgcaaaaatattaaatagaccaagctctccgtatatccaggtgaaaaatctgagtaattcaacgatgtatttgtccatacgcatctgcttgcaacttgcccaaaatatcatcgagtttggcattcagtctctgcagatatgagctggccctctcctggaaggccagggtggcttcacacccacaagcatcttctgtagagacgagtcttcgtgcttcttcaatggctgcgcacgtcctccggtcttcggtcagggtgtagccggggaaacaatcgcagygataggccgcgggcccgtcgtccacacacaggtgctggcagccgtgcgagccmmcagcacactcgctgcgaactgaacacgttttgttgtcagcattcagagtrkaassctcgtagmatwmacagtgatgggacccatctctgtcatttacacaaatgtgctggcagmcatgtgtaccaaaggcacattggtcttgagccgaacaagtcttcctgtcttggttcagggtgtaaccttcgtagcactcacagtggtaagagccagttctgtcgttcacacagatgtgttcacaaccgtgagtgttcagagcacacttatcgatagctgaacacgtcttctgatcggcgttcaaggagtagccttggctgcactcacagtggtgcttgccttccccatcactgacacmcacgtgctggcaccggtgtgtgccaarcacacacgggwccagagcgcaaaaggtttcctggaatctagaggagagtttggcaattt

SEQ ID NO: 461 - DNA, 1011 bp, Homo sapiens
  misc_feature (2)..(2): n equals a,t,g, or c
cnccctttttttttttttttttttttttttttttttttttttttttttttttttttttttttgcagcttaaaagcattttattaagcatttttggatgttgcttcctaccacttaagaataaaaaatgcattttaataaaaacaaatctatactgaagtcattttcctttgtgagaggaaatatgaatgaaatacattcatacttaaaaacagagtattttactgccaaaactttaaatatctcaagagcataccacattttaaacacattatggtcatgtagctatttcaatattcctgggagtggtgggcaattagcctgtctatggcttaggatctgtttccatgcttgcttcctgagcttcttctacctctgagagtttttcatcattttccaatgtttgctgaagttcatggatggtactaagaagaacatgaaactgtttccgtctcaattccagcttatcttcaacactttctttaatgtgtgaaagatgctctaattcttttcccagagcctctagttcctttaatgtctcatgcctgtctggatggtgctgaatcacttttgccaaagcatcatattcttggcgattttttcgtattcgttttgcttgaagaatttgctttttgcactcagcaattttttcatgtgctccagctatgctacattctatttccttgtaaattttttcataattttccatttctctgagattcatatcatatactagtaaagttttgcccattgaaaattcacattgagacagcgtgctcagcatacgttggtactggctatatccctcttcctgggacccagagttgcaccatttaatgaaactcttcactagcagattaattctccgatcatctccagcaccatctccatcaatgaggagacgcttccgtataattcgtcgtcagtcacggctcccatggcgtgcgcggcggcggcggcgggcaagctgaggcggcggttggcggcggcggcggaggtcaaactcccacaat

SEQ ID NO: 462 - DNA, 427 bp, Homo sapiens
  misc_feature (230)..(230): n equals a,t,g, or c
  misc_feature (290)..(290): n equals a,t,g, or c
  misc_feature (338)..(338): n equals a,t,g, or c
  misc_feature (381)..(381): n equals a,t,g, or c
tcgacccacgcgtccgcggacgcgtgggcggacgcgtgggcgcggcctcccggcgctcggctccgaccccgccgccgccaccatgcagccccccagcctgctgctgctcgtcctcgggctgctcgctgcgcccgccgccgcgctcgtccgaatcccgctgcacaagttcacctctgtgcgccggaccatgtcggagttggggggccccgtggaggatctgatcgccagangccccatttcaaaatacgcccagggggtgcccagtgtggcggggggtcccgttccggagntgctcaaggaaactacatggaacgcgcaaatactacggggaaaattcnggcatccgggaacgcccccccgcaaattgcttccacccgtccntccttttgaaaaacggggttccttcccaaccttgttgggttccccc

SEQ ID NO: 463 - DNA, 1500 bp, Homo sapiens
  misc_feature (8)..(9): n equals a,t,g, or c
  misc_feature (417)..(417): n equals a,t,g, or c
  misc_feature (1431)..(1432): n equals a,t,g, or c
tggttttnntttttttttttgaggcccagacgactgtatttccacgttcacttcggctcctggtcactcaagaggggaaaagctcacagaaggtggcaccagcccccccctccccttcttccccaacccggcaccagcaaatgccctcctagatggggtcaagccccaggaggaccccaaaggcatcacaaggctgccttttgtccctgagtcccgacccttccaagcccttcctgcttgtccttgggcctcggcgggtcccttccacgatgggccacacgggaagacaggccagcagtgccccgctctggaccccagaccagaccccaggaggagaagcccagagaacagcctggcctggggtgggggctcagtccagaagtcctgcctgggcagccaggcccccgaagcacgggntgggggggggggggggaactacctgggccgggggagggggtcccgcgtgcaagacgatgggcggccgagccaggctggggcttcccagtcagtgacgtggctccagactcggggtcagcctagtggctgctgccccgcaccccgccctctactagacagacagacacaccaaggccggggaaaccacagaacaaaacggcagcccgacagcccggcgcctgcagagctgggctttgagtgtgagtctgagcgtgagtgtgtgcggcaggggtggccgggagggcggggcggccagcctcctcctgccggaccccgtcctccccagcgggcgggcagctagagcctggtggcctcggccaggcccacgcggttctggtcccggtcgaacacggtgtagtagcggccgatgaagacgtcccccaggatccagagcggcccgccgggcggggggatgtccatgcccatgaagccgctcaagcagatggacttcccgccctgcgacaccttgagcgtgtagtcctctgacgacagcttgtagggtttgccgcccagcgtcagggtgacctcgggcaaggtggacaccttctcacaggggatcatgtactcgccctgratcarcggcacggccccgatggccttctgcagctcgcgcacctcgtccacggggcccacgatgagcgaggtgcccgtgtccacgatggcctcgcagccccccttgcacagggtcaggctgctgcccacgtccacctgttccatgtggacctgccagtacgccttgcgggtcacgttgaggtaggacaggggacccttgtagtacttggagtctgtgccgcccagcatgagctcacccccaggctgcgcgccggggtccctgttcaggtagaaagagaagatgttcttctccaccagcttctgctgcatcaggttatcaaagwcgggaagcacattgttgaccgagatgcgggggtaggccatgcccaggatgccgtcgaacttggccgcgatgaaggtganncccggctgcttggtggcttccccgaacgtctgcctctccaccttgacgccagccaggctcgacagacc

SEQ ID NO: 464 - DNA, 1234 bp, Homo sapiens
  misc_feature (1058)..(1058): n equals a,t,g, or c
cgccggccgcgcccacgtgaycggtccgggtgcaaacacgcgggtcagctgatccggcccaactgcggcgtcatcccggctataagcgcacggcctcggcgaccctctccgacccggccgccgccgccatgcagccctccagccttctgccgctcgccctctgcctgctggctgcacccgcctccgcgctcgtcaggatcccgctgcacaagttcacgtccatccgccggaccatgtcggaggttgggggctctgtggaggacctgattgccaaaggccccgtctcaaagtactcccaggcggtgccagccgtgaccgaggggcccattcccgaggtgctcaagaactacatggacgcccagtactacggggagattggcatcgggacgcccccccagtgcttcacagtcgtcttcgacacgggctcctccaacctgtgggtcccctccatccactgcaaactgctggacatcgcttgctggatccaccacaagtacaacagcgacaagtccagcacctacgtgaagaatggtacctcgtttgacatccactatggctcgggcagcctctccgggtacctgagccaggacactgtgtcggtgccctgccagtcagcgtcgtcagcctctgccctgggcggtgtcaaagtggagaggcaggtctttggggaggccaccaagcagccaggcatcaccttcatcgcagccaagttcgatggcatcctgggcatggcctacccccgcatctccgtcaacaacgtgctgcccgtcttcgacaacctgatgcagcagaagctggtggaccagaacatcttctccttctacctgagcagggacccagatgcgcagcctgggggtgagctgatgctgggtggcacagactccaagtattacaagggttctctgtcctacctgaatgtcacccgcaaggcctactggcaggtccacctggaccaggtggaggtggccagcgggctgaccctgtgcaaggagggctgtgaggccattgtggacacaggcacttccctcatggtgggcccggtggatgaggtgcgcganctgcagaaggccatcggggccgtgccgctgattcagggcgagtacatgatcccctgtgagaaggtgtccaccctgcccgcgatcacactgaagctgggaggcaaaggctacaagctgtccccagaggactacacgctcaaggtgtcgcaggccgggaagaccytctgcctgagcgg

SEQ ID NO: 465 - DNA, 1395 bp, Homo sapiens
  misc_feature (1338)..(1338): n equals a,t,g, or c
  misc_feature (1382)..(1384): n equals a,t,g, or c
  misc_feature (1390)..(1390): n equals a,t,g, or c
tcgacccacgcgtccgggagccatggcgccgtccgggccgctgctgctggtgctgctcgtgccgctggccgccgcgcggccgggccctacttccgtcccggccggggctgccgcctgcccctgcggggggaccagctgtcggggctggggcgcaggacctacccccggccgcacgagtacctgtccccatctgacctgcccaagagctgggactggcgcaacgtgaacggggtcaactatgccagtgccaccaggaaccagcatatcccccagtactgtggctcctgctgggcccacggcagcaccagtgccatggcggaccggatcaacatcaagagaaagggggcgtggccctccamcctgctgtccgtgcaacamktcytcgaytggcgccaacgcgggytctgtgagggggcaackacctgccggtgtsgacgtacgcccatgagcamggcatcccggacgagacctgcaacaactaccaggctaaggaccaggaatgcaacaagttcaaccagtgtggaacatgcacggaattcaaggagtgccactacatccagaactacacgctctggaaagtgggtgactacggctccctctccggcagggagaagatgatggcggaaatctatgccaacggccccatcagctgcggtatcatggccacggagaagatggtgaactacacgggaggcatctacgcggagtaccaggatcaggcctacataaaccacgtcatttctgtggtcggctggggcgtcagcgacggcacggagtactgggttgtccggaattcgtggggggaaccgtggggggagcacggctggatgaggattgtgaccagcacctataaagacgggcagggcgccagttacaacctcgctgtcgaggacacctgtacgtttggggaccccatcgtttaagggacaggtctccccagaagagcagtgttatcgtgaaccataatcagggggtcctatcgctctgggcactgggttggttccaccatggtctgaagggactggggactggcatcaaacgtgtctgatggctgctcgcggccccgtgcgcccagaagggagaaggggcgcctgtcagcacacagcctgccgcggcgccggccgggagcgcgctcctggggaagagtctgcaatgggacggctgagagccccgggccggccactgccctgcccagtgtctgcctggccaccgtgtgatccgcaaggcccaaacgatgtgactgcaagcttctctgtccctgatttggtgtttcctgtctggcagctgtggtccatgatgtggtgcggaagcccaagcttctcaaagctcttacgttgnctgggattcggtgggggggagtcggggggtggaaggagaaagcnnnccttgnaagat

SEQ ID NO: 466 - DNA, 270 bp, Homo sapiens
  misc_feature (260)..(260): n equals a,t,g, or c
tgtcagcacacagcctgccgcggcgccgccgggagcgcgctcctggggaagagtctgcaatgggacggctgagagcctcgggccggccactgccctgccccagtgtctgcctggccaccgtgtgatccgcaaggcccaaacgatgtgactgccaagctcctctgtccctgatttggtgtttcctgtctgcagctgtggtccatgatgtggtgcggaagcccaggcttctcaaagctcttacgttgctgggattcggtggnggggartcgg

SEQ ID NO: 467 - DNA, 2324 bp, Homo sapiens
  misc_feature (15)..(15): n equals a,t,g, or c
  misc_feature (23)..(23): n equals a,t,g, or c
  misc_feature (36)..(36): n equals a,t,g, or c
  misc_feature (92)..(92): n equals a,t,g, or c
  misc_feature (95)..(95): n equals a,t,g, or c
  misc_feature (107)..(107): n equals a,t,g, or c
cgccaaacccgcctnttccccgngcgtttgccgtcntttaaatgccaggatcgatccagccatgataagatccattgatgagtttggccaanccncaacttagaatncagtgaaaaaaatgctttatttgtgaaatttgtgatgctattgctttatttgtaaccmttataagctgcaataaccaagttaccamcamcaattgcattcattttatgtttcaggttcaggggraggtgtggraggttttttaaagcaagtaaamcctctacaaatgtggtatgsctgattatgatcatgamcagactgtgaggactgaggggcctgaaatgagccttgggactgtgaatctaaaatacacaamcaattagaatcactagctcctgtgtataatattttcataaatcatactcagtaagcaaaactctcaagcagcaagcatatgcagytagtttaacmcattatacacttaaaaattttatatttaccttagagctttaaatctctgtaggtagtttgtccaattatgtcacaccacagaagtaaggttccttcacaaagatcccaagctagcttataatacgactcactatagggagagagctatgacgtcgcatgcacgcgtaagcttgggcccctcgagggatcctctagagcggccgccctttttttttttttttcatcttttatttatttattatttttttttactaaggcacatgacgtagaaatattgaggtacaaaatgcaaatttctgcataagatttttaagatattcattttggaaaatgaaggtgaacatcatctcccagaatattcagcttttagcttgttttttcttttggaccagttcaaccagcaacttgtacctagcgatacagtcttccttgctcttggacgggacacatctggctattttgtcccagcggtcagaggatccccttgggtactgctgcaacgccagttccagaagtttctgttgattttgagtccacggctcctctgcagaccgagctctctcttttctcaggctctcctcgtcgctggactcgttttgttctgctatgtcaaagtccttctgccgcttggctctggacttctcctctggctccggcttcgctgtagcctccagcagcctggctggcttccgcctccgaggccgggcatcagtggccccggtctcctgctcaccggagtctccctcctgctcctcctccgctgccaccccctctgcgtcctctcgctgggtgatcatgtcatcgggcaaggtggtggccgttttgatgggcctggaattctgaactgtcgatttgagttcggagagtctaaccattcctggggagcaggtcactgaatccttcagttgcttggctttggttgtcacatctgtcacagatcgacccaattcgtgggcaatcttttcccatcgacctggagtccctcctgggaacttaaccatacttcttgtcagttggctgaggtcctcttctgtccattcaggtgcctgttttttctgtgttcggttcctgttttccaaccaatcatccatttgttcctcaatttcttctatggaagttccatgatcataagactgaatatatgtagtttctaaaggtgtgtatacaggaaattcaggttttggttttttaactttcttctgtttttgaagtgtttcaagttcagttctagtcagtgcatcttccttttccttcaatcttgtttctttatatttagcataaaactgcccagcatcctggatgaggtgaggtaatgcttttagtgtaaggcaaaaccaaatccccagtttgcatggaagcaaatcatgccactgtggtttcatcagcaatctttcatttttttctgaagcaccgagttttgatacatccacactcttgctgccagtcttttttttcttttctctcttttttctacttagtagttcatccagttgtttttccaggtagattgaccaaaccacagcataatgacccactgtgagaataatgaacaagagtaatgccagctcagcattgctcatttttctcacccgcctgtagtagaatacaggctgtcgccaatctggaagtccattgatcagaatatcatcatacctctgccttcgttcatcatcctttaaaacttcataaatggccaccaattgtctaaactgagtttctgcattttcatctttattcttgtctggatgtaaagttagtgaaagcttacgatatgcttttctgatgtctgcagatgatgcatcctgctgcaccccgaggaactggtagaagttgagcggacgcgtgggtcgacccgggaattccggacc

SEQ ID NO: 468 - DNA, 2522 bp, Homo sapiens
gccgctcgacaccagcaccccgcccagagcagtgccgctgcccaaatcctcgcaggcagctcatcaacgcaattgcaactccggctggagccccggacctgcaagcctgggtgtccgtgggtccgtctgcccagccatctgctggtggcacctctccctcctgccgcctccctcggtgaaccccaccttgcagaagtgcagctcgcccggagcagcccaggagctcagcatgcgtcccccaggcttcaggaacttcttgctgctggcgtcctcccttctctttgctgggttgtcagctgttcctcaaagcttctcgccatctctgaggagctggccgggcgccgcctgcaggctgtcccgggccgagtcggagcgacgctgccgcgcacctgggcagcccccgggggccgcgctgtgccacggccggggccgctgcgactgcggcgtctgcatctgccacgtgactgagccgggcatgttcttcgggcccctgtgtgagtgccatgagtgggtgtgcgagacctacgacgggagcacctgtgcaggccatggtaagtgtgactgtggcaagtgcaagtgtgaccagggatggtatggggatgcttgccagtacccaactaactgtgacttgacaaagaagaaaagtaaccaaatgtgcaagaattcacaagacatcatctgctctaatgcaggtacatgtcactgtggcaggtgtaagtgtgataattcagatggaagtggacttgtgtatggtaaattttgtgagtgtgacgatagagaatgcatagacgatgaaacagaagaaatatgtggaggccatgggaagtgttactgtggaaactgctactgcaaggctggttggcatggagataaatgtgaattccagtgcgatatcaccccctgggaaagcaagcgaagatgcacgtctccagatggcaaaatctgcagtagcagagggacttgtgtatgtggtgaatgtacctgtcacgatgttgatccgactggggactggggagatattcatggggacacctgtgaatgtgatgagagggactgtagagctgtctatgaccgatattctgatgacttctgttcaggtcatggacagtgtaattgcggaagatgtgactgcaaagcaggctggtatgggaagaagtgtgagcacccacagtcctgcacgctgtcagctgaggagagcatcaggaagtgccagggaagctcggatctgccttgctctgggaggggtaaatgtgaatgtggcaaatgcacctgctatcctccaggagatcgccgggtgtatggcaagacttgtgagtgtgatgatcgccgctgtgaagacctcgatggtgtggtctgtggaggccacggcacatgttcctgtggtcgctgtgtttgtgagagaggatggtttggaaagctctgccaacatccgcggaagtgtaacatgacggaagaacaaagcaagaatctgtgtgaatcagcagatggcatattgtgctcggggaagggttcttgtcattgtgggaagtgcatttgttctgctgaagagtggtatatttctggggagttctgtgactgtgatgacagagactgcgacaaacatgatggtctcatttgtaccagggaatggaatatgtagctgtggaaactgtgaatgctgggatggatggaatggaaatgcatgtgaaatctggcttggctcagaatatccttaacaattacatgagagaggtctggattcttattttttctgggccattagaacatataaatgcgaaggaaaccatgtatattcaccactaggacaggttaaaaagaccattgtatgtttttctatttctgaattacgaatgaaatccgagtacctattagaaatgagttatgcaaatttagatgcaaataacattagaaaaaaaagattcttccataattaacataagtggttcctaacgagagcaatttttccacccaaaagtcatttggcaacatctacagacaattttgattgtcacactgggtcgggtaggaaggtatgctgcagacatttggtgggtagaggccagggatgctgctgagcatcccgcagtgtacaggacagcccccaaacaaggaattatccagccccaaatgccaatagggctcagactgagaaacattgagttatatggctattagaaatccacattcttacacaagaaagaccatattagaatctaaggaaaacatgcatattcacattaattaatcgatcagatttttccagaattccgtatcagtcaccattttaatatggggacaatgaagacaagcacacaggaggtagaatatcagagtggggctggatcaagggcaaaaactggtcattaagtcatctgacattaaatcatttagccactaagttatttgtctactctcactttaaactcaccaaagaagattctcttaaagaaattatgaaaaatgtacaatttaacattttaaataaatagtgacagaagttgtttataaaaaaaaaaaaaaaa

SEQ ID NO: 469 - DNA, 585 bp, Homo sapiens
  misc_feature (570)..(570): n equals a,t,g, or c
gcttcctgcacctggtgacgcttggcgaaactgaggtctcatggagaagccccggagtattgaggagaccccatcttcagaaccaatggaggaagaggaagatgacgacttggagctgtttggtggctatgatagtttccggagttataacagcagtgtgggcagtgagagcagctcctatctggaggagtcaagtgaagcagaaaatgaggatcgggaagcaggggaactgccgacctccccgctgcatttgctcagccctgggactcctcgctccttggatggcagtggttctgagccagctgtctgtgagatgtgtggtatcgtgggtacaagggaagccttcttctccaagaccaagaggttctgcagcgtctcctgctccaggagctactcctccaactccaagaaagccagtatcttggctaggttacagggaaaaccaccgaccaaaaaagccaaagtcctkcacaaggtgcctggtctkccaaaattggagccttcctccaatctcaaaggacaggacagctggcaratkggacaccaacaggacaagacgctctggtcttnggcttcgactggggg

SEQ ID NO: 470 - DNA, 4344 bp, Homo sapiens
  misc_feature (754)..(754): n equals a,t,g, or c
  misc_feature (2242)..(2242): n equals a,t,g, or c
tgagaatccttgtggctttgattcggagtgtctgaacaggatgctgatgtttgagtgccacccgcagtgtgtcccgcgggcragttctgccagaaccagtgcttcaccaagcgccagtacccagagaccaagatcatcaagacagatggcaaagggtggggcctggtcgccaagagggacatcagaaagggagaatttgttaacgagtacgttggggagctgatcgacgaggaggagtgcatggcgagaatcaagcacgcacacgagaacgacatcacccacttctacatgctcactatagacaaggaccgtataatagacgctggccccaaaggaaactactctcgatttatgaatcacagctgccagcccaactgtgagaccctcaagtggacagtgaatggggacactcgtgtgggcctgtttgccgtctgtgacattcctgcagggacggagctgayttttaactacaacctcgattgtctgggcaatgaaaaaacggtctgccggtgtggagcctccaattgcagtggattcctcggggatagaccaaagacctcgacgaccctttcatcagaggaaaagggcaaaaagaccaagaagaaaacgargcggcgcagagcaaaaggggaagggaagaggcagtcagaggacgagtgcttccgctgcggtgatggcgggcagctggtgctgtgtgaccgcaagttctgcaccaaggcctaccacctgtcctgcctgggccttggcaagcggnccttcgggaagtgggaatgtccttggcatcattgtgacgtgtgtggcaaaccttcgacttcattttgccacctctgccccaattcgttctgtaaggagcaccaggacgggacagccttcagctgcaccccggacgggcggtcctactgctgtgagcatgacttaggggcggcatcggtcagaagcaccaagactgagaagccccccccagagccagggaagccgaaggggaagaggcggcggcggaggggctggcggagagtcacagagggcaaatagcgccaggcggccgcttggccggatccaggggcggtgcagggcggccggccctgcctgcgggagagggcgagcatgaactggcccggaggacccagctcgagccgccaggacacagacgtacaggcctcctcgggagggagcgcctccccaccactgagccatcctcagcagcgtccgctgcgtctgcactgatgaccgtctgagcccagctcagcgttcctggacaaacagcctcactcctcagcgttaccgccacacttgaatttctccgaatgtcaaggttccctcccactctatttttttaggttaaagttaattggcatatggaatgttttaatctcctctgaaatgtgtagcgtaggcttttcccaagggtcgctagaaactcgtcttcgcgttgccccctttctggctctcagcgccgtcgccactcgggagaggctgggtgaggcccgtgtgaggactgaccctggattcctcgaaactgccattgtgatcattactctgctctttggaaatggctgtatcatttttttgtactaatgtgaattgttcctcagaaacgcttcttttccatcctagtgagaagctggccctgcaggtggtggcagcaatggtgttgtaagatttcctcccgtagttttttctcctcatggatttgaatgaaatgccaataacacgtccactttcaacgtgtagtttacgcggagcactttcgaggcctggccgggttgggcctacttctcacctgggcctatcttctgaactcgctaggttcttatcaacatttgggggataactttgtatatttttttcatttggcttttctttaccagtttctgatttttattctcaatatatttttgctaaacctatttcacaaatcaccaccgactgaagtgtgtgtttactgatgcggccctgagctccatggcgaaaggagtgactttgcagggcgtgagaccgcagtctgcttagagcacaggaagtgacaacttagggagccccgtagggcgctgcaggccccggggaccccagcacgtgggtctaaagagagacggagtctagctctcctgccacccagagtggcttccatctcagcactctgtgggtctggtgatggaagatgcagtctctgctgatcacatgtgccctctgccagggcacctactgagaggtgcggtcctgggggtggaggcctgcctggcangtgtgsgtgcctcgtacgtgtgttatgggcactggtctaggccaggtatgacacccactctyctgtgagatttcactttagtttttaaaaggtccagttctacagagtgagacctatctatctgagtactacatatgttttaagacttggttctttttttgagggatccttgaccctgggaagtctggagcaccctgagaagggggcaccatgtgtgcctttgcccacgtgtcctgaggggctgcttgtctgggagggagggagagaacattcagcagcaggtgcttttttatggccttttcttaaaataacctaagggggacacatccatcttgcagagaagtttacagaactccccttgaaaactgctgctgaggctcctgttaaattttctgtggcatcttttatgccttggtaaaaactgcagtgtctttggacctgagagtggctactccgtggttttgtgacctgtaagcgtggggttcaggggtgtgtggccctgcagggtcccacgcctccctgagcactgactggaagtttcactggctggtggctgtcccttctcccatcagggtccccagcaaagttaactacacagaggacccaggggaaacgagctgtgtagccactgacttgctcgcgcggccgtggcctctgaggggcactcgccggttaagacagggtgggagtagtgctttccagttcagactctaacttctcccaaagtgtcctaagaaaatactggatcggctcatagatttatgctccttatgatgccctaacttggaaggttgttctagggacaggccgggcagtgtccccacacacaccttagagtcgaaggccccagggccccgctgtcacttgcccaaaagatcccttccggcaggtaagggactaccaatgcttacgtcaaaacagcagaatcggctttgcagtgcactttggggagcagatattaacttatttttgtgttggacagtagtgaaatcttgtgatttttaatcgctttgataatacttccaaattttatgatttttctgaaggaaataatgcaaacattttaaatatgtttctccccctttccaaaaactgttaaactaatgagcaagtaacactaactttgaatgtctctacaatacccgttgataactcagtggagccaggctttggggtagcggccctgagcttgcagggtttctcgccactggggctgaccacgcccccagctgtgaccgtgggtgtggctggctctcggccctgcccagctttgttctgaggacgtggtgacttcctgaacatcagcttcaatcctccatcattaatgtgaagcaaaacacaaaaaccgccccaatccctcaggattccttggcatccgaaaccagcatctgcacctaaacccatacccacccgtgtgcgcccacagggggatgtgtccgaatgggcagcttaaaatgtggtcacctgtgggggaaactcttcaggcacctgaagtgagaacccagctgtccgtcctcaggccggcctttcttccggcgacacccgtccatggctggctgggtccccttcgcagtgtttgtctgtcttgacatctaaaccccggcgtgtgcagtgcccatcttccaggactaccttattttccagaattaaacctgttttataattcaagttaatgcaaatgactgtcagttgccaaatatcttgatcctatgagtgtagttgatgactgtttgttagtcagtagagtaaaatgctgtgtccacggggtgtcacagcctcaccataccctgttgaggtgtgaaatgccccgtcagaaattaaatacaaacttaaatgtgcctattggtgtctaaacttcatacaatgtaaggtcagattccttttaggaatactgggtgctgtcaccaggtttgatagttagacttaaaaacttgaaattcactttttggggggagggatatactgaaatagagagttgagacttgccagttgggggaaaatagcatttaaaatggaaagctgtgtttggaaaattgtgtatgagtatttttgtattaaaaacattttaaaggcttttttcttaaaaaaaaaaaaaaaaaaaa

SEQ ID NO: 471 - DNA, 1258 bp, Homo sapiens
aaccctcactaaagggaacaaaagctggagctccaccgcggtggcggccgctggctgaccggcctaaaactaaaatgacatttattccctagctacaaacatcagcgttattatgttaattataccttgccctctatcattataaatggttgccatggtgtttctaaaaataagtgttttaccattaatgtgtagagggcaaacaaagcataaagtactaagggatcatgcttatcctagggtctcacagaagagaggacatatttaattaatcttgtgaattacagaacaggttgtggtccagacaccaagaatcataggggtttttttttaaaaaacctaatagaagtagggtgacctctctctttggtctaagagttctaaaggaaggtaggcatctgtttaattagttggttcaccctggctttacctctggttaatgcttgtgttaataggaaggaaaaatcactttatcttttcttccaagcccctccctgcctgacttacccagactgggattaccagataccaggtgatttatgtggagatgatttttcacctttaaactctaagccaagtgtaagaaactcttgatagctatgtctattttatatcagtcactgagacttttttttaagtttttatttattattaagacaactttgccaaaaaagtcccctaagcacaactatttacatttctttatagcctcttctgatctctaacacatatgcagttttaactgttattttcatagtaactgatcttttgtctaaggatttttacctgaaagcacaatgtattgagtctcttgaaaatcatctttcagatctttttacagaatgaacttatgcactgctactgtagtattctcaaggaatatatgtaaacacaaatgtatgcctgaggttggtttttgcagaaaacagtctctgcttctaaaaacttctatgtctagtcttccataggaaatcctcactgtttaaccatgtgaggagcctaagtcattaaacggatcatgtctgtacattgtgtaatgaatgaaaagcacataaatgtaatctactttgaactttgtaaaaatgatgtgtggaggctattcttgtttctccatctcaagtcctgtgtgtgcacgtgtgtgcaagtgcacatgtgtgtgtgtaataacacattgtaaagaacagaaattactttaaaaaataaacagaaatggagacctgaaaaaaaaaaaaaaaaaaaaaaaaaaaaaaaaaaaaaa

SEQ ID NO: 472 - DNA, 2527 bp, Homo sapiens; identical to SEQ ID NO: 253

SEQ ID NO: 473 - DNA, 2361 bp, Homo sapiens
  misc_feature (1891)..(1891): n equals a,t,g, or c
  misc_feature (2356)..(2356): n equals a,t,g, or c
ggcacgagctcgagtttttttttttttttttttctatttttgccagactcttgatactcttaaaacttgtttgtggtcagcacaacaaggaacaaaacaaagctttgaaaaaactttaacatgaaaaaacgcactgacatttttttttatttaatatagcctggactttacctgcgtatgcacatgctcagaattgtctactaggctgactatgtatcacctcttcagcttggatccaattgtggatttatttacaaacatcaaatgccttcaagccaatcctttttgctgtatgttttgcagcctactgtagtagatacgcaacagatawtgtgggaaaaaaagagataagaggaggaagctaataagagactgtcaagattgtataccttcttggtttcttttaagaatttgttgcctttctactattacagcaaagcagcattttgttactgactgcctaaaatcacttaatctcaggtgaacgcatcacttgccaaactgttggaatgctatttgtgttttgttgcactgtttttttcgtttgtttgtttgtttatttggttggctttttggagagggaaatttggaaacgggacatacacaaaagttacacacccacattccctttttatcatgacatacaagaagaaactagcagagctaagaatggagtgaagaaaggcagtatggcaggcaccagcaaagagttgagggctgttgctcttaaaaattattttttttattattattttgaaagtatggaagttttccattcactggggaaaggagggaaaagtgcatttatttttatacagagttacttaattacctccaaaacacatatgttggaaatcgcttttgctggtgcaaagtatattaatgagcaggaatacatacattgaggttatgaatagagagctcaatttgtacctttgctgtcttgctcaagcttggtatggcatgaaaactcgactttattccaaaagtaacttcaaaatttaaaatactagaacgtttgctgcgataaatcttttggatttttgtgtttttctaatgagaatactgtttttcattacctaaagaacaatttgctaaacatgagaaatcactcactttgattatgtatagattacataggaagaacaatcacatcagtaagttatagtttatattaaaggtaattttctgttggctcataacaaatataccagcattcatgatagcatttcagcattttccaaggtaccaagtgtacttattttgttgttgttgttgttgttgtattttagaaggaattcagctctgatgtttttaaagaaaaccagcatctctgatgttgcaacatacgtgtaaaatgggtgttacatctatcctgccatttaaccccacagttaataaagtggctgaaaataatagtagctctggcttggtgcttgacctggttaaatactgtcttaaagctcatacaaaacaaataggcttttccataagtggcctttaagaaaacatggaagacaattcatgtttgacaaatgctgacagggtgaagaaagcccagtgtaaaaatgaatcgcgttttaagtgattcggttaaagagtttgggctcccgtagcaaactaatactagataataaggaaatgggggtgaaatatttttttattgttgaatcattttgtgaatgtccccctcaaaaaaagctaatggaatatttggcataaagggcatttggtggttttatttttgtttgagggggwttgtcagaaaatcccttttctctcttacgyctaactgactagggaacaattgttgatatgcatagcattgggaatacttgtcattatatactcttacaaataacacatgaagcaagaatgaccaatattctgnataattgggcactgggatcacaaaatgtgataaaactttaaatgtataaaactttatcaaataaagttttattttcccctttaaaatgtatttctttagaggcattacttttttaaaaatattggtcaattcctgacataagatgtgaggttcacagttgtattccagtattcaagatagattcctgatttttcaattaggaaaagtaaaatccaaaatgttagcaaaacaaagtgcaatattaaatgtttgctttatagattatattctatggctgtttgtaatttctctttttttccttttttatttggtgctgaatatgtccttgtaggctctgttttaagaaaacaatatgtgggaaatgatttaatttttcctattgctcttccttgtggaaaataaagtgttttgtttttttctgttttgtaaaaaaaaaaaaaaaaaaaaaaaaaaaaaaaaaagaangagaa

SEQ ID NO: 474 - DNA, 1739 bp, Homo sapiens
ggcacgagagatcctcaggatatctttagccaaaggaaaagctccgcattcccacctggggggaaagctggattgccatgggcacgaatagtggtgcagagtccctggccatcctgaatatccagaatggtgtttctgaagttcttctgcatgagtttcttctgccacctgtgtcaaggctacttcgatggccccctctacccagagatgtccaatgggactctgcaccactacttcgtgcccgatggggactatgaggagaacgatgaccccgagaagtgccagctgctcttcagggtgagtgaccacaggcgctgctcccagggggaggggagccaggttggcagcctgctgagcctcaccctgcgggaggagttcaccgtgctgggccaccaggtggaaggatgctgggcgcgtgctggagggcatcagcaaaagcatctcctacgacctagacggggaagagagctatggcaagtacctgcggcgggagtcccaccagatcgggggatgcctactccaactcggacaaatccctcactgagctggagagcaagttcaagcagggccaggaacaggacagccggcaggagagcaggctcaacgaggactttctgggaatgctggtccacaccaggtccctgctgaaggagacactggacatctctgtggggctcagggacaaatacgagctgctggccctcaccattaggaccatgggacccgactagtcggctgaaaaatgattatcttaaagtataggtggaaggatacaaatgcttagaaagagggaatcaaatcagccccgttttggaaggtgggggacagaaaatggggctacatttcccccatacctactatttttttatatcccgatttgcactttgagaatacatctaaggtcatctttcaaaagagaaaaattggacacttgagtgactttgtttttagttttgtttttgaacattatttatgtgattgttatggaattgtcacctggaaagaacaattttaagcaatgtcatttctagatgggtttctaattctgcagagacacccgtttcagccacatctaaaagagcacagtttatgtggtgcggaattaaacttccccatcctgcagattatgtggaaatacccaaagataatagtgcatagctcctttcagcctctagccttcactcctgggctccaaaagctatcccagttgcctgtttttcaaatgaggttcaaggtgctgctttgcatgcctgccaacccatggaagttgtttcttacttcttttctctcttatttattaaccatggtctgagagttgtttttgttctatgtaacagtattgccacaaaactataggcaaatcgtgtttgcagggagatttctgatgcctctgtgggtgtgtgtaagttaaagtggccacatttaagaaggccaagctttgtagtggttgcacagtcacactgatatgctgatttgctctttctcattgtatgtctatgctttgtcatcagtgctatagtaaattacaaagaaataggtagattgtatgaacatacccacaaatgcctatgatttaggttaccaatgtattctttctcatttggggttttgcttctgtctgtctgtttattggaaacttgtacttcaagtagggggaatcctaattctaataactccttagctaagttttattattcaggcaataaacatgttttcatgtaaaaaaaaaaaaaaaaaaa

SEQ ID NO: 475 - DNA, 438 bp, Homo sapiens
  misc_feature (61)..(61): n equals a,t,g, or c
  misc_feature (351)..(351): n equals a,t,g, or c
  misc_feature (436)..(436): n equals a,t,g, or c
ggtcactcctaatgtaggatgggacgattgccccaagctctgtcgtgagtggttgattganggttttcttaagggaacaatgctgggaaagatgataggcgcccgccactgacccctcccgcctccctgcccctccagtaaactcccacacaaaatagcagtatgaggtgtggggaaataatcttggcctccgtcctgggtttacttttgactctgccacctacaagctgtcacctgaacaagtcctttccgttcctgtgtcttccctggtcacaagctctaagcctgaacccacactctgggaatgaagcagggtagcggcctctgcttcagcaactctgaggggtctancttgggtggggagttggcctcatccagaaggctgctggaaggccaagacaaggctctggtggggaagtgttctgagaagggattnct

SEQ ID NO: 476 - DNA, 538 bp, Homo sapiens
  misc_feature (462)..(462): n equals a,t,g, or c
  misc_feature (498)..(498): n equals a,t,g, or c
  misc_feature (520)..(520): n equals a,t,g, or c
gcttgtaggtactcattgaggtttattgtgtaagatgaatgaatgttgcaaattcctaaacatgtgattcagatgcccaatcttactctgttactttatgaaaattttttaaagctatatgatgttatatcaaaatatgttgttatactttaggataatcggtgtgttagccctgaatttcagcataagtcccatttttttccatgggagtctaggaaagctatatgtttattcagcagcaaaatacagtttggaacttaaataaactattgatcaattctggtcttatgctagaaggaataaagcatcaagaaaaagaaaagattgctgtcaagaccaggaaaattgacaatagagtattagaatgcagaaatgaggggaagtggaaargccascaagtaggagagaaaaagtgcagggacagtagaaagtgaatgtaggagcttctgacccagcactcangaacgcaattcatccctaaaaagctgttgcgtctangttgccagtaaccaattaaaanccgtttgaagtagagtga

SEQ ID NO: 477 - DNA, 1346 bp, Homo sapiens
  misc_feature (5)..(5): n equals a,t,g, or c
  misc_feature (17)..(17): n equals a,t,g, or c
  misc_feature (21)..(21): n equals a,t,g, or c
  misc_feature (36)..(36): n equals a,t,g, or c
  misc_feature (107)..(107): n equals a,t,g, or c
  misc_feature (150)..(150): n equals a,t,g, or c
  misc_feature (323)..(323): n equals a,t,g, or c
  misc_feature (1307)..(1307): n equals a,t,g, or c
  misc_feature (1337)..(1337): n equals a,t,g, or c
  misc_feature (1341)..(1341): n equals a,t,g, or c
  misc_feature (1343)..(1343): n equals a,t,g, or c
tcccntcaaggccgggnggcntgttcttggcctttncaacttttgcctttccactatttagaatgcaggtgtgtctgtcctgcaacccagcttctggctctggaaanccagctgcatcacccatgtgcctggaccttctccagaccatgnaggcccaggcgagtgactcactgccattcagtctccatctttgggcagatccaccatgagacataacttcccagaaatccagttacaaggaggaataagtattgaagacttaagaaatgcattttgcagcaggtcctcgctgtactggggcagcggtccattcatagagcccngctagaatagaggtcacaagctcagaagcttctctaaggcaggcaggaaatttaagtcgatactatgatctgcattgtgggctggaatgaacggaaggtgcctagtctaaacagctgcttgttgctcagctgttgttgccgtattgggaattcaagcctaatgatgtttggtattcccattttcaaaagaagtcaggaaatgcagatttctatgtaaatttttaaaacttctgaactgtgtatgagccatacaaaatacatttgcaggccagtcgacatcctctgatccagaatatcaatttgtgagacaagttgttggtgaggcagcattmcatagtagttaaaagcatacattttagagccagactgcccatgtccaaaccctggtcccatcactcactmccttycatttcacttctctttgcttcactttcctcatcagtaaaataaaaataatatcagtacctacctcatagggtttcatgagcattaaataaattaaaacccataaagtactttcaatgctatcaggcatttagttacatggtaaataagtgtttaaaacatttaaaacaaaagttcaaagataataarcaaggaaacagaaaacctgacaggccagctttggaaccttcttgatggcagatctatcaacatttctccctttggctgggatgaaaaggcatttgggaataaaagatcccataaaaataaatgagaagaagtgaaacaccttcattatggcaattttggtgtcagagcctaaaagacagagggatcaaaatattgcagtactaaaatctgatggtttcatgtagaaatgagatttaagcttattaaaatgtatttctttctggtgttaataacccttcacaagacctgggcaattttgaaagaaggaaagaaaatggttctccctgtggacaaraagaaacaaatgactattaaattttctaatttggagtgaactagggkgrttccccnagtttatgtgggaaggtttcagtgagggtngtangngaa

SEQ ID NO: 478 - DNA, 912 bp, Homo sapiens
  misc_feature (36)..(36): n equals a,t,g, or c
  misc_feature (93)..(93): n equals a,t,g, or c
  misc_feature (158)..(158): n equals a,t,g, or c
  misc_feature (592)..(592): n equals a,t,g, or c
aaaatggttctccctgtggcaagaagaaccaaatgnctattaaattttctaatttggagtgaactaagttgatccctaggtttttgtgggagnccggggtgggggagtccagtggaaagcaattgctggagagtagtccttgttctttgctgacagancaggagcagagtgtggaatgaaaactcaatagcctcctctattctcaagagacaattgacttccatctgtttaaacctccccaggggaccctgctccccccatttccatttactctcctttccaccaacctagggtgacattaagaaaaccaaacccatttgaaacacaagctcttacacatcaaaagtcaggggagaagtctggttgacctgtaagccactgcatgaggcacaaagatgcaaaaaggaactttcaggaacaactgctgctccgaggactctatgtcagatataacatccgctttggcccaaaagtaggcttgagccccagaagaggaggaatgtcmagtatgtttaaaatgtgaaacctttagttatacttgctctttactcagaaaggagagagtattcccttatgccaacgaggtctctgngagttgtttgcactattggtagcaggtgctgcctggggtagctcttatggtctgtgcttgaagtgtgcaccagctgctgccctggacatgactgttggtccctgcatacaagcagccacctttaaacagatcaaatgactcttatgatgacagctgtctcactrtactttcaaactggttttaatttggttacttgcaacctaagacagcaracagcattttagggatgaattgcgttcctgaagtgcatgggtcagaaagctcmtacattcactttytactgtccctgcactttttctatcctacttgctgcccttcca

SEQ ID NO: 479 - DNA, 1177 bp, Homo sapiens
  misc_feature (1095)..(1095): n equals a,t,g, or c
  misc_feature (1115)..(1115): n equals a,t,g, or c
  misc_feature (1142)..(1142): n equals a,t,g, or c
  misc_feature (1162)..(1162): n equals a,t,g, or c
agccaccatgcccggcctagattaaaaatttgaagacatattctctactatgagccaatgaaattactcattttgtttctatcccatttgctgtcccttgcttttggaattttgtgtcttagtgtgactgtgattctttctctccttttgtctttcagcaaacggggattcagcgtccgatcctttggaacagggactcacgtgaagcttccaggaccagctcccgacaagcccaatgtttatgatttcaaaaccacatatgaccagatgtacaatgatcttcttaggaaagacaaagaactctatacacagaatgggattttacatatgctggacagaaataagagaatcaagccccggccagaaagattccagaactgcaaagacctgtttgatctgatcctcacttgcgaagagagagtgtatgaccaggtggtggaagatctgaattccagagaacaggagacctgccagccygtgcacgtggtcaatgtggacatccaggacaaccacgaggaggccaccctgggggcgtttctcatctgtgagctctgccagtgtatccagcacacggaagacatggagaacgagatcgacgagctgctgcaggagttcgaggagaagagtggccgcacctttctgcacaccgtctgcttctactgagcccagcgcccgcatggagccgcctctggagcttcctgttgttcatactttttccttcctgacatttgtttttacttacaggtgttctgctggtgacggtagcattacccaaataaactgtgcatatgaaatgggagaggagatgccaaaacgccagatgaaagcaatcaagtttcttcttttccacttttacttatgagcrggatattgattacaaagtttttcttctttaaccaaaaaggaaagacaacggtttgtgtgcacttcccgacatacctgtgtcttcgtgtgcctgccttccctccctcctccccaccgggccggactgtacagagccctgctgcggcgtgttaggaatgacctggaattgtcaataaacagatgctgctgtcaaaaaaaaaaaaaaaaaaaaaaaaaaaaaaaaaaaraaancaaaaaaaaaaaaaaaaggnggggccgaaggttttttccctttggtnggggttatttttggcttggnattggccttcgtttt

SEQ ID NO: 480 - DNA, 1775 bp, Homo sapiens
  misc_feature (820)..(820): n equals a,t,g, or c
gcggcgcgggtgggggttgtgcgttttacgcaggctgtggcagcgacgcggtccccagcctgggtaaagatggccccatggcccccgaagggcctagtcccagctgtgctctggggcctcagcctcttcctcaacctcccaggacctatctggctccagccctctccacctccccagtcttctcccccgcctcagccccatccgtgtcatacctgccggggactggttgacagctttaacaagggcctggagagaaccatccgggacaactttggaggtggaaacactgcctgggaggaagagaatttgtccaaatacaaagacagtgagacccgcctggtagaggtgctggagggtgtgtgcagcaagtcagacttcgagtgccaccgcctgctggagctgagtgaggagctggtggagagctggtggtttcacaagcagcaggaggccccggacctcttccagtggctgtgctcagattccctgaagctctgctgccccgcaggcaccttcgggccctcctgccttccctgtcctgggggaacagagaggccctgcggtggctacgggcagtgtgaaggagaagggacacgagggggcagcgggcactgtgactgccaagccggctacgggggtgaggcctgtggccagtgtggccttggctactttgaggcagaacgcaacgccagccatctggtatgttcggcttgttttggcccctgtgcccgatgctcaggacctgaggaatcaaactgtttgcaatgcaagaagggctgggccctgcatcacctcaagtgtgtagactgtgccaaggcctgcntaggctgcatgggggcagggccaggtcgctgtaagaagtgtagccctggctatcagcaggtgggctccaagtgtctcgatgtggatgagtgtgagacagaggtgtgtccgggagagaacaagcagtgtgaaaacaccgagggcggttatcgctgcatctgtgccgagggctacaagcagatggaaggcatctgtgtgaaggagcagatcccagagtcagcaggcttcttctcagagatgacagaagacgagttggtggtgctgcagcagatgttctttggcatcatcatctgtgcactggccacgctggctgctaagggcgacttggtgttcaccgccatcttcattggggctgtggcggccatgactggctactggttgtcagagcgcagtgaccgtgtgctggagggcttcatcaagggcagataatcgcggccaccacctgtaggacctcctcccacccacgctgcccccagagcttgggctgccctcctgctggacactcaggacagcttggtttatttttgagagtggggtaagcacccctacctgccttacagagcagcccaggtacccaggcccgggcagacaaggcccctggggtaaaaagtagccctgaaggtggataccatgagctcttcacctggcggggactggcaggcttcacaatgtgtgaatttcaaaagtttttccttaatggtggctgctagagctttggcccctgcttaggattaggtggtcctcacaggggtggggccatcacagctccctcctgccagctgcatgctgccagttcctgttctgtgttcaccacatccccacaccccattgccacttatttattcatctcaggaaataaagaaaggtcttggaaagttaaaaaaaaaaaaaaaaaaaaaaaaaaaaactcgagggggggcccgtacccaatcgccctatgatgtagtcgtattaca

SEQ ID NO: 481 - DNA, 866 bp, Homo sapiens
  misc_feature (14)..(14): n equals a,t,g, or c
  misc_feature (27)..(27): n equals a,t,g, or c
  misc_feature (33)..(33): n equals a,t,g, or c
  misc_feature (105)..(105): n equals a,t,g, or c
cctggcttgctggncaagccttggtgnccatgntgaacaagttttgtggaagttctggggagactccaagaactaccaggaacagggatacgagtgccaggctgnatctcttgctcctctgcagagtcagcaggcttcttctcagagatgacagaagacgagttggtggtgctgcagcagatgttctttggcatcatcatctgtgcactggccacgctggctgctaagggcgacttggtgttcaccgccatcttcattggggctgtggcggccatgactggctactggttgtcagagcgcagtgaccgtgtgctggagggcttcatcaagggcagataatcgcggccaccacctgtaggacctcctcccacccacgctgcccccagagcttgggctgccctcctgctggacactcaggacagcttggtttatttttgagagtggggtaagcacccctacctgccttacagagcagcccaggtacccaggcccgggcagacaaggcccctggggtaaaaagtagccctgaaggtggataccatgagctcttcacctggcggggactggcaggcttcacaatgtgtgaatttcaaaagtttttccttaatggtggctgctagagctttggcccctgcttaggattaggtggtcctcacaggggtggggccatcacagctccctcctgccagctgcatgctgccagttcctgttctgtgttcaccacatccccacaccccattgccacttatttattcatctcaggaaataaagaaaggtcttggaaagttaaaaaaaaaaaaaaaaaaaaaaaaaaaaactcgagggggggcccgtacccaatcgccctatgatgtagtcgtattaca

SEQ ID NO: 482 - DNA, 2052 bp, Homo sapiens
  misc_feature (2045)..(2045): n equals a,t,g, or c
tttgcttttcaaatgctcccaaggtctcagatgaagcggtgaaaaaagattcagagttggataagcacttggaatcacgggttgaagagattatggagaagtctggcgaggaaggaatgcctgatcttgcccatgtcatgcgcatcttgtctgcagaaaatatcccaaatttgcctcctgggggaggtcttgctggcaascgtaatgttattgaagctgtttatagtagactgaatccacatagagaaagtgatgggggtgctggagatctagaagacccatggtagccttaaaaaccttctaaaatgcttttrattctgaaaattgggggaaaaaacttttaatcacaattttcttcaatacaaggggaaaatattcttgcggattcccaacgttttgtgatatgagcagaaaatcattagcatttcccatcatttgttcatatttgtgttttctgacagttgccacttgtagcattgcctgtactacagtattttttgccaacctcaggcatactcgttacatctgtattgaactttcggccctagaaaccagtggagttatttcaccacaaatcaacaatgtgcctgaggtgcatgggaaatatagttagctatactctgaaaatacattatgttttttttctttaaacaaaacacacaacatgtaagcatgtaagagtaaagaattgtatgatatgttccttttttcagttcaccaagttggaagccttttgcagctctgtggcttggaatttcatttgagcaatttctataggatatgtatttattattgattgttatttaawttttttcccaattttacctgtattaccaaactgggttctccaataatgtccaaattgtaatgttgccttgcttcaagataaagtgtatttgggaataatattataaacccttacaaattttatgcatgtatctactgcatccttcaactctcactagaaaatcttttgaaaccaaatggattaatttatggctatttataatttgctttgacatctcactgttggaaattttttaaagatgagatttgcctttataatgtaaattgtgatttttgttttacatgtgggtttctatagttttaattttttcagcttttaagatacgagttttgtgtaatttggtatttttaatcatttatgttattttaaaagctcagaatatcacattgaaattactataaatacatttaaaattatctattttagatctaaggaaatactacagagatattttcatgggttcagtaacttttcattttataacattgggcacggtacagagtgattgtcacataaggtacttgaagatttattagtttaattctatttttacagtaaccttgaattcttctgagttttgcatgtattaaattcaattaatgctgaacatgaagagtaaagtatttatctgaaagaagtttctgggttaggagaagtaatgaatgtatccatttgtacatggtttacatgttgtggatgctttgtaaacattttcctgtatgtttaaattgtgtttcagcaggatgtaattgcccttgtgtgtagttaaaatgagtcatcatctggtcctttgtgaaatggaattcatggtattttctgtaacgttttcctgaagctgtttctggagagccacacatttaaatacagacagctttcctgatcatttgatttattgtgcacctgatttttggtctaaaaggaattattgccacaatatattttatttattctttagattttagccttgtaagttaaagtgctttacatgatgatgtgaaaagctgtttgtccctttactgggtttggggggttgttaaaagatagggaatgaagaatgcaaaatggtttatcgttcaaactgtccactctgatccaaccctgtactgatagtacttcccagtatgatattgtgatgtttcatacaatgcagtgaacataaccaacttgttacctaaataaagaattgataaaaacagtgtgacatattaaaaaaaaggggggcccggtacccaattcnccctata

SEQ ID NO: 483 - DNA, 1237 bp, Homo sapiens
agcaaacccaggaaggtgtggcgtccccgcttcgcgccaagatggtgctggtgctgcgccatcctttgtgtgcccgggaaagggcgttccgggagccgggtcgggggctcctgactcgcactgggcagcatgacggtgcgccggctgtcactgctgtgccgggacctctgggcgctgtggctgctgctgaaggccggcgcagtgcgtggggcgcgggcgggtcctcgcctccccggaaggtgttgtggggcgacatgcggggacgccgggcgggggtggacgttctgggcccagccctgtcctcagaagctgctggggcagaagcccggggctgggggatgccggggatgggtgttggggtgggtgcctccgagaccagaggagccctgttccttggcagggaaggtgtgcacgggccttgcccgatggatggtttagggccatggccctggggtccctggtgagcagtggggccgcctctgcccttggcctgtgagggactgtctgtgctggtcccagaaggctgggatcacctttccactggctcctttgttcgaggtttttcatagacaggctatgtggacaaatgagggcagcgcccacgtctggctggtggaggggctgcggctcctccttggaggggacgcctggccactgctgtccccacaatggggccacccgtggtgcaaggcgtgacaagctgccctctctaggtaagcaggacttgggaggcccctggccaagcctgtggacccggctgggcggcctctgtggtctcaggtttgggtgtgtttggtctggtcagggctcaggggctgctggtccacactggccccatcctgacaattggagctttggggcaaggtccctggagaaggggtcacgtcgggaggaaacagcctgggttttgttgatgcttttctaagaatggagtactcgttttcaagagatttgtcctaattatattttccagcgggtacttatgccaagtattgatgaataattcataaaataagcatctttgtgaattttagtgaatcagaccttaactatcaacggcaatgaatgaacatctaaagtttccaattttaaagtaaagaactggctgggtacagcagttcacgcctgtaatcccagcactttgggaggccaaggctagaggatcgcttgagcccaggagtttgagatcagcctgggcaacataccaagacctcatctgttaaaaaaaaaaaaaaaa

SEQ ID NO: 484 - DNA, 1681 bp, Homo sapiens
cgatggccccgcggccgctctagaaagtcccgttttttttttttttttttttttttttttttttagagtacgttctgcattttatttytgcaggcaacactttgctcaccagcaagaacacagcccraggaagggacccaataacctttcaaaacscaaactgctkcctgcggtgagggcccagggtcctccacggagaggacaggcatcttcctttcccaccaggaaggagtcagcccggagcctctgctatgtgcaaggcggtgtgcaagcaccggctgcggctctttgctgtctcttctttctctttggggctgggctgggtgtgcgttctggtgctgatgctttggcctgtgaggctgagcttggcayctcgacccgttcaattacagcaacgaagaagccactgctragygtggtctcaggggargcccggaggcagtgctcggcacccgggaacgtgctcaggcctcggtggggccaggcaggcagggcgggagctagcctgaaggcgcccgggttctgctgcagcgcatctcgcaccacgtcttcattctcctcctggcagagggagcacgtggagtagacgagccgctgcagggaagggaaagtgagcgcgtggcacagggctcgctgctggaaccctgccagggcatgcagacgcaccgggctaggtgtscctgccccgggmtcctccagctgtctgctcggcatacccgagccactgcaggaaggatccagcaggayrtagtggacctcaygrtagcgyggatcyragggggagaccgccaggaagtcctcctcagccagytcacagcargagacgccagcccrggccagcagcgtggccatggatgccagccgcttggcatccaggtcaaaggcaaagatcttcccttggttcttcagaagagcagccaagtgactggtcttattgcctggggcggcacaggcatcgatgacatgggagcctggcggggggtccagcagcatggctgggagacagctggccctgtcctgcagaatgaggtgtccggcccggtacagtgggtgttcatgcagatctgtctgggcgggaaacaccagcagctccggcatcaaggggtccaggagaaaatgcttccccttgagggctcgtaagtcatcgaggctggaagcccgaccctgataggagaaaccttgtctcttgaaataatcaactacatcatcggagcaggtcttgagagtgttcacacgcacaaatcgaggcagctgggaggctggaccaggcctggatcccacttccaacaggtcctcattccggctcacaccccgatgaaccttgagccgagccaactcagccttgagcctcgcctggtgccggcccaacagagccttccatcggcccccaccccctcgaaagccctttcccaacaacaactcatacactagcaccttggccaggtgcggccgcagcttcttctccgcacggaggaggccggcgctggcgatcacagcatccagcacggcggagtagcgctgcgtttcgcacaccagcgcgtacagctgcttcacgttctggaagttgctggagtacaccaaccccttgatagagcctggcggctctccacgccggccaacacgcctgcagctgcagcatacagccccatgttccgtcgcgctttacggctttgtggcaaaa

SEQ ID NO: 485 - DNA, 1863 bp, Homo sapiens
gactaggccgcgagcttagtcctgggagccgcctccgtcgccgccgtcagagccgccctatcagattatcttaacaagaaaaccaactggaaaaaaaaatgaaattccttatcttcgcatttttcggtggtgttcaccttttatccctgtgctctgggaaagctatatgcaagaatggcatctctaagaggacttttgaagaaataaaagaagaaatagccagctgtggagatgttgctaaagcaatcatcaacctagctgtttatggtaaagcccagaacagatcctatgagcgattggcacttctggttgatactgttggacccagactgagtggctccaagaacctagaaaaagccatccaaattatgtaccaaaacctgcagcaagatgggctggagaaagttcacctggagccagtgagaataccccactgggagaggggagaagaatcagctgtgatgctggagccaagaattcataagatagccatcctgggtcttggcagcagcattgggactcctccagaaggcattacagcagaagttctggtggtgacctctttcgatgaactgcagagaagggcctcagaagcaagagggaagattgttgtttataaccaaccttacatcaactactcaaggacggtgcaataccgaacgcagggggcggtggaagctgccaaggttggggctttggcatctctcattcgatccgtggcctccttctccatctacagtcctcacacaggtattcaggaataccaggatggcgtgcccaagattccaacagcctgtattacggtggaagatgcagaaatgatgtcaagaatggcttctcatgggatcaaaattgtcattcagctaaagatgggggcaaagacctacccagatactgattccttcaacactgtagcagagatcactgggagcaaatatccagaacaggttgtactggtcagtggacatctggacagctgggatgttgggcagggtgccatggatgatggcggtggagcctttatatcatgggaagcactctcacttattaaagatcttgggctgcgtccaaagaggactctgcggctggtgctctggactgcagaagaacaaggtggagttggtgccttccagtattatcagttacacaaggtaaatatttccaactacagtctggtgatggagtctgacgcaggaaccttcttacccactgggctgcaattcactggcagtgaaaaggccagggccatcatggaggaggttatgagcctgctgcagcccctcaatatcactcaggtcctgagccatggagaagggacagacatcaacttttggatccaagctggagtgcctggagccagtctacttgatgacttatacaagtatttcttcttccatcactcccacggagacaccatgactgtcatggatccaaagcagatgaatgttgctgctgctgtttgggctgttgtttcttatgttgttgcagacatggaagaaatgctgcctaggtcctagaaacagtaagaaagaaacgttttcatgcttctggccaggaatcctgggtctgcaactttggaaaactcctcttcacataacaatttcatccaattcatcttcaaagcacaactctatttcatgctttctgttattatctttcttgatactttccaaattctctgattctagaaaaaggaatcattctcccctccctcccaccacatagaatcaacatatggtagggattacagtgggggcatttctttatatcacctcttaaaaacattgtttccactttaaaagtaaacacttaataaatttttggaagatctctgaaaaaaaaaaaaaaaaaaagggcggccgc

SEQ ID NO: 486 - DNA, 1134 bp, Homo sapiens
tccatctacagtcctcacacaggtattcaggaataccaggatggcgtgcccaagattccaacagcctgtattacggtggaagatgcagaaatgatgtcaagaatggcttctcatgggatcaaaattgtcattcagctaaagatgggggcaaagacctacccagatactgattccttcaacactgtagcagagatcactgggagcaaatatccagaacaggttgtactggtcagtggacatctggacagctgggatgttgggcagggtgccatggatgatggcggtggagcctttatatcatgggaagcactctcacttattaaagatcttgggctgcgtccaaagaggactctgcggctggtgctctggactgcagaagaacaaggtggagttggtgccttccagtattatcagttacacaaggtaaatatttccaactacagtctggtgatggagtctgacgcaggaaccttcttacccactgggctgcaattcactggcagtgaaaaggccagggcatcatggaggaggttatgagcctgctgcagcccctcaatatcactcaggtcctgagccatggagaagggacagacatcaacttttggatccaagctggagtgcctggagccagtctacttgatgacttatacaagtatttcttcttccatcactcccacggagacaccatgactgtcatggatccaaagcagatgaatgttgctgctgctgtttgggctgttgtttcttatgttgttgcagacatggaagaaatgctgcctaggtcctagaaacagtaagaaagaaacgttttcatgcttctggccaggaatcctgggtctgcaactttggaaaactcctcttcacataacaatttcatccaattcatcttcaaagcacaactctatttcatgctttctgttattatctttcttgatactttccaaattctctgcattctagaaaaaggaatcattctcccctccctcccaccacatagaatcaacatatggtagggattacagtgggggcatttctttatatcacctcttaaaaacattgtttccactttaaaagtaaacacttaataaatttttggaagatctctgaaaaaaaaaaaaaaaaaaaaaaaaaaaa

SEQ ID NO: 487 - DNA, 626 bp, Homo sapiens
gcccacgcgtccgcctaaacacagtcaccatgaagctgggctgtgtcctcatggcctgggccctctacctttcccttggtgtgctctgggtggcccagatgctactggctgccagttttgagacgctgcagtgtgagggacctgtctgcactgaggagagcagctgccacacggaggatgacttgactgatgcaagggaagctggcttccaggtcaaggcctacactttcagtgaacccttccacctgattgtgtcctatgactggctgatcctccaaggtccagccaagccagtttttgaaggggacctgctggttctgcgctgccaggcctggcaagactggccactgactcaggtgaccttctaccgagatggctcagctctgggtccccccgggcctaacagggaattctccatcaccgtggtacaaaaggcagacagcgggcactaccamtgcagtggcatcttccagagccctggtcctgggatcccagaaacagcatctgttgtggctatcacagtccaagaactgtttccagcgccaattctccttctacaaggatggaaggatagtgcaaagcaggggggctctcctcagaattccagatccccacagcttcagaaa

SEQ ID NO: 488 - DNA, 152 bp, Homo sapiens
  misc_feature (41)..(41): n equals a,t,g, or c
cagcccagcttcatggtgactgtgtttaggtctccctcgtnccgaattcctgcagcccgggggatccactagttctagagcggccgccaccgcggtrgagctccagcttttgttccctttagtgagggttaatttcgagcttggcgtaatca

SEQ ID NO: 489 - DNA, 1760 bp, Homo sapiens
  misc_feature (1693)..(1693): n equals a,t,g, or c
  misc_feature (1748)..(1748): n equals a,t,g, or c
gggaattctccatcaccgtggtacaaaaggcagacagcgggcactaccactgcagtgcatcttccasagccctggtcctgggatcccagaaacagcatctgttgtggctatcacagtccaagaactgtttccagcgccaattctcagagctgtaccctcagctgaaccccaagcaggargccccatgaccctgagttgtcagacaaagttgcccctgcagaggtcagctgcccgcctcctcttctccttctacaaggatggaaggatagtgcaaagcagggggctctcctcagaattccagatccccacagcttcagaagatcactccgggtcatactggtgtgaggcagccactgaggacaaccaagtttggaaacagagcccccagctagagatcagagtgcagggtgcttccagctctgctgcacctcccacattgaatccagctcctcagaaatcagctgctccaggaactgctcctgaggaggcccctggctctgcctccgccgccaaccccatcttctgaggatccaggcttttcttctcctctggggatgccagatcctcatctgtatcaccagatgggccttcttctcaaacacatgcaggatgtgagagtcctcctcggtcacctgctcatggagttgagggaattatctggccaccrgaagcctgggaccacaaaggctactgctgaatagaagtaaacagttcatccatgatctcacttaaccaccccaataaatctgattctttattttctcttcctgtcctgcacatatgcataagtacttttacaagttgtcccagtgttttgttagaataatgtagttaggtgagtgtaaataaatttatataaagtgagaattagagtttagctataattgtgtattctctcttaacacaacagaattctgctgtctagatcaggaatttctatctgttatatcgaccagaatgttgtgatttaaagagaactaatggaagtggattgaatacagcagtctcaactgggggcaattttgcccccaagaggacattgggcaatgtttggagacattttggtcattatacttggggggttgggggatggtgggatgtgtgtgctactggcatccagtaaatagaagccaggggtgccgctaaacatcctataatgcacagggcagtaccccacaacgaaaaataatctggcccaaaatgtcagttgtactgagtttgagaaaccccagcctaatgaaaccctaggtgttgggctctggaaatgggactttgtccyttctaattattatctctttccagcctcattcagctattcttactgacataccagtctttagctggtgctatggtctgttctttagttctagtttgtatcccctcaaaagccattatgttgaaatcctaatccccaaggtgatggcattaagaagtgggcctttgggaagtgattagatcaggagtgcagagccctcatgattaggattagtgcccttatttaaaaaggccccagagagctaactcacccttccaccatatgaggacgtggcaagaagatgacatgtatgagaaccaaaaaacagtgtcgccaaacaccgactctgtcgttgccttgatcttgaacttccagcctccagaactatgagaaataaaattctgttgtttgtaagctaatccagttgtgtaatttggnatagtagcccaaatggactaggcagttggcctctggccacatgatgagttatggnatgtaaaaatac

SEQ ID NO: 490 - DNA, 880 bp, Homo sapiens
ggcacgagactggatgaacacaaactccacatgtatctttctgccttgcagtccttgatcccatctctctttgcattagtgctacagaatgcacctttctccagcaaagccaagcttcatggtgaagtgccacagatagaagtgactaggtttcctcggcctatgtcgcctcttcaagatgtgtccactattatcggaagtcgtgagcaattggcagtgctgctgcaactttatgactaccagctagaacaagagggtacaacaggctgggagagtttactgtgggttgtcaatcaattgttgccacaacttatagaaatagttggcaaaattaatgttacttcaactgcctgtgtccatgaattctccagatttttctggcgcctttgccggacatttggcaaaatttttacaaacactaaggtaaaacctcagttccaggagattttaagactatctgaagaaaacattgattcctcagcaggaaatggggtcctcactaaagctacagtccccatttatgcaacaggagtccttacgtgttatattcaggaagaagaccgaaaactgttagttggattcttagaagatgtaatgacgctgctttcattatctcatgctcctcttgatagcctgaaggcttcttttgtggaattgggtgcaaacccagcctaccatgagttactattaactgttttgtggtatggtgttgtccatacttcagcactcgtgaggtgtactgctgctagaatgtttgaggtatgtcaacacatgcctctgttggtttcaattataatgatttttttttttttgcgaagaagaagggaattttttttaataaaaaggctttgcatatcaaaaaaaaaaaaaaaaaaaaaaa

SEQ ID NO: 491 - DNA, 1106 bp, Homo sapiens
  misc_feature (5)..(5): n equals a,t,g, or c
  misc_feature (857)..(857): n equals a,t,g, or c
  misc_feature (1037)..(1037): n equals a,t,g, or c
  misc_feature (1058)..(1058): n equals a,t,g, or c
tccancattatgggatacattgatgatccagacaaatatcatcagggttttgaattgttgctgtcagccttgggtgatccctcagaaagagtagttagtgctacacatcaagtatttttaccagcttacgctgcgtggactacagaacttggaaatttacagtctcatcttatacttacactactgaacaagattgaaaaacttctcagggaaggagaacatggactggatgaacacaaactccacatgtatctttctgccttgcagtccttgatcccatctctctttgcattagtgctacagaatgcacctttctccagcaaagccaagcttcatggtgaagtgccacagatagaagtgactaggtttcctcggcctatgtcgcctcttcaagatgtgtccactattatcggaagtcgtgagcaattggcagtgctgctgcaactttatgactaccagctagaacaagagggtacaacaggctgggagagtttactgtgggttgtcaatcaattgttgccacaacttatagaaatagttggcaaaattaatgttacttcaactgcctgtgtccatgaattctccagatttttctggcgcctttgccggacatttggcaaaatttttacaaacactaaggtaaaacctcagttccaggagattttaagactatctgaagaaaacattgattcctcagcaggaaatggggtcctcactaaagctacagtccccatttatgcaacaggagtccttacgtgttatattcaggaagaagaccgaaaactgttagttggattcttagaagatgtaatgacgctgctttcattatctcatgctcctcttgatagcctgaaggnttcttttgtggaattgggtgcaaaccaggcctaccatgagttactattaactgttttgkggtatggkgtkgkccatacttcagcactcgtgaggtgtactgctgctagaatgtttgagctgttggtgaagggggtgaatgaaactctggtagctcagagggttgttcctgctcttcattnactctctccagtggaccctgnaaatctctgtcaggattgccacaatttccagcctttgggactatttat

SEQ ID NO: 492 - DNA, 646 bp, Homo sapiens
  misc_feature (19)..(19): n equals a,t,g, or c
  misc_feature (544)..(544): n equals a,t,g, or c
cagatgccagggacttggncttcccccggttgaaccacaggttccaagaaacctgcagggtccagcctcccccccatccccagtyttccccaccctggcccggccctccaggtgcagaaacatgcaggcccctctccaggactgtgggaggagtgtgtccctcagactggcctgtgtcctggctcctcttaccacctcttccagaggttgtcacctgcagctgccccaggataaaggcaaggccagaraggactcctgaactcctgtgtgcctggggtggcaggggcaaacatagccaactggtggcctgagcggggccatggtgargacacccttggtggcttgtcccacatcaagctgggargtgacacttaggatgcatttttcaatattttagtgtttgaataacgggctawcttgagaaaaaaataatttgaatcacacatcacaccaaaaataaattctaggtggattttaacactttccaaaaattattattagtttagagacagggtctcactccgtcgcctaggctggagtgcangggtatgatcatggttcactgcaaccttaaactccctggcctcatatgatccccccgggctccagcccctccaaagttactgggaaactaccaaacatgccc

SEQ ID NO: 493 - DNA, 1590 bp, Homo sapiens
tttttttttttttgtttaaatgatacaacttaattttattaggacagacgctggcggccaccagaagtttgagcctctttggtagcaggaggctggaagaaaggacagaagtagctctggctgtgatggggatcttactgggcctgctactcctggggcacctaacagtggacacttatggccgtcccatcctggaagtgccagagagtgtaacaggaccttggaaaggggatgtgaatcttccctgcacctatgaccccctgcaaggctacacccaagtcttggtgaagtggctggtacaacgtggctcagaccctgtcaccatctttctacgtgactcttctggagaccatatccagcaggcaaagtaccagggccgcctgcatgtgagccacaaggttccaggagatgtatccctccaattgagcaccctggagatggatgaccggagccactacacgtgtgaagtcacctggcagactcctgatggcaaccaagtcgtgagagataagattactgagctccgtgtccagaaacactcctcaaagctactcaagaccaagactgaggcacctacaaccatgacataccccttgaaagcaacatctacagtgaagcagtcctgggactggaccactgacatggatggctaccttggagagaccagtgctgggccaggaaagagcctgcctgtctttgccatcatcctcatcatctccttgtgctgtatggtggtttttaccatggcctatatcatgctctgtcggaagacatcccaacaagagcatgtctacgaagcagccagggcacatgccagagaggccaacgactctggagaaaccatgagggtggccatcttcgcaagtggctgctccagtgatgagccaacttcccagaatctgggcaacaactactctgatgagccctgcataggacaggagtaccagatcatcgcccagatcaatggcaactacgcccgcctgctggacacagttcctctggattatgagtttctggccactgagggcaaaagtgtctgttaaaaatgccccattaggccaggatctgctgacataattgcctagtcagtccttgccttctgcatggccttcttccctgctacctctcttcctggatagcccaaagtgtccgcctaccaacactggagccgctgggagtcactggctttgccctggaatttgccagatgcatctcaagtaagccagctgctggatttggctctgggcccttctagtatctctgccgggggcttctggtactcctctctaaataccagagggaagatgcccatagcactaggacttggtcatcatgcctacagacactattcaactttggcatcttgccaccagaagacccgagggaggctcagctctgccagctcagaggaccagctatatccaggatcatttctctttcttcagggccagacagcttttaattgaaattgttatttcacaggccagggttcagttctgctcctccactataagtctaatgttctgactctctcctggtgctcaataaatatctaatcataacagcaaaaaaaaaaaaaaaaaactcgag

SEQ ID NO: 494 - DNA, 1179 bp, Homo sapiens
gggctgcaggaattcggcacgagtttaaagggtgactcgtcccacttgtgttctctctcctggtgcagagttgcaagcaagtttatcggagtatcgccatgaagttcgtcccctgcctcctgctggtgaccttgtcctgcctggggactttgggtcaggccccgaggcaaaagcaaggaagcactggggaggaattccatttccagactggagggagagattcctgcactatgcgtcccagcagcttggggcaaggtgctggagaagtctggcttcgcgttcgactgccgcaacacagaccagacctactggtgtgagtacagggggcagcccagcatgtgccaggctttcgctgctgaccccaaatcttactggaatcaagccctgcaggagctgaggcgccttcaccatgcgtgccagggggccccggtgcttaggccatccgtgtgcagggaggctggaccccaggcccatatgcagcaggtgacttccagcctcaagggcagcccagagcccaaccagcagcctgaggctgggacgccatctctgaggcccaaggccacagtgaaactcacagaagcaacacagctgggaaaggactcgatggaagagctgggaaaagccaaacccaccacccgacccacagccaaacctacccagcctggacccaggcccggagggaatgaggaagcaaagaagaaggcctgggaacattgttggaaacccttccaggccctgtgcgcctttctcatcagcttcttccgagggtgacaggtgaaagacccctacagatctgacctctccctgacagacaaccatctctttttatattatgccgctttcaatccaacgttctcacactggaagaagagagtttctaatcagatgcaacggcccaaattcttgatctgcagcttctctgaagtttggaaaagaaaccttcctttctggagtttgcagagttcagcaatatgatagggaacaggtgctgatgggcccaagagtgacaagcatacacaactacttattatctgtagaagttttgctttgttgatctgagccttctatgaaagtttaaatatgtaacgcattcatgaatttccagtgttcagtaaatagcagctatgtgtgtgcaaaataaaagaatgatttcagaaaaaaaaaaaaaaaaaaactcga

SEQ ID NO: 495 - DNA, 819 bp, Homo sapiens
gaattcggcacgaggagaatcatgggcctctggctgggcatgctggcctgtgtcttcctggcaactgctgcctttgttgcttatactgcccggctggactggaagcttgctgcagaggaggctaagaaacattcaggccggcagcagcagcagagagcagagagcactgcaaccagacctgggcctgagaaagcagtcctatcttcagtggctacaggcagttcccctggcattaccttgacaacgtattcaaggtctgagtgccacgtggacttcttcaggactccagaggaggcccacgccctttcagctcctaccagcagactatcagtgaaacagctggtcatccgccgtggggctgctctgggggcggcgtcagcacactgatggtggggctcacggtcaggatcctagccaccaggcactagcaaagaagcttggaaatagaaagccaggagtggctgtccccagtatgcaaacacaccacggtctgccctgcaaaaacaccaatggggtctagtgcaggtggacactttgaaccactcctcaaaaaaagaactttggctgatyccttgtggtgacactcagaggggtctgaacagacttgacaattctgttctggtcaagctggagttttcttctgtgacttggactgctctacagaagacatcagccaactgcacgagtcagagtccagggattgtcactattattaataatgtaaatggcttcaaatgggacactgcagataammycacaaaaaccactgttatattaaagattacacatttcctggaaaaaaaaaaaaaaaaaactcga

SEQ ID NO: 496 - DNA, 1792 bp, Homo sapiens
ggcacgaggttgtttgagtttggtttggagcaaaactgaggtagtcctaacatttctgggactgaatccaggcaagagaaagaagaaaaagaagaagaaaaagaggaggaaaaagtggattacacaatgacatggagaatgggaccccgtttcactatgctgttggccatgtggctagtgtgtggatcagaaccccacccccatgccactattagaggcagccacggaggacggaaagtgcctttggtttctccggacagcagtaggccagctcggtttctgaggcacactgggaggtctcgcggaattgagagatccactctggaggaaccaaaccttcagcctctccagagaaggaggagtgtgcccgtgttgagactagctcgcccaacagagccgccagcccgctcggacatcaatggggccgccgtgagacctgagcaaagaccagcagccaggggctctccgcgtgagatgatcagagatgaggggtcctcagctcggtcaagaatgttgcgtttcccttcggggtccagctctcccaacatccttgccagctttgcagggaagaacagagtatgggtcatctcagcccctcatgcctcggaaggctactaccgcctcatgatgagcctgctgaaggacgatgtgtactgtgagctggcggagaggcacatccaacagattgtgctcttccaccaggcaggagaggaaggaggcaaggtgagaaggatcaccagcgagggccagatcctggagcagcccctggaccctagcctcatccctaagctgatgagcttcctgaagctggagaagggcaagtttggcatggtgctgctgaagaagacgctgcaggtggaggagcgctatccatatcccgttaggctggaagccatgtacgaggtcatcgaccaaggccccatccgtaggatcgagaagatcaggcagaagggctttgtccagaaatgtaaggcctctggtgtagagggccaggtggtggcggaggggaatgacggtggagggggagcaggaaggccaagcctgggcagcgagaagaagaaagaggacccaaggagagcacaagtcccaccaaccagagagagtcgggtgaaggtcctgagaaaactggccgccactgcaccagcttttccccaacctccctcaacccccagagccaccacccttcctcctgccccagccacaacagtgactcggtccacgtcccgggcggtaacagttgctgcaagacctatgaccaccactgcctttcccaccacgcagaggccctggaccccctcaccctcccacaggccccctacaaccactgaggtgatcactgccaggagaccctcagtttcagagaatctttaccctccatcccggaaggatcagcacagggagaggccacagacaaccaggaggcccagcaaggccaccagcttggagagcttcacaaatgcccctcccaccaccatctcagaacccagcacaagggctgctggcccaggccgtttccgggacaaccgcatggacaggcgggaacatggccaccgagacccaaatgtggtgccaggtcctcccaagccagcaaaggagaaacctcccaaaaagaaggcccaggacaaaattcttagtaatgagtatgaggaagtatgacctcagccggcctactgcctctcagctggaggacgagctgcaggtggggaatgttccccttaaaaaagcaaaggagtctaaaaagcatgaaaagcttgagaaaccagagaaggagaagaaaaaaaaaaaaaaaaaa

SEQ ID NO: 497 - DNA, 1673 bp, Homo sapiens
ggcacgagagaatgggaccccgtttcactatgctgttggccatgtggctagtgtgtggatcagaaccccacccccatgccactattagaggcagccacggaggacggaaagtgcctttggtttctccggacagcagtaggccagctcggtttctgaggcacactgggaggtctcgcggaattgagagatccactctggaggaaccaaaccttcagcctctccagagaaggaggagtgtgcccgtgttgagactagctcgcccaacagagccgccagcccgctcggacatcaatggggccgccgtgagacctgagcaaagaccagcagccaggggctctccgcgtgagatgatcagagatgaggggtcctcagctcggtcaagaatgttgcgtttcccttcggggtccagctctcccaacatccttgccagctttgcagggaagaacagagtatgggtcatctcagcccctcatgcctcggaaggctactaccgcctcatgatgagcctgctgaaggacgatgtgtactgtgagctggcggagaggcacatccaacagattgtgctcttccaccaggcaggagaggaaggaggcaaggtgagaaggatcaccagcgagggccagatcctggagcagcccctggaccctagcctcatccctaagctgatgagcttcctgaagctggagaagggcaagtttggcatggtgctgctgaagaagacgctgcaggtggaggagcgctatccatatcccgttaggctggaagccatgtacgaggtcatcgaccaaggccccatccgtaggatcgagaagatcaggcagaagggctttgtccagaaatgtaaggcctctggtgtagagggccaggtggtggcggaggggaatgacggtggagggggagcaggaaggccaagccagggcagcgagaagaagaaagaggacccaaggagagcacaagtcccaccaaccagagagagtcgggtgaaggtgctgagaaaactggccgccactgcaccagcttttccccaacctccctcaacccccagagccaccacgcttactcctgccccagccacaacagtgactcggtccacgtcccgggcgggaaacagatgctgcaagacctatgaccaccactggctttcccaccacgcagaggccctggaccccctcacccttcccacaggccccctacaaccactgagggtgatcactgccaggagaccctcagtttccagagaatctttaccctccattcccggaaggatcagcacagggagaggccacagacaaccaggaggcccagcaaggcccaccagcttggagagcttcacaaatgcccctcccaccaccatctcagaacccagcacaagggctgctggcccaggccgtttccgggacaaccgcatggacaggcgggaacatggccaccgagacccaaatgtggtgccaggtcctcccaagccagcaaaggagaaacctcccaaaaagaaggcccaggacaaaattcttagtaatgagtatgaggagaagtatgacctcagccggcctactgcctctcagctggaggacgagctgcaggtggggaatgttccccttaaaaaagcaaaggagtctaaaaagcatgaaaagcttgagaaaccagagaaggagaagaaaaaaaaaaaaaaaaaa

SEQ ID NO: 498 - DNA, 2084 bp, Homo sapiens
  misc_feature (775)..(775): n equals a,t,g, or c
  misc_feature (2080)..(2080): n equals a,t,g, or c
  misc_feature (2083)..(2083): n equals a,t,g, or c
ggcagagggccatttcctgcaaagagccaaacccccattcctctgtgcccctcctctcccaccaagtgctttataaaaatagctcttgttaccggaaataactgttcatttttcactcctccctcctaggtcacacttttcagaaaaagaatctgcatcctggaaaccagaagaaaaatatgagacggggaatcatcgtgtgatgtgtgtsctgcctttggctgagtgtgtggagtcctgctcaggtgttaggtacagtgtgtttgatcgtggtggcttgaggggaaccgcttgttcagagctgtgactgcggctgcactgcagagaagctgcccttggctgctcgtagcgccgggccttctctcctcgtcatcatccagagcagccagtgtccgggaggcagaaggtaccggggcagctactggaggactgtgcgggcctgcctgggctgccccctccgccgtggggccctgttgctgctgtccatctatttctactactccctcccaaatgcggtcggcccgcccttcacttggatgcttgccctcctgggccttctcgcaggcactgaacatcctcctgggcctcaagggcctggccccagctgagatctctgcagtgtgtgaaaaagggaatttcaacgtggcccatgggctggcatggtcatattacatcggatatctgcggctgatcctgccagagctccaggcccggattcgaacttacaatcagcattacaacaacctgctacggggtgcagtgagccagcggtgtnatattctcctcccattggactgtggggtgcctgataacctgagtatggctgaccccaacattcgcttcctggataaactgccccagcagaccggtgaccgtgctggcatcaaggatcgggtttacagcaacagcatctatgagcttctggagaacgggcagcgggcgggcacctgtgtcctggagtacgccacccccttgcagactttgtttgccatgtcacaatacagtcaagctggctttagcggggaggataggcttgagcaggccaaactcttctgccggacacttgaggacatcctggcagatgcccctgagtctcagaacaactgccgcctcattgcctaccaggaacctgcagatgacagcagcttctcgctgtcccaggaggttctccggcacctgcggcaggaggaaaaggaagaggttactgtgggcagcttgaagacctcagcggtgcccagtacctccacgatgtcccaagagcctgagctcctcatcagtggaatggaaaagcccctccctctccgcacggatttctcttgagacccagggtcaccaggccagagcctccagtggtctccaagcctctggactgggggctctcttcagtggctgaatgtccagcagagctatttccttccacagggggccttgcagggaagggtccaggacttgacatcttaagatgcgtcttgtccccttgggccagtcatttcccctctctgagcctcggtgtcttcaacctgtgaaatgggatcataatcactgccttacctccctcacggttgttgtgaggactgagtgtgtggaagtttttcataaactttggatgctagtgtacttagggggtgtgccaggtgtctttcatggggccttccagacccactccccacccttctccccttcctttgcccggggacgccgaactctctcaatggtatcaacaggctccttcgccctctggctcctggtcatgttccattattggggagccccagcagaagaatggagaggaggaggaggctgagtttggggtattgaatcccccggctcccaccctgcagcatcaaggttgctatggactctcctgccgggcaactcttgcgtaatcatgactatctctaggattctggcaccacttccttccctggccccttaagcctagctgtgtatcggcacccccaccccactagagtactccctctcacttgcggtttccttatactccacccctttctcaacggtccttttttaaagcacatctcagattaaaaaaaaaaaaaaaaaaaaaaaagggggggcngcnt

SEQ ID NO: 499 - DNA, 1501 bp, Homo sapiens
ggcacgagcctatttctgcttactgtgttaccagagagcctgggggtctggatcctatctggccccgtcagggtggattgccaaatgagcagttctcttgccccagtccctttcctgtgctataaataagccccatgtttattttcttatgttattgaaatgagcacttgtgatttgggcctcttttgaggagtccagagagcgtccatccggtgcctggtgagggccctgcatggctggctgctgtctgaagctatttggagtcctctccctgtgttttctatgtggcttaatttcaatagaaagggttatatgcaaccctgtatctgctgattttcaggtttcaactttctgccagcgtcactgcctgcttagaagtaaagttatgtttcccataaggggataacagccacaattgaggtaattaacgaaaattgtacattggtggcagcacctcctataggatttccaatagtctttctctagtagatcattgggggctcaccttgatctcctctcttctgtctaccctgcaccaaaataccttgtcctgttttctggatatagttccaataatttttttcctaacagcctttttgtcaccagttggtttgatatcttacaacttggccaaatgagggttccattaactccatcttgtctaatgcatggagaattcaaggattttttttttcctcttttcatagcaccttccagttgccagttgtaccctggcccttctttggaagtcataatgatgaatatccattaataagagattgatgctctttcaactctcatgtcatctataccatctcagtggagaggatgactttggatgaggttggaatacaaaggaaacatttggaagtccactgcagtgtattatatgctgtgtggaagtctgggggttaggaaatacctggagggagaacttcctaagaaatgatttttggttcttttaggccttaacagcacaataaaagtatcccatgagaccattatgagcaggacacgacattgtttcacaccttgggctgtgactatttacttctcggtacagattactctggttaaatcactcagtaaagaaatcttttcatgctcacaatctgaacctgaaggctattactgaagagaattgcatctgacaacaaaatttaatttacttccagagaaaggaccagaagaaagtaaattttcatttatgtttttaagtctattgtcttaaaaagattcttttcccttaaaaaataaaaaaacctgatgtgatgggttccttcagtcaacaaatacttattgagcagttattgtgtgccagatactgttcttggtgtgaggatatggcactgaacaaaacaatgtacctactttcgtcaagcttacattctagtgaggaagataaccaaaacaagtgactgaatataatttcaaatgtcaataaatgctgtgaagaaaataaagtcagagtattatatgtaaaaaaaaaaaaaaaaaaaaa

SEQ ID NO: 500 - DNA, 720 bp, Homo sapiens
ggcacgagatttctcacaatgacaaattctcaaatattgctaatagtactgtggattttcctacattggtaaattgaaggaattgctaaatgctgaattcagcaaccagtttgagattgttgaaaataaagattgtttctttttcaatgcaagttcacagatcactggagttctagctacagtttgttctagaccagaggttgcagatatttttgtcctataaagagacacatggttaatatttttggctttgtgagttgtatagttttcgttgtagctgttcagctctgctacatgaagcaaccatagaccataccttaacaagtggtcacttttgagtaccaataaaactttatttagaaataacagagggctggatttggtcctagtttgctgaacccttttctagatgaaggctcctcttgccaagactggctccctaccttggctgacaaattctcactttgggacttagtcattgttgctgctctctgttattttgcatgtcttttctcatgtttaggtgctgtgtcttaatacttttttcttacatttaatttaacaatcattactgagcgctggtatgtctagtttcttttctcttctttcctccttttcttttctttttttctttttctttatttgaaggctctcactctgtcactccagcctgggtggcagaccaggaccctgtctctaaaaaaaaaaaaaaaaaaaaaa

SEQ ID NO: 501 - DNA, 2460 bp, Homo sapiens
  misc_feature (172)..(172): n equals a,t,g, or c
  misc_feature (2457)..(2457): n equals a,t,g, or c
  misc_feature (2459)..(2460): n equals a,t,g, or c
ggatcgccgggaggacccccgcctcgccgaagacgggcggggcaagccgagcctcacggggtccccggagctgggccgggcctccagatggagaaggcgcaacggggagttcttgagtaagccagagcggtgtccagcgcggtgtagccgcagccgccgctgtcaggcgcancaacgggcaaccccgtagaagtcggtcggcaggtcctctccaacccgccgctaccgcgccgctgtgggagagaccccagcaggagcccaarggcagctacgggggcgcgaaggccgctggcgccgcctcggccagcccttcccgcgcggttccactgccttaaggatgacagtcgtagggaaccctcgaagttggagctgccagtggttgccaatcctgatactgttgctgggcacaggccatgggccaggggtggaaggcgtgacacactacaaggccggcgaccctgttattctgtatgtcaacaaagtgggaccctaccataaccctcaggaaacttaccactactatcagcttccagtctgctgccctgagaagatacgtcacaaaagccttagcctgggtgaagtgctggatggggaccgaatggctgagtctttgtatgagatccgctttcgggaaaacgtggagaagagaattctgtgccacatgcagctcagttctgcacaggtggagcagctgcgccaggccattgaagaactgtactactttgaatttgtggtagatgacttgccaatccggggctttgtgggctacatggaggagagtggtttcctgccacacagccacaagataggactctggacccatttggacttccacctagaattccatggagaccgaattatatttgccaatgtttcagtgcgggacgtcaagccccacagcttggatgggttacgacctgacgagttcctaggccttacccacacttatagcgtgcgctggtctgagacttcagtggagcgtcggagtgacaggcgccgtggtgacgatggtggtttctttcctcgaacactggaaatccattggttgtccatcatcaactccatggtgcttgtgtttttactggtgggttttgtggctgtcattctaatgcgtgtgcttcggaatgacctggctcggtacaacttagatgaggagaccacctctgcaggttctggtgatgactttgaccagggtgacaatggctggaaaattatccatacagatgtcttccgcttccccccataccgtggtctgctctgtgctgtgcttggcgtgggtgcccagttcctggcccttggcactggcattattgtcatggcactgctgggcatgttcaatgtgcaccgtcatggggccattaactcagcagccatcttgttgtatgccctgacctgctgcatctctggctacgtgtccagccacttctaccggcagattggaggcgagcgttgggtgtggaacatcattctcaccaccagtctcttctctgtgcctttcttcctgacgtggagtgtggtgaactcagtgcattgggccaatggttcgacacaggctctgccagccacaaccatcctgctgcttctgacggtttggctgctggtgggctttcccctcactgtcattggaggcatctttgggaagaacaacgccagcccctttgatgcaccctgtcgcaccaagaacatcgcccgggagattccaccccagccctggtacaagtctactgtcatccacatgactgttggaggcttcctgcctttcagtgccatctctgtggagctgtactacatctttgccacagtatggggtcgggagcagtacactttgtacggcatcctcttctttgtcttcgccatcctgctgagtgtgggggcttgcatctccattgcactcacctacttccagttgtctggggaggattaccgctggtggtggcgatctgtgctgagtgttggctccaccggcctcttcatcttcctctactcagttttctattatgcccggcgctccaacatgtctggggcagtacagacagtagagttcttcggctactccttactcactggttatgtcttcttcctcatgctgggcaccatctcctttttttcttccctaaagttcatccggtatatctatgttaacctcaagatggactgagttctgtatggcagaactattgctgttctctccctttcttcatgccctgttgaactctcctaccagcttctcttctgattgactgaattgtgtgatggcattgttgccttcccttttgccctttgggcattccttccccagagagggcctggaaattataaatctctatcacataaggattatatatttgaactttttaagttgcctttagttttggtcctgatttttctttttacaattaccaaaataaaatttattaagaaaaagaaaaaaaaaaaaaaaaaaaaaaaggggggggngnn

SEQ ID NO: 502 - DNA, 738 bp, Homo sapiens
  misc_feature (646)..(646): n equals a,t,g, or c
  misc_feature (670)..(670): n equals a,t,g, or c
  misc_feature (696)..(696): n equals a,t,g, or c
  misc_feature (707)..(707): n equals a,t,g, or c
  misc_feature (718)..(718): n equals a,t,g, or c
catcagaccacacccagcagtcagaaaagaggtgcaggggcccgggctgggacagtgaagagtgctgggcagtctgtggtcctctgtatctcaactttttcatcttaaaaaaacaaatagggttgtgtgtgtggctggtggtcataaggtcctttctggctctaataacctgagcttctgttatgaagctgggacccttagagcctcaggatgatcctctgtttgtttgtgaagccccaatcaggtgctaagcaccatagtggcacttagctgaagctcctctgtaactcctgtgggccctgccttgcccacccccgacagctgctgcagtgctcctgagcagcacaggcctgatggagcttctggagaagatgctggccctcaccttggcaaaggcagattctcccaggactgcactcctctgctctgcctggctgctcactgcctccttctctgcccagcagcacaagggcagtttgcaggttcaccagacactctctgtggaaatggaccargtattgaaggctctcagctttccaaagaaaaaggctgcactactctcaactgccatcttatgcttcctgcggacagccctgcgacaaagcttttcctctgcctggaaccctggtgcccttaagggcccagncactgcagccaccaaggacactgncctaacttcactgcgaatgtccaagnccggccctggncattgggctgnaaaaacctcctggtgcaaaa

SEQ ID NO: 503 - DNA, 935 bp, Homo sapiens
  misc_feature (6)..(6): n equals a,t,g, or c
  misc_feature (14)..(14): n equals a,t,g, or c
  misc_feature (16)..(16): n equals a,t,g, or c
  misc_feature (50)..(50): n equals a,t,g, or c
  misc_feature (95)..(95): n equals a,t,g, or c
  misc_feature (101)..(101): n equals a,t,g, or c
  misc_feature (139)..(139): n equals a,t,g, or c
  misc_feature (176)..(176): n equals a,t,g, or c
ggccancttttttntnggggaaaaaatgggacccaaaagttatttgaaangggctttttcaagctttttcccaaaaggaaaaaaagggttgccantaattnttcaaggattgcccatctttaatgctttccttgggganaagccttgcgacaaaagctttttccttctgccctggnagccctggtgccttcaggggcccagccactgccagccaccaaggacactgtcctagctccactgcgaatgtcgcaagtccggtccctggtcattgggctgcagaacctcctggtgcagaaggaccctctattgtcccaggcctgtgttggctgcctggaggccttgcttgactacctggatgcccggagcccagacattgctctccacgtggcctcccagccttggaatcggtttttgctgtttaccctcttggatgctggagagaattccttcctcagacctgagattttgaggctcatgaccctgtttatgcggtaccggagtagcagtgtcctctctcatgaagaggtgggtgatgttctgcaaggtgtggctttggctgacctgtctaccctctcgaacaccacactccaggccctgcatggcttcttccagcagctccagagcatgggacacctggctgaccacagcatggcccagaccctgcaggcctccttggagggccttccccctagcacctcctcaggccagccacccctgcaggacatgctctgcctgggaggggtggctgtatccctgtcccacatcagaaactgatcctcaggacttgaaggcccagaagtggagagagaatgagacctggagacaaagggcataattgttggggaaatggatgacagctgaagctattcatatggagccatatactctattgttgaaatagaataaggaaataaaatgatacactcacaaaaaaa

SEQ ID NO: 504 - DNA, 871 bp, Homo sapiens
ggcacgagggaacccagaagatgctgcctctcctgatcatctgtctcctgcctgccattgaagggaagaactgcctccgctgctggccagaactgtctgccttgatagactatgacctgcagatcctctgggtgaccccagggccacccacagaactttctcaaagtattcactccttgttcctagaggataataattttctcaaaccctggtaccttgatcgtgaccatttggaagaagaaacagccaaattcttcactcaagtacaccaagccattaaaacgttacgagatgataaaacagtacttctggaagagatctacacgcacaagaatctctttactgagaggctgaataagatatctgatgggctgaaggagaaggagccccacccctctccatgaatgccttcccggctccatctcctacttgcaccccagaaccccttggcttctgtctgcctccccagcacctcagtttctctaccttctcaccctccctggcagcctgcaatgagtcctgtgccaggaaccggcggacctccctgtgggctgtgagtctcagcagtgctctactcctggccatagctggagatgtttcttttactggcaaaggaagaaggaggcagtaaaggaacagggcagcccgcatgtcttccagaagtgaacagaggccgcagctaccaccgtcacaaagttcactcatctctgggtcccggtgaccccatccccccataccctccatcctgggtcctggggccccaaagctctgaggcctaggagactgcgctgtctcgtggtttgcctactcctacacctttgtaaagagtctcttcattaaaacccctcttcataaaaaaaaaaaaaaaaaa

SEQ ID NO: 505 - DNA, 881 bp, Homo sapiens
gaattcggcacgagggaacccagaagatgctgcctctcctgatcatctgtctcctgcctgccattgaagggaagaactgcctccgctgctggccagaactgtctgccttgatagactatgacctgcagatcctctgggtgaccccagggccacccacagaactttctcaaagtattcactccttgttcctagaggataataattttctcaaaccctggtaccttgatcgtgaccatttggaagaagaaacagccaaattcttcactcaagtacaccaagccattaaaacgttacgagatgataaaacagtacttctggaagagatctacacgcacaagaatctctttactgagaggctgaataagatatctgatgggctgaaggagaagggagccccacccytctccatgaatgccttcccggctccatctcctacttgcaccccagaaccccttggctctgtctgcctccccagcacctcagtttctctaccttctcacctccctggcagcctgcaatgagtcctgtgccaggaaccggcggacctccctgtgggctgtgagtctcagcagtgctctactcctggccatagctggagatgtttcttttactggcaaaggaagaaggaggcagtaaaggaacagggcagcccgcatgtcttccagaagtgaacagaggccgcagctaccaccgtcacaaagttcactcatctctgggtcccggtgaccccatccccccataccctccatcctgggtcctggggccccaaagctctgaggcctaggagactgcgctgtctcgtggtttgcctactcctacacctttgtaaagagtctcttcattaaaacccctcttcataaaaaaaaaaaaaaaaaactcga

SEQ ID NO: 506 - DNA, 632 bp, Homo sapiens
  misc_feature (537)..(537): n equals a,t,g, or c
  misc_feature (579)..(579): n equals a,t,g, or c
tttgagcactactgggtggttagcatgattgaggaaaaatgatgggaataagaagtggaagtggtctttgtatcacaagttgaatttctcactttgagtagtagtgaagtcactactgtaagagctggtcagtgaatgtggttgcagcatggcctttgggcaagaagtaacccatttaactaaaaccagctggttggccccactcagatttatcaaagggttactgggtccctgggggtggatattgcttatattagacttagaatagcatactgttttaatattatatgaactaaaatgtttctttaaaaaaagagtggtctgttaatggatttatgtagtggtcaagaatttagacttcagagtcaaataaacctatatcagtcctagtcctacagtttactaattgtgagatgkcaagcaagkttttgaactcctctaagcctctgktttcttatctataaattaataaatgaatgaatcgggttgagtgaataattaagtaaaatcttaagacatactagttattggaactgngaaactgggttttttgggaatgggtttcacatttgggaagtngaaataccactttctaaaggtctggtttatctcaaatctctatccaggcctaa

SEQ ID NO: 507 - DNA, 1433 bp, Homo sapiens
ggcagagcacttatgtktttggcattctccgtcatcattctggccggggcgggcagttctaggagttggaactcagtcctggtggaaaaggaagtcgtggagggagggctagggccgtgggggaactgctctgctgagcctcttcctcacctgctgcttcctaggactaacctgaaggctaaggtaccaggctgaagtcagtgctcagaaaaccaatcgtcattctttggggttttttttcttgaagagccactttctctttaccttgttctagcctgttggaggtagggtttctgcaattccaaaggccgtacacagcctctcaccatcagaccactttttaaggctcttcgttcatacctagctcgaagattcacttcctcaggaagccattttagttacaaatctgggaaaacttaaaatgctttcattgtgccatgttttctgttgcagcttcagtaccgtacctagtggtcaggcatacttacaagtttctttttacagtaaccccttgtggacatctaataaatggtcattattttttagtactagtttgttttcctgaacactgtaagatctgtgactgacgtttgataccttaaagcagtgccatataataactacccactatttgttctttatttctgtcagataaaaatgttctatgtagtgtctacagtcattttttttttaactagaatttagatttggaagtagtttttctattagttgatttgcatgaaatacaaaattaggaaaaggcttattccacctcaacctagttgaactattaatgatttttttttttttttgaggatttgggctctttctagatagaaaatcaccctgaacttctagctttgcattgtgaagtgagcatcatgaagatgagaaaatgttgggagatcatttttgcaaagggcataatagtcggcattcagatatgagttaactgcagagggaaaattgcaagctgtcatgttggccttgttcctctcaaccttctggtaacctaacaagctcctacaggttgtatgtgaaattgcaagatgattatatagccctgttgaatttacaaccagatcttgctttcaaaccattattagccaagggtttgattccacacctgtgttcatggattttttggtattagacattgctgtaactctgttttcactttttcatctgttatcttggctcacttaagggagaaggtatcagcagcctaggaccacttggtttctgtttttatgtttcatagttcatggctgataaaaattacctgtccttaggccgagtgcagtgcctcacacctgtaatcccagcactttgggaggccgaggtgagtagatcacctgagatcaggagttcgagaccagcctggacaacaagagcaaaactccatctccaaaaaaaaaaaaaaaaaaactcga

SEQ ID NO: 508 - DNA, 1369 bp, Homo sapiens
  misc_feature (1351)..(1351): n equals a,t,g, or c
  misc_feature (1353)..(1354): n equals a,t,g, or c
gggcgaaggcgatgacaaagaagagtctgttgaaaaactggactgtcattattcaggtcatcatcctcagccagcatctttttgcacatttgggagccggcagataggaagaggctattacgtgtttgactccaggtggaatcgacttcgctgcgccctcaacctcatggtggagaagcatctgaatgcacagctatggragaaaatcccaccagtgcccagtaccacctcacccatctccacacgtattcctcaccggacaaactctgtgccgacatcacaatgtggagtcagctatctggcagcagccaccgtctctacatccccagtcctgctctcatctacctgcatctccccaaatagcaaatcggtaccagctcatggaaccacactaaatgcacagcctgctgcttcaggggcgatggatcctgtgtgcagtatgcaatccagacaagtgtcctcttcatcctcatccccttccacgccctctggcctttcctcggttccttcctcccccatgtccaggaaacctcagaaattgaaatccagcaaatctttgaggcccaaggagtcttctggtaacagcactaactgtcaaaatgccagtagcagtaccagtggcggctcaggaaagaaacgcaaaaacagttccccactgttggttcactcttcctcctcctcttcctcctcctcctcttcttctcattccatgggagtcttttaggaaaaactgtgtggctcactctgggcctccctacccctcaacggtaacatcttcccatagcatcggcctcaactgtgtgacgaataaagcaaatgcggtgaacgtccggcatgaccagtcagggaggggcccccccaccgggagccctgctgaatccatcaagaggatgagtgtgatggtgaacagcagtgattctactctttctcttgggccattcattcaccagtccaatgaactgcctgtcaactcccacggcagtttttcccactcacacactcctctagacaaactcataggaaagaaaagaaagtgctcacccagctcgagcagcatcaacaacagcagcagcaaacccacaaaggttgccaaagtgccagccrtgaacaatgtccacatgaaacacacaggcaccatcccaggggcacaaggactgatgaacagttccctccttcatcaggtaggaaatggactgtgagccccatgggaatgcccatttcttctcccttaagatcttttgtcagctcagaaatgtgtttggttgggttggttggttggtttgtaaacagatattcagcttcatggtgtcttcttaaaaaaaaaaaaaaaaaaaaaaaamcycggggttcntnnaaaggggcccggggg

SEQ ID NO: 509 - DNA, 1598 bp, Homo sapiens
  misc_feature (1067)..(1067): n equals a,t,g, or c
  misc_feature (1069)..(1069): n equals a,t,g, or c
  misc_feature (1577)..(1577): n equals a,t,g, or c
aggaaagaacaaaggttatttcctggagaaaagacaatttattcaacaccaacragggactcatcatatgggcacaactctggtgtccttctatggagaaaacctcaagtaaagttttattctgcctttraaaatgcttccaaaagtagaccctgtccccacacaggtcaagactacagagaaggctttgtagaaatgtgtcacctatgtacacctgctacttacacatttcctcttttggaaaaatgagatacttagaataacargaaaattaagacatactggcctggtgccagcagatggcttttctatagacaaactaggttagtgtggaagatataggttaaaataaactatgctgttttatttatcttcccaacctgattggcagctagacttttttagggtctcatttaatggccctgtttttttcattattatatttaatgatagggcaggatttcgtatgcaagctcttgtttctcaggctgcctgcagaagaagtcgctataaattatctgttgtctacatggtacaaggcccattgactcatctgatgcttgttttgttaatttctttaatatttttatcacggggcagtgggagggcttgggcttttagccacagctgttttaagacttctgatctcctgccctgcaggaataggtgggaagtcattgaatttttacactatagtaatttgcattcccacataagtttgagtgttacgaaaacattcctttaaagggatctgtgctacacaaaatatgccaggacctcacagacaaagccattgctagaaatgtcattccaatgatcagatctggaaacaggctgccataaccacttttccttcttgtagactcagctcacctgtatatttaaactgttcttggcatcttgaaacacctatttctactcaggtactcattgtcctgttactgattcacctttctgatccttttcaaccagttttcccccaaggggggaaattttacttaacctctagtatttgaacaactcaatatttgaattgttgccccatttgcttttacctgtactgtatncntggtcatctcaaatggcgtctaaacccagctactttgcattccagaagtttccattccctccaattccacctaatttttcatctgtcctagttactggctctttcttcatgtcttatttctcttgctttgggagcttaaaagattttacaagacctaattttgggttccttccttggagccatagttaccctgccaagaagagtagaaaatgggttcaactcctgtttcgctccaccaacacctctgtgagtctcatcatcagctgagcgatgatgccttacaggttgcatagcactggaactttcctagagtaacggctctgctgccagggtttctctgggctcattcttccactgacttaattatgatctatgcctaacagagccccagtacaactattttgcagaatggctgttaccctagaattactatagcacatattgagatatagttgtactccctagtagataggaactgaccccaacaataaactttgataataaaganaaaaaaaaaaaaaactcgtag

SEQ ID NO: 510 - DNA, 530 bp, Homo sapiens
  misc_feature (517)..(517): n equals a,t,g, or c
gcctggcagagagactctgaaatgagggattagaggtgttcaaggagcaagagcttcagcctgaagacaagggagcagtccctgaagacgcttctactgagaggtctgccatggcctctcttggcctccaacttgtgggctacatcctaggccttctggggcttttgggcacactggttgccatgctgctccccagctggaaaacaagttcttatgtcggtgccagcattgtgacagcagttggcttctccaagggcctctggatggaatgtgccacacacagcacaggcatcacccagtgtgacatctatagcacccttctgggcctgcccgctgacatccaggctgcccaggccatgatggtgacatccagtgcaatctcctccctggcctgcattatctctgtggtgggcatgagatgcacagtcttctgccaggaatcccgagccaaagacagagtggcggtagcaggtggagtctttttcatccttggaagcctcctgggattcattcctgntgcctggaatctt

SEQ ID NO: 511 - DNA, 1046 bp, Homo sapiens
  misc_feature (14)..(14): n equals a,t,g, or c
  misc_feature (33)..(33): n equals a,t,g, or c
  misc_feature (441)..(441): n equals a,t,g, or c
  misc_feature (460)..(460): n equals a,t,g, or c
gagaagtcagcctngcagagagactctgaaatnagggattagaggtgttcaaggagcaagagcttcagcctgcaagacaagggagcagtccctgaagacgcttctactcaccactggtgcctgacagcatgaaatttgagattggagaggctctttacttgggcattatttcttccctgttctccctgatakctggaatcatcctctgcttttcctgctcatsccagagaaatcgctccaactactacgatgcctaccaagcccaacctcttgccacaaggagctctccaaggcctggtcaacctcccaaagtcaagagtgagttcaattcctacagcytgacagggtatgtgtgaagaaccaggggccagarctgggggktggctgggtctgtgaaaaacagtggacagcaccccgaggccacaggtgagggacattacnactggatcgtgtcagaagntgctgctgaggatagactgactttggccattggattgagcaaaggcagaaatgggggctagtgtaacagcatgcaggttgaattgccaaggatgctcgccatgccagcctttctgttttcctcaccttgctgstcccctgccctaagtccccaaccctcaacttgaaaccccattcccttaagccaggactcagaggatccctttgccctctggtttacctgggactccatccccaaacccactaatcacatcccactgactgaccctctgtgatcaaagaccctctctctggctgaggttggctcttagctcattgctggggatgggaaggagaagcagtggcttttgtgggcattgctctaacctacttctcaagcttccctccaaagaaactgattggccctggaacctccatcccactcttgttatgactccacagtgtccagactaatttgtgcatgaactgaaataaaaccatcctacggtatccagggaacagaaagcaggatgcaggatgggaggacaggaaggcagcctgggacatttaaaaaaaaaaaaaaaaaaactcgagggggggcccggtac

SEQ ID NO: 512 - DNA, 819 bp, Homo sapiens
  misc_feature (786)..(786): n equals a,t,g, or c
  misc_feature (819)..(819): n equals a,t,g, or c
aattcggcacgagctcaaagagtaagaatccaagtgtgtgacattacatagctttgcatctatggaaacctaaatcataattgtttccactgcccaattatgttccttttcataacatttactattctggctatatttatcatagaacctaggaaccttagagttgacctgaatctaattaaatttcagacctcctggccaaagaccctagtggaagagcaaaactaaatcaacatattaccaatctcaagtatttctctgaggacccagaccactgactttttgttgtcattttcaggttgatcctataactgtatgttctacaatatctgtgctccaccagctcagtgaggaatcaacggaatatcaaaagtaaatattggtcaccatataccttttggtactagtctacgaaataattggctgaggaactgtttcatattaaagaaaagctaaaagcaatgtgtgatcttagattagacctatgattggaatgtatgtatattttatatacaaaatattgaggaaattgacaaaatttaaatacagaatatggattagataataggaatgtatcaaggtcaatatttaaaaagataatttcaacttttattttattcagtgggtacatgtgcagactttgttttacatagtacccaacagtttttcaacgcttatcccccaccctctagtaatctgcagwgwctattattgycatcttcgtggctattgtacatgggatccatacttgattttgctctcaacatgaacattattggtgtaganaaatgccactaagttttkgtacgttggcttttn

SEQ ID NO: 513 - DNA, 501 bp, Homo sapiens
  misc_feature (1)..(2): n equals a,t,g, or c
  misc_feature (12)..(12): n equals a,t,g, or c
nnccccccaatnatatttttccaaattaattccaacataggaaggattccaccttcctagtatgttttcaaattgtttcaaacctgacctctttttgattgctctaccttccaaaagaaaagaagggaacactaattttcttycctgatttacttcattgttttcttctgttagattaactttacctataaaagattgtctcttgactttatatatatatatatgtgtgtgtgtgtgtgtgtgtgtgtgtgtgtgtgtgtgtgtgtgtatttgaagaggacatgtgcctccataaaaggaaataaaatgagagaatacattattgattttgtgaaatcaaaatatttgaattatggtttctcaatattcaaaaactcttgcagtttctgtacttatttcttctgatgcatagagtttcggggactacatatgtttcacaaccaaagatatccacttgaaataaaaacattataaagttaaaaaaaaaaaaaaaaactcgag

SEQ ID NO: 514 - DNA, 1162 bp, Homo sapiens
ggcacgaggcgccccggactcttctcagttgagagtgcggttcctgggcaggtttccacaccagttcctttccgcgtccttcggccctggctctggctgcctggcggaggtggggtagcatttgtcatttgcacactgctggctttatctttggggctgcaccccgaggcaacaaatgcaggatgctctgtcacccacatgtccaccaccatctggtttgccttttggctactttgactttctccttaaatgcttcctgtgctgagcaaacattccacagccagcagagcaatggagagttcatggccactcttcccagtatcagcaagcaatttggggtgatcgtttggaagcctcagaggaaagatgtcatcaggcttcctgtggctttgtccttcagcatggggctcggcttgctttcacctgccttaggaagatttctggcttctgagctctgatatggggagaagataagggctgggatctttgagtctgcccctagctgggtatgtgcgtccggtgtgcgggccttggagtttttggtaatgactcacttgtgctctttctgggatctgtctccctcccacatgaccccgtggggtccctgaatgactgttttagagtacccatgtgggttccctgagtcacagcaggggatgtttaataaggaggttagcactgagcttggggacgtgctgtcacaccagcaggacgctgcaggaaggagcaggctacttcctttcttgacgtgcaaataactcgtataggctaatcaacaggcttataagttaaaagggctaccgctcggccccttggggattccatcccctcctctgtaacttggagatgtttgtttctgctgcagactcagagggttgcgatgaagagtggtgggactgagttgagaagcttatcccttcgctgggtgggaggtttctaattgccctgttctttgggggatccttaagtccagcttccaggtgggggcagcgataggaccaagttctcctagtagtctctgggaagccacttgagggaagctgccggtcatgcccatgcacccattggtcttctgccagcaggccctgtaggtcgtgccatgttccatgtccttctgggttcttgggggagaaggaagctgttgaaaaaaaaaaaaaaaaaa

SEQ ID NO: 515 - DNA, 1012 bp, Homo sapiens
acgcgtccggaagtgggagaggtcgcagccccgccttctctacacaggaaagctcagtggcccccaagccaggatgtcccaagcttgggtccccggcctcgcgcccaccttgctgttcagcctgctggctggcccccaaaagattgcagccaaatgtggtctcatccttgcctgccccaaaggattcaaatgctgtggtgacagctgctgccaggagaacgagctcttccctggccccgtgaggatcttcgtcatcatcttcctggtcatcctgtccgtcttttgcatctgtggcctggctaagtgcttctgtcgcaactgcagagagccggagccagacagcccagtggattgccgggggcccctggaactgccctccatcatccccccagagagggtgattctgaagcccagcctgggcccaactcccacagagccaccccctccctacagcttcaggcctgaagaatataccggggatcagaggggcattgacaacccggccttctgagtcacctcctgcctggaatcttgccatcagcaacctcctccccagtgcctcctggatcaagctagagactgctggcaccccaggaatgtccctgcccatcctgccgtgtctctgttcattcttggatttaacttattactttttctgcttctgtttccaccccagctgcctctcttgtcctgagggttaggctggagtgacagtttccgcccaccccccagcccaagaaagaggctgccggaaagaaaatgctgaccattggaggtgcccaacagtagaatgggctactgtgaggggtagtaagagccccatttctggaggtatgcaaatcttgactggacagccagctctgagattttatcagggcacttctatacctgtgggacattggactggatgagccctgagccagcttccactcctacctgaatagagaactcactgcacccacccacaacacatgataaacacatgtcctcactgaaaaaaaaaaaaaaaaaa

SEQ ID NO: 516 - DNA, 754 bp, Homo sapiens
ttaaccctcactaaagggaacaaaagctggagctccaccgcggtggcggccgctctagaactagtggatcccccgggctgcaggaattcggcacgagcactgcagctccctgagcactctctacagagacgcggaccccagacatgaggaggctcctcctggtcaccagcctggtggttgtgctgctgtgggaggcaggtgcagtcccagcacccaaggtccctatcaagatgcaagtcaaacactggccctcagagcaggacccagagaaggcctggggcgcccgtgtggtggagcctccggagaaggacgaccagctggtggtgctgttccctgtccagaagccgaaactcttgaccaccgaggagaagccacgaggcaccaaggcctggatggagaccgaggacaccctgggccgtgtcctgagtcccgagcccgaccatgacagcctgtaccaccctccgcctgaggaggaccagggcgaggagaggccccggttgtgggtgatgccaaatcaccaggtgctcctgggaccggaggaagaccaagaccacatctaccacccccagtaggggctccaggggccatcactgcccccgccctgtcccaaggcccaggctgttgggactgggaccctccctaccctgccccagctagacaaataaaccccagcaggccggaaaaaaaaaaaaaaaaaaaaaaaaaaaaaaaaaaaaaaaaaaaaaaaaaaaaaaaaaaaaaaaaaaaaaaaaaa

SEQ ID NO: 517 - DNA, 667 bp, Homo sapiens
ggcacgagcactgcagctccctgagcactctctacagagacgcggaccccagacatgaggaggctcctcctggtcaccagcctggtggttgtgctgctgtgggaggcaggtgcagtcccagcacccaaggtccctatcaagatgcaagtcaaacactggccctcagagcaggacccagagaaggcctggggcgcccgtgtggtggagcctccggagaaggacgaccagctggtggtgctgttccctgtccagaagccgaaactcttgaccaccgaggagaagccacgaggcaccaaggcctggatggagaccgaggacaccctgggccgtgtcctgagtcccgagcccgaccatgacagcctgtaccaccctccgcctgaagaggaccagggcgaggagaggccccggttgtaggtgatgccaaatcaccaggtgctcctgggaccggaggaagaccaagacacatctaccacccccagtaggggctccaggggccatcaatgcccccgccctgtcccaaggcccaggctgttgggactgggaccctccctaccctgccccagctagacaaataaaccccagcaggccggaaaaaaaaaaaaaaaaaaaaaaaaaaaaaaaaaaaaaaaaaaaaaaaaaaaaaaaaaaaaaaaaaaaaaaaaaaaaa

SEQ ID NO: 518 - DNA, 2025 bp, Homo sapiens
gcccgagaggcccggttcctttaggccgcctgcccgcctccagctctcggggtcggctccaggaggcgccctcaggagaggggcgggcgctctattccagagaccgagtggcagggcggccactgtggcggggctctttccccgtttcgcctcagctacccctcagctccggtagtcgccagtccggggtcgtcgccgtttggggcgggagctgctcggccccgccgccgtccccgtcgccgcttccgggtccaggcccctcgggccgcctgccgccgtcatgaggctgcgggtgcggcttctgaagcggacctggccgctggaggtgcccgagacggagccgacgctggggcatttgcgctcgcacctgaggcagtccctgctgtgcacctgggggtacagttctaatacccgatttacaattacattgaactacaaggatcccctcactggagatgaagagaccttggcttcatatgggattgtttctggggacttgatatgtttgattcttcaagatgacattccagcgcctaatataccttcatccacagattcagagcattcttcactccagaataatgagcaaccctctttggccaccagctccaatcagactagcatrcaggatgaacaaccaagtgattcattccaaggacaggcagcccagtctggtgtttggaatgacgacagtatgttagggcctagtcaaaattttgaagctgagtcaattcaagataatgcgcatatggcagagggcacaggtttctatccctcagaacccatgctctgtagtgaatcggtggaagggcaagtgccacattcattagagaccttgtatcaatcagctgactgttctgatgccaatgatgccttgatagtgttgatacatcttctcatgttggagtcaggttacatacctcagggcaccgaagccaaagcactgtccatgccggagaagtggaagttgagcggggtgtataagctgcagtacatgcatcctctctgcgagggcagctccgctactctcacctgtgtgcctttgggaaacctgattgttgtaaatgcactgaacctaccagatgtatttgggttggtcgtcctcccattggaactgaaactacggatcttccgacttctggatgttcgttccgtcttgtctttgtctgcggtttgtcgtgacctctttactgcttcaaatgacccactcctgtggaggtttttatatctgcgtgattttcgagacaatactgtcagagttcaagacacagattggaaagaactgtacaggaagaggcacatacaaagaaaagaatccccgaaagggcggtttgtgatgctcctgccatcgtcaactcacaccattccattctatcccaaccccttgcaccctaggccatttcctagctcccgccttcctccaggaattatcgggggtgaatatgaccaaagaccaacacttccctatgttggagacccaatcagttcactcattcctggtcctggggagacgcccagccagtttcctccactgagaccacgctttgatccagttggcccacttccaggacctaaccccatcttgccagggcgaggcggccccaatgacagatttccctttagacccagcaggggtcggccaactgatggccggctgtcattcatgtgattgatttgtaatttcatttctggagctccatttgtttttgtttctaaactacagatgtcaactccttggggtgctgatctcgagtgttattttctgattgtggtgttgagagttgcactcccagaaaccttttaagagatacatttatagccctaggggtggtatgacccaaaggttcctctgtgacaaggttggccttgggaatagttggctgccaatctccctgctcttggttctcctctagattgaagtttgttttctgatgctgttcttaccagattaaaaaaaagtgtaaattaaaaaaaaaaaaaaaaaaactygaggggggcccsggacccaattsccctatagggggc

SEQ ID NO: 519 - DNA, 1020 bp, Homo sapiens
aaactaggggaaaatgtagccaacatatacaaagatcttcagaaactctctcgcctctttaaagaccagctggtgtatcctcttctggcttttacccgacaagcactgaacctaccagatgtatttgggttggtcgtcctcccattggaactgaaactacggatcttccgacttctggatgttcgttccgtcttgtctttgtctgcggtttgtcgtgacctctttactgcttcaaatgacccactcctgtggaggtttttatatctgcgtgattttcgagacaatactgtcagagttcaagacacagattggaagactgtacaggaagaggcacatacaaagaaaagaatccccgaaagggcggtttgtgatgctcctgccatcgtcaactcacaccattccattctatcccaaccccttgcaccctaggccatttcctagctcccgccttcctccaggaattatcgggggtgaatatgaccaaagaccaacacttccctatgttggagacccaatcagttcactcattcctggtcctggggagacgcccagccagtttcctccactgagaccacgctttgatccagttggcccacttccaggacctaaccccatcttgccagggcgaggcggccccaatgacagatttccctttagacccagcaggggtcggccaactgatggccggctgtcattcatgtgattgatttgtaatttcatttctggagctccatttgtttttgtttctaaactacagatgtcaactccttggggtgctgatctcgagtgttattttctgattgtggtgttgagagttgcactcccagaaaccttttaagagatacatttatagccctaggggtggtatgacccaaaggttcctctgtgacaaggttggccttgggaatagttggctgccaatctccctgctcttggttctcctctagattgaagtttgttttctgatgctgttcttaccagattaaaaaaaagtgtaaattaaaaaaaaaaaaaaaaaaa

SEQ ID NO: 520 - DNA, 3306 bp, Homo sapiens
ccacgcgtccggcccagggctgtctgtctccaaagcccaaccataactcacatccccattccagctcctctgggtgagtctgttccccctcagcctcactttccttatcctgtcaaatgaaggatttggaatgacttaagttattcaagcaacaaacacttactgaattgtcttgccacttccagggtgacattatggagttctgtgattctgcaagaggccagaggggacaaggtcaagtgggtgttcacctggcccctcatcttcctcctgtgcgtcaccattcccaactgcagcaagccccgctgggagaagttcttcatggtcaccttcatcaacgccacgctgtggatcgctgtgttctcctacatcatggtgtggctggtgactattatcggatacacacttgggatcccggatgtcatcatgggcattactttcctggcagcaggacaagtgttccagactgcatggccagcctaattgtggcgagacaaggccttggggacatggcagtctccaacaccatagaagcaacgtgtttgacatcctggtaggacttggtgtaccgtggggcctgcagaccatggttgttaattatggatcaacagtgaagatcaacagccgggggctggtctattccgtggtcctgttgctgggctctgtcgctctcaccgtcctcggcatccacctaaacaagtggcgactggaccggaagctgggtgtctacgtgctggttctctacgccatcttcttgtgcttctccataatgatagagtttaacgtctttaccttcgtcaacttgccgatgtgccgggaagacgattagcgctgagtcgcggcccctgggagctgatctggacaccctgtgacactggcgtcctcctctcccctccttcccccaccacaggtctctcctgcataggcagccactgtccgttctttcacacactggaaggaagagccatcgtggtctttgtctggccacagccaagctgctgggcatcctcctcctccttggagttccacccctgcaaggctggatttgggggccattatctgagcagcttcaaagacccctgagctgccaaccacggagatgtgccaagcatctcatctctcctgcacactttagtcagaaggacttctgcatgcagtttgtctttctgttctgcaggcagcttcagaattgaggtcatttgtgagcacaagatctcatagggcaggtgcaaaataggaatgttgttctcaagtgtcacctccagcccagaggtggttccttaggcagcatgtgctcctgggagcctctgacttttgctggaagcacccacagtttggaaggggcaagacctcaacctgttggggtttagggcccatgatggcagacattctaccccttttcctggaaaaactggaagaatgaaaataatttttttctgtggaagagagaaaatgagtgaatattcttctcacttttattgatgcattcagagaataagcaatgaaatattaaaaaatgaaacatcatataggtcatcatacttgaaaattatcattccatatgaaaggatcatgatacacaccaaaaaagtaatgatcgtaaagacacaaatcctctgtatgccatcttgcattggcactgaggtgtttggtttggaatagggaaaaagagacaggatctcgctgtgttccccaggtaggtcttgaactcctggcctcaagtgatcctcctgccttgacctcccaaagtgctggattacaagcgtgagcccctgcacccggcccaagcagttgcttctttttttctctttttttttttttttgagatggagcctcactctgttgcccaggctggagtgcagtggcgcgatctccactcactgcaagctccgcctcccgggttcatgccattctcctgcctcagcctcccgagtagctgggactacaggcgcctgccaccacacccagctaattttttgtatttttggtacagacagggtttcaccgtgttagccaggatggtcttgatctctgatctcggatccgccaccccggcctccaaagtgctggattacaagcgtgagccaccgggccccgccaagcagttgcttcttatgcaacatgttgggtgggacttgtccacgggccaggccaataaaattcttaatcctgcagagagcagtaccctcatcaccccatcactggaaaacaaatgtttaagctatcaagagagggaatgtgcagcttggttctagatgcatggtttggaggatctaccttggcctaaagggaatgtcccaaacaacagagccttctttgctgcactccagaattctctacacagaatttcccaagtccattcaggacagacgcgcagtcctctttcaatggaagaagagaggacttttcccctcctgaaaaatgactggagtgtgaacaaggcagctctgtttttctaaataagttgttcttgtgagttttttctggccactgggcatctctgccctcacttttcatccctgccctctaagctgcagaccccatgaccacactgtctgcttccttgagcttcccgcacgaggcttgcacctgggggacctggagaccctgcggacagaactgtggctgagccactgtggccaactcttggggagctccacagtgggggttgctggtctgtgaggctgagtctccatttcagagcacacactccctggcagggcgcctccgcctgtgtctcctgcccagcagccgccagcagggaatagttgctggtgtctgagcacaaagagagctttgattacctagagaggaaaaaggctgtcagccagatgcagccaggcccaggggtagatacaggagttgctaaggaaggggccgagccaggagaggccaggcagatccacaaagcccaaggggatgcaggctgggtgtggtttctgagggaacctaccaaatagcaggtagatggaatcagaggactcttgtgtcctgaaagaacctccttaaaaacaactaaaaccaagaacttctggggctgttcacacattgttcaagtcaccccaagatcgttctggcacgctgagctgaacaccaccatctttgttcattctctctctaatgggcaaagcaggatcatcgagttgaaaagttgtaaataatgaggatatttatcccgctatttattttttcaataactgtgacctcctgcactgtgaatgctctgtgacatgagattcttagtttaataaaactgtcattaaatttgaaaaaaaaaaaaaaaaaaaaaaaaaaaaaaaaaaaaaa

SEQ ID NO: 521 - DNA, 2194 bp, Homo sapiens
  misc_feature (441)..(441): n equals a,t,g, or c
  misc_feature (987)..(987): n equals a,t,g, or c
  misc_feature (2034)..(2034): n equals a,t,g, or c
  misc_feature (2041)..(2041): n equals a,t,g, or c
  misc_feature (2121)..(2121): n equals a,t,g, or c
  misc_feature (2169)..(2169): n equals a,t,g, or c
  misc_feature (2184)..(2184): n equals a,t,g, or c
ggcccagggctgtctgtctccaaagcccaaccataactcacatccccattccagctcctctgggtgagtctgttccccctcagcctcactttccttatcctgtcaaatgaaggatttggaatgacttaagttattcaagcaacaaacacttactgaattgtcttgccacttccagggtgacattatggagttctgtgattctgcaagaggccagaggggacaaggtcaagtgggtgttcacctggcccctcatcttcctcctgtgcgtcaccattcccaactgcagcaagccccgctgggagaagttcttcatggtcaccttcatcamcgccacgctgtggatcgctgtgttctcctacatcatggtgtggctggtgactattatcggatacacacttgggatcccggatgtcatcatgggcattamtttcctggcagcanggacaagtgttccagactgcatggccagcctaattgtggcgagacaaggccttggggacatggcagtctccaacacyataaraagcaacgtgtttgacatcctggtaggacttggtgtaccgtggggcctgcagaccatggttgttaattatggatcaacagtgaagatcaacagccgggggctggtctattccgtggtcctgttgctgggctctgtcgctctcaccgtcctcggcatccacctaaacaagtggcgactggaccggaagctgggtgtctacgtgctggttctctacgccatcttcttgtgcttctccataatgatagagtttaacgtctttaccttcgtcaacttgccgatgtgccgggaagacgattagcgctgagtcgcggcccctgggagctgatctggacaccctgtgacactggcgtcctcctctcccctccttcccccaccacaggtctctcctgcataggcagccactgtccgttctttcacacactggaaggaagagccatcgtggtctttgtctggccacaggccangctgctgggcatcctcctcctccttggagttccacccctgsaaggcygatttgggggccattatctgagcagcttcaaagacccctgarctgccaaccacggagatgtgccaagcatctcatctctcctgcacactttagtcagaaggacttctgcatgcagtttgtctttctgttctgcaggcagcttcagaattgaggtcatttgtgagcacaagatctcatagggcaggtgcaaaataggaatgttgttctcaagtgtcacctccagcccagaggtggttccttaggcagcatgtgctcctgggagcctctgacttttgctggaagcacccacagtttggaaggggcaagacctcaacctgttggggtttagggcccatgatggcagacattctaccccttttcctggaaaaactggaagaatgaaaatmatttttttctgtggaagagagaaaatgagtgaatatycttctcacttttattgatgcattcagagaataagcaatgaaatattaaaaaatgaaacatcatataggtcatcatacttgaaaattatcattccatatgaaaggatcatgatacacaccaaaaaagtaatgatcgtaaagacacaaatcctctgtatgccatcttgcattggcactgaggtgtttggtttggaatagggaaaaagagacaggatctcgctgtgttccccaggtaggtcttgaactcctggcctcaagtgatcctcctgccttgacctcccaaagtgctggattacaagcgtgagcccctgcacccggcgccaagcagttgcttctttttttctctttttttttttttttgagatggagcctcactctgttgcccaggctggagtgcagtggcgcgatctccactcactgcaagctccgcctcccgggttcatgccattctcctgcctcagcctcccgagtagctgggactacaggcgcctgccaccacacccagctaattttttgtatttttggtacagacagggtttcaccgtgttagccaggatggtcttgatctctgatctcgngatccgnccaccccggccttccaaagtgcttggattacaagcgtgagccacccgggccccgccaagcaagttgcttcttatgcaacnatgttgggttggggacttggtccacggggcccaggcccaataaaaatnctttaatccctgcanaagaggccag

SEQ ID NO: 522 - DNA, 1315 bp, Homo sapiens
acgcgtccggacgccgccacctccggaacaagccatggtggcggctacggtggcagcggcgtggctgctcctgtgggctgcggcctgcgcgcagcaggagcaggacttctacgacttcaaggcggtcaacatccggggcaaactggtgtcgctggagaagtaccgcggatcggtgtccctggtggtgaatgtggccagcgagtgcggcttcacagaccagcactaccgagccctgcagcagctgcagcgagacctgggcccccaccacttcaacgtgctcgccttcccctgcaaccagtttggccaacaggagcctgacagcaacaaggagattgagagctttgcccgccgcacctacagtgtctcattccccatgtttagcaagattgcagtcaccggtactggtgcccatcctgccttcaagtacctggcccagacttctgggaaggagcccacctggaacttctggaagtacctagtagccccagatggaaaggtggtaggggcttgggacccaactgtgtcagtggaggaggtcagaccccagatcacagcgctcgtgaggaagctcatcctactgaagcgagaagacttataaccaccgcgtctcctcctccaccacctcatcccgcccacctgtgtggggctgaccaatgcaaactcaaatggtgcttcaaagggagagacccactgactctccttcctttactcttatgccattggtcccatcattcttgtgggggaaaaattctagtattttgattatttgaatcttacagcaacaaataggaactcctggccaatgagagctcttgaccagtgaatcaccagccgatacgaacgtcttgccaacaaaaatgtgtggcaaatagaagtatatcaagcaataatctcccacccaaggcttctgtaaactgggaccaatgattacctcatagggctgttgtgaggattaggatgaaatacctgtgaaagtgcctaggcagtgccagccaaataggaggcattcaatgaacattttttgcacataaaccaaaaaataacttgttatcaataaaaacttgcatccaacatgaatttccagccgatgataatccaggccaaaggtttagttgttgttatttcctctgtattattttcttcattacaaaagaaatgcaagttcattgtaacaatccaaacaatacctcacgatataaaataaaaatgaaagtatcctcctcaaaaaaaaaaaaaaaaaaaaaaaaaaaaaaaaaaaaaaaaaaaaaaaaaaaaaaaaaaaaaaaaaaaaaaaaaaaaaaaaaaaaaaaaaaaa

SEQ ID NO: 523 - DNA, 796 bp, Homo sapiens
  misc_feature (4)..(4): n equals a,t,g, or c
ggantcctcaggcgttctttagaaggtccgcctgcaggtaccggtccggaattcccgggtcgacccacgcgtycggcagacacaggcacttattcattcatctcattgaaaagctacgagttggttccttattgcctctccataatagaaaaactctttaatgagctctctttttgtttttcaaatcagatatgcaaagaagctcataacaattttttttaaaaatgcaaaacaagaatctccaattatgggagcaaaatcttcagcttctgggttcctgtctcactgaggaaatggatttgaaatggcaaggaggaaatgaggaggcaaactttcatgtctattttagttttccaatgcagtcctatttcctttggactttgtataaacaaggaaaggacagttgttagttcagttattacagataacctgtgtctttaaagtaaatgtatcttaaataagtaggactcccataaatgactacactttttcaaaatatgactccccagcttataacaagaataatagcaaacatcactttattaagcaattactatgtaaaagacacttagtgcttagcacacactggaaatattgttgactggctatattttccccagaaatcccatttctgaaagcctattacaaagaaataaaatcatcagtataacaaaggagtgtgtgtgtgtgtgggtgtgagtgtgtgtgggtgtgagtgtgtggggggtgtgagtgtgtgtggggtgtgagagtgtgtgtgtgagtgtaagtgtgtgtgtgtgtaagtgcacacacg

SEQ ID NO: 524 - DNA, 734 bp, Homo sapiens
gctcgtgccgctgctgggcactgggagcagggggcggccaaaggcagtgggtgggcaggtccatgcctcccctggccccccagctctgcagggcagtgttcctggttcctatcttgctgctgctgcaggtgaagcctctgaacgggagcccaggccccaaagatgggagccagacagagaaaacgccctctgcagaccagaatcaagaacagttcgaagagcactttgtggcctcctcagtgggtgagatgtggcaggtggtggacatggcccagcaggaagaagaccagtcgtccaagacggcagctgttcacaagcactctttccacctcagcttctgctttagtctggccagtgtcatggttttctcaggagggccattgaggcggacattcccaaatatccaactctgcttcatgctcactcactgaccctccctccctcctgggctccaggtcacaactcccaaaggagatgcaggcatggctctctgcctctgatcaccatcactgtatctcaaggttcagcagcagagataccagttgccatcagtgctaactgactgcctctccaggttcggagtttcatctcccagggccagagacagcagacccacatccttctctcccacacctctcctggttttgttcaggacagcagattagaggcaggaggcaatgacaataaaataacgataaaatcctgagaacaaaaaaaaaaaaaaaaaactcgag

SEQ ID NO: 525 - DNA, 1147 bp, Homo sapiens
ggcacgagacccattgagcagaaggaggccaggtgggaaagctcctgggaagagcagccagactggacactgggctgcttgagtcctgagtcacaattcagaattcctgggctccctgggtgcattctatcattccagttgaaagtttgcttccttccagtcatgtggctcttcattctactctccttggctctcatttcagatgccatggtcatggatgaaaaggtcaagagaagctttgtgctggacacggcttctgccatctgcaactacaatgcccactacaagaatcaccccaaatactggtgccgaggctatttccgtgactactgcaacatcatcgccttctcccctaacagcaccaatcatgtggccctgaaggacacagggaaccagctcattgtcactatgtcctgcctgaacaaagaagacacgggctggtactggtgtggcatccagcgggactttgccagggatgacatggattttacagagctgattgtaactgacgacaaaggaacctggccaatgactttggtctgggaaagactatcaggcacaaaaccagaagctgcaaggctcccaaagttgtccgcaaggctgaccgctccaggacgtccattctcatcatttgcatactgatcacgggtttgggaatcatctctgtaatcagtcatttgaccaaaaggaggagaagtcaaaggaatagaagggtaggcaacactttgaagcccttctcgcgtgtcctgactccaaaggaaatggctcctactgaacagatgtgactgaagatttttttaatttagttcataaagtgatgctacaacagaataatcaccatgacaactggccccacacctcagagactgattctgatctcccaggaattctgaaggtccctctatccttgacaacaatcatttgcagccaggtagcaacggcagtagtcagaggagctatgatagaccacacccaagcaaggctgccctcaaataacatctcaagatcttagttcttatgcattccatcagtcagaagtgaagaagaggtggagaatctggattggggaccaggaaatcacttgtattttgttagccaataaattcctagccagtgttgaatgaaaaaaaaaaaaaaaaaaaaaaaa

SEQ ID NO: 526 - DNA, 1134 bp, Homo sapiens
  misc_feature (418)..(418): n equals a,t,g, or c
  misc_feature (803)..(803): n equals a,t,g, or c
  misc_feature (816)..(816): n equals a,t,g, or c
acccattgagcagaaggaggccaggtgggaaagctcctgggaagagcagccagactggacactgggctgcttgagtcctgagtcacaattcagaattcctgggctccctgggtgcattctatcattccagttgaaagtttgcttccttccagtcatgtggctcttcattctactctccttggctctcatttcagatgccatggtcatggatgaaaaggtcaagagaagtttgtgctggacacggcttctgccatctgcaactacaatgcccaytacaagaatcaccccaaatactggtgccgaggytatttccgtgaytactgcaacatcatcgccttctcccctaacagcaccaatcatgtggccctgaaggacacagggaaccagctcattgtcactatgtcctgcctgaacaaanaagacacgggctggtactggtgtggcatccarcgggactttgcmagggatgacatggattttacagagctgattgtaactgacgacaaaggaaccctggccaatgacttttggtctgggaaagacctatcaggcaacaaaaccagaagctgcaaggctcccaaagttgtccgcaagctgaccgctccaggacgtccattctcatcatttgcatactgatcacgggtttgggaatcatctctgtaatcagtcatttgaccaaaaggaggagaagtcaaaggaatagaagggtaggcaacactttgaagcccttctcgcgtgtcctgactccaaaggaaatggctcctactgaacagatgtgactgaagwtttttttaatttagttncataaagtgatgnctacaacagawtaatcacccatgacaactggccccacacctcagagactgattctgatctcccaggaattctgaaggaccctctatccttgacaacaatcatttgcagccaggtagcaacggcrgtagtcagaggagctatgatagaccacacccaagcaaggctgccctcaaataacatctcaagatcttagttcttatgcattccatcagtcagaagtgaagaagaggtggagaatctkgattggggaccaggaaatcacttgtattttgttagccaataaattcctagccagtgttgaatgaaaaaaaaaaaaaa

SEQ ID NO: 527 - protein, 207 aa, Homo sapiens
MIKHVAWLIFTNCIFFCPVAFFSFAPLITAISISPEIMKSVTLIFFPLPACLNPVLYVFFNPKFKEDWKLLKRRVTKKSGSVSVSISSQGGCLEQDFYYDCGMYSHLQGNLTVCDCCESFLLTKPVSCKHLIKSHSCPALAVASCQRPEGYWSDCGTQSAHSDYADEEDSFVSDSSDQVQACGRACFYQSRGFPLVRYAYNLPRVKD

SEQ ID NO: 528 - protein, 72 aa, Homo sapiens
MPSIRLGLSHLFLTAGIYCLLLCARCCALGRGTAWAACPGGACGLMGEADPSPPHCQQGQGKSTHRGLIPYV

SEQ ID NO: 529 - protein, 114 aa, Homo sapiens
  SITE (13): Xaa equals any of the naturally occurring L-amino acids
MAGPRASTGPRPXCLVLFLFNFIFCFMSVCPPTPTPFSVKWGALGESLLPPSLSQDLPPRHQPSLWTRQRADRVGRGLRVARASPPANGPLLRPPVSPCPFLKQNALVCKPLDA

SEQ ID NO: 530 - protein, 49 aa, Homo sapiens
MRLCSFTKVPMNLFLNVILLKFYNFLFSLILGKSCLASLGLCKNNKCLS

SEQ ID NO: 531 - protein, 62 aa, Homo sapiens
  SITE (16): Xaa equals any of the naturally occurring L-amino acids
  SITE (54): Xaa equals any of the naturally occurring L-amino acids
MVTGFFFILMTVLWFXREPGFVPGWDSFFEKKGYRTDATVSVFLGFLLFLIPAXEALLWEKE

SEQ ID NO: 532 - protein, 49 aa, Homo sapiens
GRKGGLSGTSFFTWFMVIALLGVWTSVPVVWFDLVVDEQITSQSKGLPL

SEQ ID NO: 533 - protein, 300 aa, Homo sapiens
MKFLLDILLLLPLLIVCSLESFVKLFIPKRRKSVTGEIVLITGAGHGIGRLTAYEFAKLKSKLVLWDINKHGLEETAAKCKGLGAKVHTFVVDCSNREDIYSSAKKVKAEIGDVSILVNNAGVVYTSDLFATQDPQIEKTFEVNVLAHFWTTKAFLPAMTKNNHGHIVTVASAAGHVSVPFLLAYCSSKFAAVGFHKTLTDELAALQITGVKTTCLCPNFVNTGFIKNPSTSLGPTLEPEEVVNRLMHGILTEQKMIFIPSSIAFLTTLERILPERFLAVLKRKISVKFDAVIGYKMKAQ

SEQ ID NO: 534 - protein, 122 aa, Homo sapiens
MCYLLLLLIQTAELLIHPQGLQAVSNGESALKGTRPTFSSPFILVTEGRKEWEGVFLSSGWKGNTLSNYYISLVFYYSRILQPYFYCLWGKLEMVTLIRSVWRGINGGDKIQLVLENVKVLK

SEQ ID NO: 535 - protein, 43 aa, Homo sapiens
MEHLIRSGVKILFLNLLLTSCTTLNEWLNFLVTLNCSRYKMTG

SEQ ID NO: 536 - protein, 66 aa, Homo sapiens
  SITE (12): Xaa equals any of the naturally occurring L-amino acids
MNLSIILPNSFXHLCNFSLFLLPLPVPSQPLICSGNYQSSFCHYRLICIFKEIYIHGTIHHLCFVV

SEQ ID NO: 537 - protein, 140 aa, Homo sapiens
  SITE (129): Xaa equals any of the naturally occurring L-amino acids
  SITE (132): Xaa equals any of the naturally occurring L-amino acids
  SITE (134): Xaa equals any of the naturally occurring L-amino acids
MFFSLPGLWQIASFTHNLIFHLWVWGSESGEHLQSHNDPDTRQGGHIPIRLLGESSASVPGSSEGHTGGPAPPRVGGSAGIIRTHVVFLVSWPLLQREQHRLSWKLPSVMWGDSREPHLARLDQSKWPXATXAXQYLGRG

SEQ ID NO: 538 - protein, 94 aa, Homo sapiens [sequence omitted]

SEQ ID NO: 539 - protein, 563 aa, Homo sapiens
MWAVLRLALRPCARASPAGPRAYHGDSVASLGTQPDLGSALYQENYKQMKALVNQLHERVEHIKLGGGEKARALHISRGKLLPRERIDNLIDPGSPFLELSQFAGYQLYDNEEVPGGGIITGIGRVSGVECMIIANDATVKGGAYYPVTVKKQLRAQEIAMQNRLPCIYLVDSGGAYLPRQADVFPDRDHFGRTFYNQAIMSSKNIAQIAVVMGSCTAGGAYVPAMADENIIVRKQGTIFLAGPPLVKAATGEEVSAEDLGGADLHCRKSGVSDHWALDDHHALHLTRKVVRNLNYQKKLDVTIEPSEEPLFPADELYGIVGANLKRSFDVREVIARIVDGSRFTEFKAFYGDTLVTGFARIFGYPVGIVGNNGVLFSESAKKGTHFVQLCCQRNIPLLFLQNITGFMVGREYEAEGIAKDGAKMVAAVACAQVPKITLIIGGSYGAGNYGMCGRAYSPRFLYIWPNARISVMGGEQAANVLATITKDQRAREGKQFSSADEAALKEPIIKKFEEEGNPYYSSARVWDDGIIDPADTRLVLGLSFSAALNAPIEKTDFGIFRM

SEQ ID NO: 540 - protein, 53 aa, Homo sapiens
MVQFEVIFLLFGLCFSSSSSRLVGSQVENFSPTPCIFQAFRCSSLAIISMSLS

SEQ ID NO: 541 - protein, 421 aa, Homo sapiens
MTVFFKTLRNHWKKTTAGLCLLTWGGHWLYGKHCDNLLRRAACQEAQVFGNQLIPPNAQVKKATVFSILQLAKEKPGLYLKKMLPDFTFIWHGCDYCKTDYEGQAKKLLELMENTDVIIVAGGDGTLQEVVTGVLRRTDEATFSKIPIGFIPLGETSSLSHTLFAESGNKVQHITDATLAIVKGETVPLDVLQIKGEKEQPVFAMTGLRWGSFRDAGVKVSKYWYLGPLKIKAAHFFSTLKEWPQTHQASISYTGPTERPPNEPEETPVQRPSLYRRILRRLASYWAQPQDALSQEVSPEVWKDVQLSTIELSITTRNNQLDPTSKEDFLNICIEPDTISKGDFITIGSRKVRNPKLHVEGTECLQASQCTLLIPEGAGGSFSIDSEEYEAMPVEVKLLPRKLQFFCDPRKREQMLTSPTQ

SEQ ID NO: 542 - protein, 55 aa, Homo sapiens [sequence omitted]

SEQ ID NO: 543 - protein, 242 aa, Homo sapiens [sequence omitted]

SEQ ID NO: 544 - protein, 189 aa, Homo sapiens
  SITE (94): Xaa equals any of the naturally occurring L-amino acids
MALLSRPALTLLLLLMAAVVRCQEQAQTTDWRATLKTIRNGVHKIDTYLNAALDLLGGEDGLCQYKCSDGSKPFPRYGYKPSPPNGCGSPLFGXHLNIGIPSLTKCCNQHDRCYETCGKSKNDCDEEFQYCLSKICRDVQKTLGLTQHVQACETTVELLFDSVIHLGCKPYLDSQRAACRCHYEEKTDL

SEQ ID NO: 545 - protein, 264 aa, Homo sapiens
MLRCGGRGLLLGLAVAAAAVMAARLMGWWGPRAGFRLFIPEELSRYRGGPGDPGLYLALLGRVYDVSSGRRHYEPGSHYSGFAGRDASRAFVTGDCSEAGLVDDVSDLSAAEMLTLHNWLSFYEKNYVCVGRVTGRFYGEDGLPTPALTQVEAAITRGLEANKLQLQEKQTFPPCNAEWSSARGSRLWCSQKSGGVSRDWIGVPRKLYKPGAKEPRCVCVRTTGPPSGQMPDNPPHRNRGDLDHPNLAEYTGCPPLAITCSFPL

SEQ ID NO: 546 - protein, 64 aa, Homo sapiens
MPLFLFVAHLISLLLAFRRPPASQITPRAWTTEIASCESVEMVKALSSLRSRAQVNADFPGHLC

SEQ ID NO: 547 - protein, 56 aa, Homo sapiens
MLVAPFNLLFEMAPFNIFLFPQWGLLWLMLYLLYVFQASLRTPELTWERVRSQVDQ

SEQ ID NO: 548 - protein, 53 aa, Homo sapiens
MLVFLLLFSTVTVLCLKVVFSLKAVAYIVKNEGLCLKFIALQRVVSLKSCTIK

SEQ ID NO: 549 - protein, 49 aa, Homo sapiens
MNLLGMIFSMCGLMLKLKWCAWVAVYCSFISFANSRSSEDTKQMMSSFM

SEQ ID NO: 550 - protein, 59 aa, Homo sapiens
MNSTLCVVLSLMCMNSTLCVVLSLTHSCPSPQVPKVHYMIFMPLHLHSLALTQLIIIYK

SEQ ID NO: 551 - protein, 240 aa, Homo sapiens
MGNCQAGHNLHLCLAHHPPLVCATLILLLLGLSGLGLGSFLLTHRTGLRSPDIPQDWVSFLRSFGQLTLCPRNGTVTGKWRGSHVVGLLTTLNFGDGPDRNKTRTFQATVLGSQMGLKGSSAGQLVLITARVTTERTAGTCLYFSAVPGILPSSQPPISCSEEGAGNATLSPRMGEECVSVWSHEGLVLTKLLTSEELALCGSRLLVLGSFLLLFCGLLCCVTAMCFHPRRESHWSRTRL

SEQ ID NO: 552 - protein, 39 aa, Homo sapiens
MLLLLKTLFVTFWSTNLSITFSNYNVKLYQWQSYIVNGS

SEQ ID NO: 553 - protein, 174 aa, Homo sapiens [sequence omitted]

SEQ ID NO: 554 - protein, 245 aa, Homo sapiens
MEGPRGWLVLCVLAISLASMVTEDLCRAPDGKKGEAGRPGRRGRPGLKGEQGEPGAPGIRTGIQGLKGDQGEPGPSGNPGKVGYPGPSGPLGARGIPGIKGTKGSPGNIKDQPRPAFSAIRRNPPMGGNVVIFDTVITNQEEPYQNHSGRFVCTVPGYYYFTFQVLSQWEICLSIVSSSRGQVRRSLGFCDTTNKGLFQVVSGGMVLQLQQGDQVWVEKDPKKGHIYQGSEADSVFSGFLIFPSA

SEQ ID NO: 555 - protein, 61 aa, Homo sapiens
MYLFLKTLLSFSTLMMTTALSFMVITVLWVLLLHLLANICIPRKCSFACFYINGILLHAVF

SEQ ID NO: 556 - protein, 54 aa, Homo sapiens
MVLSPWACLFVVFFPYIQSSLRSDKHLQLSNILPTPSHHIHLPASICIQLRAGN

SEQ ID NO: 557 - protein, 83 aa, Homo sapiens
MLSLFFCFWKPSFLVSRLVIWLGLVCGGRSLSWVALGEDYLGTPILIPNIHQTCPHPPLWELVPEHPCRLVLIFSLCEHTHIR

SEQ ID NO: 558 - protein, 319 aa, Homo sapiens
MSWCCLWLCLSSVGRTGSAGPSLPFSELCSLGLLRLRPVFSPLHSGPGKPAQFLAGEAEEVNAFALGFLSTSSGVSGEDEVEPLHDGVEEAEKKMEEEGVSVSEMEATGAQGPSRVEEAEGHTEVTEAEGSQGTAEADGPGASSGDEDASGRAASPESASSTPESLQARRHHQFLEPAPAPGAAVLSSEPAEPLLVRHPPRPRTTGPRPRQDPHKAGLSHYVKLFSFYAKMPMERKALEMVEKCLDKYFQHLCDDLEVFAAHAGRKTVKPEDLELLMRRQGLVTDQVSLHVLVERHLPLEYRQLLIPCAYSGNSVFPAQ

SEQ ID NO: 559 - protein, 336 aa, Homo sapiens [sequence omitted]

SEQ ID NO: 560 - protein, 272 aa, Homo sapiens
MWGNKFGVLLFLYSVLLTKGIENIKNEIEDASEPLIDPVYGHGSQSLINLLLTGHAVSNVWDGDRECSGMKLLGIHEQAAVGFLTLMEALRYCKVGSYLKSPKFPIWIVGSETHLTVFFAKDMALVAPEAPSEQARRVFQTYDPEDNGFIPDSLLEDVMKALDLVSDPEYINLMKNKLDPEGLGIILLGPFLQEFFPDQGSSGPESFTVYHYNGLKQSNYNEKVMYVEGTAVVMGFEDPMLQTDDTPIKRCLQTKWPYIELLWTTDRSPSLN

SEQ ID NO: 561 - protein, 89 aa, Homo sapiens
MFKDYPPAIKPSYDVLLLLLLLVLLLQAGLNTGTAIQCVRFKVSARLQGASWDTQNGPQERLAGEVARSPLKEFDKEKAWRAVVVQMAQ

SEQ ID NO: 562 - protein, 52 aa, Homo sapiens
MYLMSFSIHFVKIICMCTILVLSPPVLLKYQDSTPRPLWSQCKIPINYLKGK

SEQ ID NO: 563 - protein, 51 aa, Homo sapiens
  SITE (23): Xaa equals any of the naturally occurring L-amino acids
MAQHHLLSILLAILSCSSQPRQXRGSGALPCEVCSAVLLTCLRKISGSLCV

SEQ ID NO: 564 - protein, 43 aa, Homo sapiens
  SITE (26): Xaa equals any of the naturally occurring L-amino acids
MSNTLLSQWLLLLTLFKCIILPLNLXPIIRTIPDWSPELGTNT

SEQ ID NO: 565 - protein, 74 aa, Homo sapiens
MLHLAAMWWACVTTLVFTLVSKLFIPLKSSMDGEMSLDPHSCVLVCICFPLRFVFVSCFELYLVQSIVKLSQQL

SEQ ID NO: 566 - protein, 169 aa, Homo sapiens
MLAGAGRPGLPQGRHLCWLLCAFTLKLCQAEAPVQEEKLSASTSNLPCWLVEEFVVAEECSPCSNFRAKTTPECGPTGYVEKITCSSSKRNEFKSLPLSFDGTTLILEVRRGCRVCGPDLRLSCHHSSATIGQKGSGKGPEANRVHIATFHPCILGLRDPISDSESEMD

SEQ ID NO: 567 - protein, 127 aa, Homo sapiens [sequence omitted]

SEQ ID NO: 568 - protein, 43 aa, Homo sapiens
MSALSFTSYFLLLLRVKPVEVSGSIPHPEQPNVLCLVLPTFGY

SEQ ID NO: 569 - protein, 215 aa, Homo sapiens
  SITE (83): Xaa equals any of the naturally occurring L-amino acids
  SITE (141): Xaa equals any of the naturally occurring L-amino acids
MYGKSSTRAVLLLLGIQLTALWPIAAVEIYTSRVLEAVNGTDARLKCTFSSFAPVGDALTVTWNFRPLDGGPEQFVFYYHIDXFQPMSGRFKDRVSWDGNPERYDASILLWKLQFDDNGTYTCQVKNPPDVDGVIGDIRLXVVHTVRFSEIHFLALAIGSACALMIIIVIVVVLFQHYRKKRWAERAHKVVEIKSKEEERLNQEKKVSVYLEDTD

SEQ ID NO: 570 - protein, 60 aa, Homo sapiens [sequence omitted]

SEQ ID NO: 571 - protein, 64 aa, Homo sapiens [sequence omitted]

SEQ ID NO: 572 - protein, 79 aa, Homo sapiens [sequence omitted]

SEQ ID NO: 573 - protein, 47 aa, Homo sapiens
MFYPPCPFFPQLCFCIFFLGKCKLSLSFMTCEISVSLEFVRRRGNHA

SEQ ID NO: 574 - protein, 100 aa, Homo sapiens
  SITE (36): Xaa equals any of the naturally occurring L-amino acids
  SITE (47): Xaa equals any of the naturally occurring L-amino acids
  SITE (51): Xaa equals any of the naturally occurring L-amino acids
  SITE (83): Xaa equals any of the naturally occurring L-amino acids
MGMILVLASFLAHPVEALAQAVALGQQQLALLGVQXHAVEGFLQLQXCFAXLFVFEGALLAHLGHFFVEPGAAQGQLLDLGLXRRELGFQFALLARFVLQ

SEQ ID NO: 575 - protein, 10 aa, Homo sapiens
MGLFLFLVSS

SEQ ID NO: 576 - protein, 40 aa, Homo sapiens
MIILHIVVCLFTISIIEEQKEEILCSTKSQAEKTVTHIEQ

SEQ ID NO: 577 - protein, 65 aa, Homo sapiens [sequence omitted]

SEQ ID NO: 578 - protein, 108 aa, Homo sapiens
  SITE (62): Xaa equals any of the naturally occurring L-amino acids
  SITE (63): Xaa equals any of the naturally occurring L-amino acids
MGAAKVWGEVGRWLVIALIQLAKAVLRMLLLLWFKAGLQTSPPIVPLDRETRHSPRMVTTAXXTMSSPTWGSGQTGWCEPSRTRRPCTPGTGELPSSGRDGSSSITRS

SEQ ID NO: 579 - protein, 81 aa, Homo sapiens
MNQLMFQDLLCCLCLFVIGLISLLRKTYSCVNLCKVMLPVKKYSTVSTVLCRNMKLNGKNVLMFVVMLLGQWMGKLPKLSP

SEQ ID NO: 580 - protein, 941 aa, Homo sapiens [sequence omitted]

SEQ ID NO: 581 - protein, 612 aa, Homo sapiens
MAAAGRLPSSWALFSPLLAGLALLGVGPVPARALHNVTAELFGAEAWGTLAAFGDLNSDKQTDLFVLRERNDLIVFLADQNAPYFKPKVKVSFKNHSALITSVVPGDYDGDSQMDVLLTYLPKNYAKSELGAVIFWGQNQTLDPNNMTILNRTFQDEPLIMDFNGDLIPDIFGITNESNQPQILLGGNLSWHPALTTTSKMRIPHSHAFIDLTEDFTADLFLTTLNATTSTFQFEIWENLDGNFSVSTILEKPQNMMVVGQSAFADFDGDGHMDHLLPGCEDKNCQKSTIYLVRSGMKQWVPVLQDFSNKGTLWGFVPFVDEQQPTEIPIPITLHIGDYNMDGYPDALVILKNTSGSNQQAFLLENVPCNNASCEEARRMFKVYWELTDLNQIKDAMVATFFDIYEDGILDIVVLSKGYTKNDFAIHTLKNNFEADAYFVKVIVLSGLCSNDCPRKITPFGVNQPGPYIMYTTVDANGYLKNGSAGQLSQSAHLALQLPYNVLGLGRSANFLDHLYVGIPRPSGEKSIRKQEWTAIIPNSQLIVIPYPHNVPRSWSAKLYLTPSNIVLLTAIALIGVCVFILAIIGILHWQEKKADDREKRQEAHRFHFDAM

SEQ ID NO: 582 - protein, 267 aa, Homo sapiens
  SITE (172): Xaa equals any of the naturally occurring L-amino acids
  SITE (175): Xaa equals any of the naturally occurring L-amino acids
MSEIRGKPIESSCMYGTCCLWGKTYSIGFLRFCKQATLQFCVVKPLMAVSTVVLQAFGKYRDGDFDVTSGYLYVTIIYNISVSLALYALFLFYFATRELLSPYSPVLKFFMVKSVIFLSFWQGMLLAILEKCGAIPKIHSARVSVGEGTVAAGYQDFIICVEMFFAALALRXAFXYKVYADKRLDAQGRCAPMKSISSSLKETMNPHDIVQDAIHNFSPAYQQYTQQSTLEPGPTWRGGAHGLSRSHSLSGARDNEKTLLLSSDDEF

SEQ ID NO: 583 - protein, 53 aa, Homo sapiens
MLVLMTTCILAAVCVHTAQCAPDSRMDNDCPSHQAQIHFRASEVRRGWTFNHD

SEQ ID NO: 584 - protein, 196 aa, Homo sapiens [sequence omitted]

SEQ ID NO: 585 - protein, 52 aa, Homo sapiens [sequence omitted]

SEQ ID NO: 586 - protein, 72 aa, Homo sapiens
MARGCVCSLCASVCIFLSSLFPLLPSVHSVNIISCLLLSKCFEGLELMCEHLYQLSQLHVLHHIFSYLLCTP

SEQ ID NO: 587 - protein, 87 aa, Homo sapiens
MGLHLRPYRVGLLPDGLLFLLLLLMLLADPALPAGRHPPVVLVPGDLGNQLEAKLDKPTVVHYLCSKKTESYFTIWLNLELLLPVHH

SEQ ID NO: 588 - protein, 40 aa, Homo sapiens
MGPSQREVTVQWHRALFLLPLLLLSTRTETKNFGFKWLKD

SEQ ID NO: 589 - protein, 525 aa, Homo sapiens
  SITE (210): Xaa equals any of the naturally occurring L-amino acids
MLAFPLLLTGLISFREKRLQDVGTPAARARAFFTAPVVVFHLNILSYFAFLCLFAYVLMVDFQPVPSWCECAIYLWLFSLVCEEMRQLFYDPDECGLMKKAALYFSDFWNKLDVGAILLFVAGLTCRLIPATLYPGRVILSLDFILFCLRLMHIFTISKTLGPKIIIVKRMMKDVFFFLFLLAVWVVSFGVAKQAILIHNERRVDWLFRXAVYHSYLTIFGQIPGYIDGVNFNPEHCSPNGTDPYKPKCPESDATQQRPAFPEWLTVLLLCLYLLFTNILLLNLLIAMFNYTFQQVQEHTDQIWKFQRHDLIEEYHGRPAAPPPFILLSHLQLFIKRVVLKTPAKRHKQLKNKLEKNEEAALLSWEIYLKENYLQNRQFQQKQRPEQKIEDISNKVDAMVDLLDLDPLKRSGSMEQRLASLEEQVAQTARALHWIVRTLRASGFSSEADVPTLASQKAAEEPDAEPGGRKKTEEPGDSYHVNARHLLYPNCPVTRFPVPNEKVPWETEFLIYDPPFYTAERKDAA

SEQ ID NO: 590 - protein, 937 aa, Homo sapiens
MQNSGKTKFKRTSIDRLMNTLVLWIFGFLICLGIILAIGNSIWESQTGDQFRTFLFWNEGEKSSVFSGFLTFWSYIIILNTVVPISLYVSVEVIRLGHSYFINWDRKMYYSRKAIPAVARTTTLNEELGQIEYIFSDKTGTLTQNIMTFKRCSINGRIYGEVHDDLDQKTEITQEKEPVDFSVKSQADREFQFFDHNLMESIKMGDPKVHEFLRLLALCHTVMSEENSAGELIYQVQSPDEGALVTAARNFGFIFKSRTPETITIEELGTLVTYQLLAFLDFNNTRKRMSVIVRNPEGQIKLYSKGADTILFEKLHPSNEVLLSLTSDHLSEFAGEGLRTLAIAYRDLDDKYFKEWHKMLEDANVATEERDERIAGLYEEIERDLMLLGATAVEDKLQEGVIETVTSLSLANIKIWVLTGDKQETAINIGYACNMLTDDMNDVFVIAGNNAVEVREELRKAKQNLFGQNRNFSNGHVVCEKKQQLELDSIVEETITGDYALIINGHSLAHALESDVKNDLLELACMCKTVICCRVTPLQKAQVVELVKKYRNAVTLAIGDGANDVSMIKSAHIGVGISGQEGLQAVLASDYSFAQFRYLQRLLLVHGRWSYFRMCKFLCYFFYKNFAFTLVHFWFGFFCGFSAQTVYDQWFITLFNIVYTSLPVLAMGIFDQDVSDQNSVDCPQLYKPGQLNLLFNKRKFFICVMHGIYTSLVLFFIPYGAFYNVAGEDGQHIADYQSFAVTMATSLVIVVSVQIALDTSYWTFINHVFIWGSIAIYFSILFTMHSNGIFGIFPNQFPFVGNARHSLTQKCIWLVILLTTVASVMPVVAFRFLKVDLYPTLSDQIRRWQKAQKKARPPSSRRPRTRRSSSRRSGYAFAHQEGYGELITSGKNMRAKNPPPTSGLEKTHYNSTSWIENLCKKTTDTVSSFSQDKTVKL

SEQ ID NO: 591 - protein, 94 aa, Homo sapiens
MLLSFYCLPMVSIHIFFPCAHCVYLLHISCSLGEESFNRDTCKKDFCFSIQNVNSTFLLSLAVFRFSERFSDSNFLFTTPPICSEKNGLLYHWI

SEQ ID NO: 592 - protein, 122 aa, Homo sapiens
MIGGITCILSLICALALAYLDQRAERILHKEQGKTGEVIKLTDVKDFSLPLWLIFIICVCYYVAVFPFIGLGKVFFTEKFGFSSQAASAINSVVYVISAPMSPVFGLLVDKTGKNIIWVLCA

SEQ ID NO: 593 - protein, 567 aa, Homo sapiens
MAPLALHLLVLVPILLSLVASQDWKAERSQDPFEKCMQDPDYEQLLKVVTWGLNRTLKPQRVIVVGAGVAGLVAAKVLSDAGHKVTILEADNRIGGRIFTYRDQNTGWIGELGAMRMPSSHRILHKLCQGLGLNLTKFTQYDKNTWTEVHEVKLRNYVVEKVPEKLGYALRPQEKGHSPEDIYQMALNQALKDLKALGCRKAMKKFERHTLLEYLLGEGNLSRPAVQLLGDVMSEDGFFYLSFAEALRAHSCLSDRLQYSRIVGGWDLLPRALLSSLSGLVLLNAPVVAMTQGPHDVHVQIETSPPARNLKVLKADVVLLTASGPAVKRITFSPPLPRHMQEALRRLHYVPATKVFLSFRRPFWREEHIEGGHSNTDRPSRMIFYPPPREGALLLASYTWSDAAAAFAGLSREEALRLALDDVAALHGPVVRQLWDGTGVVKRWAEDQHSQGGFVVQPPALWQTEKDDWTVPYGRIYFAGEHTAYPHGWVETAVKSALRAAIKINSRKGPASDTASPEGHASDMEGQGHVHGVASSPSHDLAKEEGSHPPVQGQLSLQNTTHTRTSH

SEQ ID NO: 594 - protein, 46 aa, Homo sapiens
MPWLKSLLHFSLFLVVFSTLAVKSLGVPVAAGSPFCIVDVLHFILL

SEQ ID NO: 595 - protein, 66 aa, Homo sapiens
MSWVIVVIIWGYLLEGHGVPFCKSYGPSPWKLHTHHAAYNSGSSQVYRILETLMSGSTHCSFSGTF

SEQ ID NO: 596 - protein, 90 aa, Homo sapiens
MPRAPWRIPLCALPTLCLGSPLPSQPTHPIFYDHRAPTWKMAHPGGPRSSHSPRTWRTPSSQTKAALPAGGARNSPLQLCTRSRFCGTPM

SEQ ID NO: 597 - protein, 710 aa, Homo sapiens
MPVPWFLLSLALGRSPVVLSLERLVGPQDATHCSPGLSCRLWDSDILCLPGDIVPAPGPVLAPTHLQTELVLRCQKETDCDLCLRVAVHLAVHGHWEEPEDEEKFGGAADLGVEEPRNASLQAQVVLSFQAYPTARCVLLEVQVPAALVQFGQSVGSVVYDCFEAALGSEVRIWSYTQPRYEKELNHTQQLPDCRGLEVWNSIPSCWALPWLNVSADGDNVHFGLSLYWNQVQGPPKPRWHKNLTGPQIITLNHTDLVPCLCIQVWPLEPDSVRTNICPFREDPRAHQNLWQAARLRLLTLQSWLLDAPCSLPAEAALCWRAPGGDPCQPLVPPLSWENVTVDKVLEFPLLKGHPNLCVQVNSSEKLQLQECLWADSLGPLKDDVLLLETRGPQDNRSLCALEPSGCTSLPSKASTRAARLGEYLLQDLQSGQCLQLWDDDLGALWACPMDKYIHKRWALVWLACLLFAAALSLILLLKKDHAKGWLRLLKQDVRSGAAARGRAALLLYSADDSGFERLVGALASALCQLPLRVAVDLWSRRELSAQGPVAWFHAQRRQTLQEGGVVVLLFSPGAVALCSEWLQDGVSGPGAHGPHDAFRASLSCVLPDFLQGRAPGSYVGACFDRLLHPDAVPALFRTVPVFTLPSQLPDFLGALQQPRAPRSGRLQERAEQVSRALQPALDSYFHPPGTPAPGRGVGPGAGPGAGDGT

SEQ ID NO: 598 - protein, 48 aa, Homo sapiens [sequence omitted]

SEQ ID NO: 599 - protein, 200 aa, Homo sapiens
  SITE (144): Xaa equals any of the naturally occurring L-amino acids
  SITE (149): Xaa equals any of the naturally occurring L-amino acids
  SITE (160): Xaa equals any of the naturally occurring L-amino acids
  SITE (173): Xaa equals any of the naturally occurring L-amino acids
  SITE (177): Xaa equals any of the naturally occurring L-amino acids
  SITE (189): Xaa equals any of the naturally occurring L-amino acids
MFFLLCLVALEIKGFTFSARGARDRFLNKSGPQPGKKMKTTHCKQPLFSKPGQVRGALRKARGRQEEREAVGMWGGRGHSYPEYIKTSEVTEVRDSPKHPQVQPFLTTRVTCRVPGHLQVLEALCGAWGSMFKHALVVVQVPRXRGRAXLGSEWQVGQLXLILLHGTQHWAAXLVPXLPQESILPAQSXRVTNTPGTEET

SEQ ID NO: 600 - protein, 467 aa, Homo sapiens
MLLLLLLPLLWGRERVEGQKSNRKDYSLTMQSSVTVQEGMCVHVRCSFSYPVDSQTDSDPVHGYWFRAGNDISWKAPVATNNPAWAVQEETRDRFHLLGDPQTKNCTLSIRDARMSDAGRYFFRMEKGNIKWNYKYDQLSVNVTALTHRPNILIPGTLESGCFQNLTCSVPWACEQGTPPMISWMGTSVSPLHPSTTRSSVLTLIPQPQHHGTSLTCQVTLPGAGVTTNRTIQLNVSYPPQNLTVTVFQGEGTASTALGNSSSLSVLEGQSLRLVCAVDSNPPARLSWTWRSLTLYPSQPSNPLVLELQVHLGDEGEFTCRAQNSLGSQHVSLNLSLQQEYTGKMRPVSGVLLGAVGGAGATALVFLSFCVIFIVVRSCRKKSARPAADVGDIGMKDANTIRGSASQGNLTESWADDNPRHHGLAAHSSGEEREIQYAPLSFHKGEPQDLSGQEATNNEYSEIKIPK

SEQ ID NO: 601 - protein, 802 aa, Homo sapiens [sequence omitted]

SEQ ID NO: 602 - protein, 98 aa, Homo sapiens
MHCCQLPWRCAQAPQEAFLLCLLFLILVLVLLGCSRGLPGHTPWRLHPAAAALLAPLLHDALGACGFQGPEYLLPCLLPLPKPGQLQGPWGPLWALLP

SEQ ID NO: 603 - protein, 365 aa, Homo sapiens
MFVGLMAFLLSFYLIFTNEGRALKTATSLAEGLSLVVSPDSIHSVAPENEGRLVHIIGALRTSKLLSDPNYGVHLPAVKLRRHVEMYQWVETEESREYTEDGQVKKETRYSYNTEWRSEIINSKNFDREIGHKNPSAMAVESFMATAPFVQIGRFFLSSGLIDKVDNFKSLSLSKLEDPHVDIIRRGDFFYHSENPKYPEVGDLRVSFSYAGLSGDDPDLGPAHVVTVIARQRGDQLVPFSTKSGDTLLLLHHGDFSAEEVFHRELRSNSMKTWGLRAAGWMAMFMGLNLMTRILYTLVDWFPVFRDLVNIGLKAFAFCVATSLTLLTVAAGWLFYRPLWALLIAGLALVPILVARTRVPAKKLE

SEQ ID NO: 604 - protein, 608 aa, Homo sapiens
  SITE (265): Xaa equals any of the naturally occurring L-amino acids
  SITE (597): Xaa equals any of the naturally occurring L-amino acids
MVGTKLRQTKDALFTILHDLRPQDRFSIIGFSNRIKVWKDHLISVTPDSIRDGKVYIHHMSPTGGTDINGVLQRAIRLLNKYVAHSGIGDRSVSLIVFLTDGKPTVGETHTLKILNNTREAARGQVCIFTIGIGNDVDFRLLEKLSLENCGLTRRVHEEEDAGSQLIGFYDEIRTPLLSDIRIDYPPSSVVQATKTLFPNYFNGSEIIIAGKLVDRKLDHLHVEVTASNSKKFIILKTDVPVRPQKAGKDVTGSPRPGGDGEGDXNHIERLWSYLTTKELLSSWLQSDDEPEKERLRQRAQALAVSYRFLTPFTSMKLRGPVPRMDGLEEAHGMSAAMGPEPVVQSVRGAGTQPGPLLKKPYQPRIKISKTSVDGDPHFVVDFPLSRLTVCFNIDGQPGDILRLVSDHRDSGVTVNGELIGAPAPPNGHKKQRTYLRTITILINKPERSYLEITPSRVILDGGDRLVLPCNQSVVVGSWGLEVSVSANANVTVTIQGSIAFVILIHLYKKPAPFQRHHLGFYIANSEGLSSNCHGLLGQFLNQDARLTEDPAGPSQNLTHPLLLQVGEGPEAVLTVKGHQVPVVWKQRKIYNGEEQXDCWFARNMPPN

SEQ ID NO: 605 - protein, 56 aa, Homo sapiens
MFYKLTLILCELSVAGVTQAASQRPLQRLPRHICSQRSSSWEMPPQGPAPDHVGRA

SEQ ID NO: 606 - protein, 540 aa, Homo sapiens
  SITE (137): Xaa equals any of the naturally occurring L-amino acids
MVRTDGHTLSEKRNYQVTNSMFGASRKKFVEGVDSDYHDENMYYSQSSMFPHRSEKDMLASPSTSGQLSQFGASLYGQQSALGLPMRGMSNNTPQLNRSLSQGTQLPSHVTPTTGVPTMSLHTPPSPSRGILPMNPXNMMNHSQVGQGIGIPSRTNSMSSSGLGSPNRSSPSIICMPKQQPSRQPFTVNSMSGFGMNRNQAFGMNNSLSSNIFNGTDGSENVTGLDLSDFPALADRNRREGSGNPTPLINPLAGRAPYVGMVTKPANEQSQDFSIHNEDFPALPGSSYKDPTSSNDDSKSNLNTSGKTTSSTDGPKFPGDKSSTTQNNNQQKKGIQVLPDGRVTNIPQGMVTDQFGMIGLLTFIRAAETDPGMVHLALGSDLTTLGLNLNSPENLYPKFASPWASSPCRPQDIDFHVPSEYLTNIHIRDKLAAIKLGRYGEDLLFYLYYMNGGDVLQLLAAVELFNRDWRYHKEERVWITRAPGMEPTMKTNTYERGTYYFFDCLNWRKVAKEFHLEYDKLEERPHLPSTFNYNPAQQAF

SEQ ID NO: 607 - protein, 19 aa, Homo sapiens
MAAHSVLSFLLWTPYALKS

SEQ ID NO: 608 - protein, 99 aa, Homo sapiens
MLFFLSLFLSLLLTLSLPSFLPFSFFFFSLFPHLSACLLPSLPSPPFPLPPSLPSFLPSFLPSFLPSLLSPSFPAFFPSFCQLARRSPRKSTQMLQSTS

SEQ ID NO: 609 - protein, 66 aa, Homo sapiens
MNYIFLLMALPHLIAIALTWGRYSFSCLANKETEFQRCQVTCLLHTLGVLMFNFELRSIWLESSLH

SEQ ID NO: 610 - protein, 72 aa, Homo sapiens
MRHTCIVNIAASLLVANTWFIVVAAIQDNRYILCKTACVAATFFIHFFYLSVFFWMLTLGPHAVLSPGFHSA

SEQ ID NO: 611 - protein, 41 aa, Homo sapiens
MINFWPVTHVCIWLLWLQALEARGQGSNIDCTRNSKTVFTS

SEQ ID NO: 612 - protein, 201 aa, Homo sapiens
MTLRPSLLPLHLLLLLLLSAAVCRAEAGLETESPVRTLQVETLVEPPEPCAEPAAFGDTLHIHYTGSLVDGRIIDTSLTRDPLVIELGQKQVIPGLEQSLLDMCVGEKRRAIIPSHLAYGKRGFPPSVPADAVVQYDVELIALIRANYWLKLVKGILPLVGMAMVPALLGLIGYHLYRKANRPKVSKKKLKEEKRNKSKKK

SEQ ID NO: 613 - protein, 41 aa, Homo sapiens
MPPKQIPLTSLSLLALLLFFFFKIFCLLFLFYPLPDESEHF

SEQ ID NO: 614 - protein, 139 aa, Homo sapiens
MEAVVFVFSLLDCCALIFLSVYFIITLSDLECDYINARSCCSKLNKWVIPELIGHTIVTVLLLMSLHWFIFLLNLPVATWNIYRYIMVPSGNMGVFDPTEIHNRGQLKSHMKEAMIKLGFHLLCFFMYLYSMILALIND

SEQ ID NO: 615 - protein, 147 aa, Homo sapiens
MLGLPWKGGLSWALLLLLLGSQILLIYAWHFHEQRDCDEHNVMARYLPATVEFAVHTFNQQSKDYYAYRLGHILNSWKEQVESKTVFSMELLLGRTRCGKFEDDIDNCHFQESTELNNTFTCFFTISTRPWMTQFSLLNKTCLEGFH

SEQ ID NO: 616 - protein, 111 aa, Homo sapiens
MKSLLFTLAVFMLLAQLVSGNWYVKKCLNDVGICKKKCKPEEMHVKNGWAMCGKQRDCCVPADRRANYPVFCVQTKTTRISTVTATTATTTLMMTTASMSSMAPTPVSPTG

SEQ ID NO: 617 - protein, 79 aa, Homo sapiens
MLRLTQTFFFISQTLLDWFLAAALALPNLCSPLASNFKSRQISSVPIQPSQGTSRVALQIWCGSCRMRMSSSTIHILAL

SEQ ID NO: 618 - protein, 47 aa, Homo sapiens
MLISVDSNVPVVFLLLFILVILCHMECKGHIYICVCVCVYMYIFKNI

SEQ ID NO: 619 - protein, 123 aa, Homo sapiens
MKLLLLALPMLVLLPQVIPAYSGEKKCWNRSGHCRKQCKDGEAVKDTCKNLRACCIPSNEDHRRVPATSPTPLSDSTPGIIDDILTVRFTTDYFEVSSKKDMVEESEAGRGTETSLPNVHHSS

SEQ ID NO: 620 - protein, 121 aa, Homo sapiens
MHRSEPFLKMSLLILLFLGLAEACTPREVNLLKGIIGLMSRLSPDEILGLLSLQVLHEETSGCKEEVKPFSGTTPSRKPLPKRKNTWNFLKCAYMVMTYLFVSYNKGDWFTFSSQVLLPLL

SEQ ID NO: 621 - protein, 87 aa, Homo sapiens
MTAWILLPVSLSAFSITGIWTVYAMAVMNHHVCPVENWSYNESCPPDPAEQGGPKTCCTLDDVPLISGPDLPPALRAAPGAESALLG

SEQ ID NO: 622 - protein, 116 aa, Homo sapiens
  SITE (46): Xaa equals any of the naturally occurring L-amino acids
MPGGTRCRVLLLSLTFGTSMACGNVGLRLCPWTWHNWLLPPHLCSXWPCRRCCWAAATTHFSWPPWVRSAWGPPAAWLESSGHPLPAVASCSQPPASADSSRFSKVPCCRRRGWTR

SEQ ID NO: 623 - protein, 86 aa, Homo sapiens
MPWHVCFFLSGLLFPSPQTSLQHLCLLTSLILGVTISAYEHAINLPSLQNSLLTSHPSVAALSLLSSSLQQNSLKELLAGHSGSLL

SEQ ID NO: 624 - protein, 61 aa, Homo sapiens
MFCWILVCLAYLKVPLLFFFFFFLSALFCRTCSNMENKSRRLSSDCYLCPKPPQTFMLMFY

SEQ ID NO: 625 - protein, 352 aa, Homo sapiens
MLCRLCWLVSYSLAVLLLGCLLFLRKAAKPAETPRPTSLSGAPPTPRHSRCPPNHTVSSASLSLPSRHRLFLTYRHCRNFSILLEPSGCSKDTFLLLAIKSQPGHVERRAAIRSTWGRWGDGLGPALKLVFLLGVAGSAPPAQLLAYESREFDDILQWDFTEDFFNLTLKELHLQRWVVAACPQAHFMLKGDDDVFVHVPNVLEFLDGWDPAQDLLVGDVIRQALPNRNTKVKYFIPPSMYRATHYPPYAGGGGYVMSRATVRRLQAIMEDAELFPIDDVFVGMCLRRLGLSPMHHAGFKTFGIRRPLDPLDPCLYRGLLLVHRLSPLEMWTMWALVTDEGLKCAAGPIPQR

SEQ ID NO: 626 - protein, 10 aa, Homo sapiens
GLLYIMYCNI

SEQ ID NO: 627 - protein, 45 aa, Homo sapiens
MVKWIILSCLILKGKRTLNSSTFYAANKSSTINRNLSWQALPFTH

SEQ ID NO: 628 - protein, 56 aa, Homo sapiens
MRSYFPFSVCPFPFCSPVFFFVFTDVYLCFFFVFAVGRHLSDPFPILFFTHKCPDV

SEQ ID NO: 629 - protein, 38 aa, Homo sapiens
MLKLATILLTLLLKNLDAGLTDKLSRSNFITDFILTKY

SEQ ID NO: 630 - protein, 44 aa, Homo sapiens
MPCHGLLAQGLSLAPLPPWALCCVGVSRALQDIQQHPRPPAPCQ

SEQ ID NO: 631 - protein, 34 aa, Homo sapiens
MQARWFHILGMMMFIWSSAHQYKCPCYSRQSQEK

SEQ ID NO: 632 - protein, 68 aa, Homo sapiens
MVHNCLLLLKFLLLFCFPLISYQLMNGSLQSLQRLRMIQNVQCIVLNKQEAEFLMGISFQIYDWSLGF

SEQ ID NO: 633 - protein, 194 aa, Homo sapiens
MKLASGFLVLWLSLGGGLAQSDTSPDTEESYSDWGLRHLRGSFESVNSYFDSFLELLGGKNGVCQYRCRYGKAPMPRPGYKPQEPNGCGSYFLGLKVPESMDLGIPAMTKCCNQLDVCYDTCGANKYRCDAKFRWCLHSICSDLKRSLGFVSKVEACDSLVDTVFNTVWTLGCRPFMNSQRAACICAEEEKEEL

SEQ ID NO: 634 - protein, 79 aa, Homo sapiens
  SITE (23): Xaa equals any of the naturally occurring L-amino acids
  SITE (45): Xaa equals any of the naturally occurring L-amino acids
MGCCSKKYWQLLLGAAPWGVIPXLLLWMGTRAPHFKDSVSQGLPXKAEESRANFNQFLVLLMPKEMIVLTIVHPIVRRA

SEQ ID NO: 635 - protein, 162 aa, Homo sapiens [sequence omitted]

SEQ ID NO: 636 - protein, 53 aa, Homo sapiens
MILLISQCPLSIFAAPFALPPKGHCGSFSDFHSQVTLHKNSKLIFRSHKSILL

SEQ ID NO: 637 - protein, 47 aa, Homo sapiens
MLLFSSRFIMFLWPPVSGVCLSFIRDRSFLPMCHFIYVLILCNSIAL

SEQ ID NO: 638 - protein, 41 aa, Homo sapiens
MSYKWNSRVCFLWSRTFHLMLLRLICLVAYISTEVISFIAE

SEQ ID NO: 639 - protein, 79 aa, Homo sapiens
MTLMCLCLSVTVLHPLRSKERLSGTFCGYSSSWCSPASESSSPGSLLTCAASGSHPDCPLSQRLLGVQLAALGRPQGLF

SEQ ID NO: 640 - protein, 292 aa, Homo sapiens
MLRVLCLLRPWRPLRARGCASDGAAGGSEIQVRALAGPDQGITEILMNRPSARNALGNVFVSELLETLAQLREDRQVRVLLFRSGVKGVFCAGADLKEREQMSEAEVGVFVQRLRGLMNDIAAFPAPTIAAMDGFALGGGLELALACDLRVAASSAVMGLIETTRGLLPGAGGTQRLPRCLGVALAKELIFTGRRLSGTEAHVLGLVNHAVAQNEEGDAAYQRARALAQEILPQAPIAVRLGKVAIDRGTEVDIASGMAIEGMCYAQNIPTRDRLEGMAAFREKRTPKFVGK

SEQ ID NO: 641 - protein, 377 aa, Homo sapiens
  SITE (164): Xaa equals any of the naturally occurring L-amino acids
  SITE (213): Xaa equals any of the naturally occurring L-amino acids
MATAMDWLPWSLLLFSLMCETSAFYVPGVAPINFHQNDPVEIKAVKLTSSRTQLPYEYYSLPFCQPSKITYKAENLGEVLRGDRIVNTPFQVLMNSEKKCEVLCSQSNKPVTLTVEQSRLVAERITEDYYVHLIADNLPVATRLELYSNRDSDDKKKESDIKWXSRWDTYLTMSDVQIHWFSIINSVVVVFFLSGILSMIIIRTLRKDIANYXKEDDIEDTMEESGWKLVHGDVFRPPPVPHDPQLPAGLRHSAVLYDPHRHLCSHAWDAVALQPGSSHDHSLLPLHVHGGVWRIFCWPSVPHFKRPSVEERSLLYGNSVPWCGFWHLLRIELLHLGKALIRSGALSHHGGSAVHVVRDLPAPRLLGLLLRLPKAAI

SEQ ID NO: 642 - protein, 121 aa, Homo sapiens
MIMAQKIGGLTWWAIMFIILFEITGTSSSFLRINALPHFSMNRCGEAYFPFSYLYTSLQKQFLMKVSGIVKNLRGNDDWRCFGVFFCIHFLMRKVLNVVQVRPNYYLTIIGRFYVSVKVFK

SEQ ID NO: 643 - protein, 26 aa, Homo sapiens
MFHSSLLVFLSLLSQEIFTEYDCMHK

SEQ ID NO: 644 - protein, 76 aa, Homo sapiens
  SITE (22): Xaa equals any of the naturally occurring L-amino acids
MNRGQRLCLAFVSLFPPCNSLXPPPTLFPSPLLPLSLTSPTPHSLSSLAVSCVCVGVCVFGCVNVGSSTTGFCNLG

SEQ ID NO: 645 - protein, 50 aa, Homo sapiens
MYIYLIHLCMCVYIYIYILLIIYTLDPEPPSWSPKLDSHLSLRQPSNDRF

SEQ ID NO: 646 - protein, 82 aa, Homo sapiens
MNRSTRSYRCWATWPRLGWALPCCMNSLRKGRKFSQITTSLMASVSSASMVSRRRRPLPKHPVTTTSTATALLGTSSTWSKS

SEQ ID NO: 647 - protein, 64 aa, Homo sapiens
MFMWTISIVTFSIPLTLPLPLRGENKTLNGSNSYVFYFVSEVSKLLLLASFSLGQMDVSYFPVS

SEQ ID NO: 648 - protein, 390 aa, Homo sapiens
MISLPGPLVTNLLRFLFLGLSALAPPSRAQLQLHLPANRLQAVEGGEVVLPAWYTLHGEVSSSQPWEVPFVMWFFKQKEKEDQVLSYINGVTTSKPGVSLVYSMPSRNLSLRLEGLQEKDSGPYSCSVNVQDKQGKSRGHSIKTLELNVLVPPAPPSCRLQGVPHVGANVTLSCQSPRSKPAVQYQWDRQLPSFQTFFAPALDVIRGSLSLTNLSSSMAGVYVCKAHNEVGTAQCNVTLEVSTGPGAAVVAGAVVGTLVGLGLLAGLVLLYHRRGKALEEPANDIKEDAIAPRTLPWPKSSDTISKNGTLSSVTSARALRPPHGPPRPGALTPTPSLSSQALPSPRLPTTDGAHPQPISPIPGGVSSSGLSRMGAVPVMVPAQSQAGSLV

SEQ ID NO: 649 - protein, 44 aa, Homo sapiens
  SITE (11): Xaa equals any of the naturally occurring L-amino acids
  SITE (34): Xaa equals any of the naturally occurring L-amino acids
MVLHCIAWLQXGISFLFLFLCVIAIGATNFASPXFYKLVSSGVA

SEQ ID NO: 650 - protein, 89 aa, Homo sapiens
  SITE (12): Xaa equals any of the naturally occurring L-amino acids
  SITE (13): Xaa equals any of the naturally occurring L-amino acids
  SITE (72): Xaa equals any of the naturally occurring L-amino acids
MSGGLSFLLLVXXGTQSPLHLAGSCPGQTHLSFPLGQDRGQQLQQKQQDLEQEGLEATQGLLAGEWAPPLWXLGSLFQAFVKRESQAYA

SEQ ID NO: 651 - protein, 52 aa, Homo sapiens
MLYDSNLCSVWHLYLILHLCKTFVYCGCVHSSYLISGTVNTQYFIVQTVLLF

SEQ ID NO: 652 - protein, 66 aa, Homo sapiens
MLLISAVQVFILLSPSFYLILYLLRPGGTGRGLEPICPAAEWGGWRDGYLWLQYQEPTVSLDNWGN

SEQ ID NO: 653 - protein, 508 aa, Homo sapiens [sequence omitted]

SEQ ID NO: 654 - protein, 295 aa, Homo sapiens
MSWPHGALLFLWLFSPPLGAGGGGVAVTSAAGGGSPPATSCPVACSCSNQASRVICTRRDLAEVPASIPVNTRYLNLQENGIQVIRTDTFKHLRHLEILQLSKNLVRKIEVGAFNGLPSLNTLELFDNRLTTVPTQAFEYLSKLRELWLRNNPIESIPSYAFNRVPSLRRLDLGELKRLEYISEAAFEGLVNLRYLNLGMCNLKDIPNLTALVRLEELELSGNRLDLIRPGSFQGLTSLRKLWLMHAQVATIERNAFDDLKSLEELNLSHNNLMSLPHDLFTPLHRLEGGPGTQF

SEQ ID NO: 655 - protein, 56 aa, Homo sapiens
MCFTQFSRIFFLTSSLTLAACANHILAAYSSSLADRCVGEKSLIVIVPERSFQTHF

SEQ ID NO: 656 - protein, 44 aa, Homo sapiens
MRKTAWLCFFFQLCGLGQVTSLQYRNCNVEIKPSLVRGTHRSIP

SEQ ID NO: 657 - protein, 77 aa, Homo sapiens
  SITE (69): Xaa equals any of the naturally occurring L-amino acids
MTGQIPRLSKVNLFTLLSLWMELFPAEAQRQKSQKNEEGKHGPLGDNEERTRVSTDKRQDYWEQLRCLXERFTITAG

SEQ ID NO: 658 - protein, 108 aa, Homo sapiens
MKALCLLLLPVLGLLVSSKTLCSMEEAINERIQEVAGSLIFRAISSIGLECQSVTSRGDLATCPRGFAVTGCTCGSACGSWDVRAETTCHCQCAGMDWTGARCCRVQP

SEQ ID NO: 659 - protein, 44 aa, Homo sapiens
MRLRNGTVATALAFITSFLTLSWYTTWQNGKGKENDSENVHEMY

SEQ ID NO: 660 - protein, 327 aa, Homo sapiens [sequence omitted]

SEQ ID NO: 661 - protein, 80 aa, Homo sapiens
  SITE (34): Xaa equals any of the naturally occurring L-amino acids
MNVTSVILVLILWNVIGVATWVHQNTFLYKRQMXELKRLKDRVFCFFVLIWLLGIKIRPRSLKISNRGRPLIDLKSVNSL

SEQ ID NO: 662 - protein, 112 aa, Homo sapiens
  SITE (41): Xaa equals any of the naturally occurring L-amino acids
  SITE (109): Xaa equals any of the naturally occurring L-amino acids
MAALLLLPWLMLLTGRVSLAQFALAFVTDTCVAGALLCGAXLLFHGMLLLRGQTTWEWARGQHSYDLGPCHNLQAALGPRWALVWLWPFLASPLPGDGITFQTTADVGXTAS

SEQ ID NO: 663 - protein, 91 aa, Homo sapiens
MGDKLGMARAPSVALAQLWLICLCPESLASFVQAVPWKVLQPSSNRSTDCSPHMRPTCETLGSRKAQDLVLDTMCLSTDDCQGLICRGHRS

SEQ ID NO: 664 - protein, 223 aa, Homo sapiens
AWYLLRVQVLQLVAAYLSLPSNNLSHSLWEQLCAQGWQTPEIALIDSHKLLRSIILLLMGSDILSTQKAAVETSFLDYGENLVQKWQVLSEVLSCSEKLVCHLGRLGSVSEAKAFCLEALKLTTKLQIPRQCALFLVLKGELELARNDIDLCQSDLQQVLFLLESCTEFGGVTQHLDSVKKVHLQKGKQQAQVPCPPQLPEEELFLRGPALELVPLWPRSLAP

SEQ ID NO: 665 - protein, 47 aa, Homo sapiens
MGVLLLFSFFFPNGSFSPVVLPSYFPNSSSYFVFCTSFWRPLSFQKG

SEQ ID NO: 666 - protein, 243 aa, Homo sapiens
MGTLPWLLAFFILGLQAWDTPTIVSRKEWGARPLACRALLTLPVAYIITDQLPGMQCQQQSVCSQMLRGLQSHSVYTIGWCDVAYNFLVGDDGRVYEGVGWNIQGLHTQGYNNISLGIAFFGNKISSSPSPAALSAAEGLISYAIQKGHLSPRYIQPLLLKEETCLDPQHPVMPRKVCPNIIKRSAWEARETHCPKMNLPAKYVIIIHTAGTSCTVSTDCQTVVRNIQSFHMDTRNFCDIGYQ

SEQ ID NO: 667 - protein, 80 aa, Homo sapiens
MKLSGMFLLLSLALFCFLTGVFSQGGQVDCGEFQDTKVYCTRESNPHCGSDGQTYGNKCAFCKAIVKSGGKISLKHPGKC

SEQ ID NO: 668 - protein, 301 aa, Homo sapiens
MARHGLPLLPLLSLLVGAWLKLGNGQATSMVQLQGGRFLMGTNSPDSRDGEGPVREATVKPFAIDIFPVTNKDFRDFVREKKYRTEAEMFGWSFVFEDFVSDELRNKATQPMKSVLWWLPVEKAFWRQPAGPGSGIRERLEHPVLHVSWNDARAYCAWRGKRLPTEEEWEFAARGGLKGQVYPWGNWFQPNRTNLWQGKFPKGDKAEDGFHGVSPVNAFPAQNNYGLYDLLGNVWEWTASPYQAAEQDMRVLRGASWIDTADGSANHRARVTTRMGNTPDSASDNLGFRCAADAGRPPGEL

SEQ ID NO: 669 - protein, 44 aa, Homo sapiens
MASGSWTSAPGIGVILVMTVCLSHCYTHEWGLWGGGGTQGLTDS

SEQ ID NO: 670 - protein, 438 aa, Homo sapiens
MPCTCTWRNWRQWIRPLVAVIYLVSIVVAVPLCVWELQKLEVGIHTKAWFIAGIFLLLTIPISLWVILQHLVHYTQPELQKPIIRILWMVPIYSLDSWIALKYPGIAIYVDTCRECYEAYVIYNFMGFLTNYLTNRYPNLVLILEAKDQQKHFPPLCCCPPWAMGEVLLFRCKLGVLQYTVVRPFTTIVALICELLGIYDEGNFSFSNAWTYLVIINNMSQLFAMYCLLLFYKVLKEELSPIQPVGKFLCVKLVVFVSFWQAVVIALLVKVGVISEKHTWEWQTVEAVATGLQDFIICIEMFLAAIAHHYTFSYKPYVQEAEEGSCFDSFLAMWDVSDIRDDISEQVRHVGRTVRGHPRKKLFPEDQDQNEHTSLLSSSSQDAISIASSMPPSPMGHYQGFGHTVTPQTTPTTAKISDEILSDTIGEKKEPSDKSVDS

SEQ ID NO: 671 - protein, 107 aa, Homo sapiens
MVRYTYSMLSVIGISYAVLTWLSQTLWMPIYPLCVLAEAFAIYQSLPYFESFGTYSTKLPFDLSIYFPYVLKIYLMMLFIGMYFTYSHLYSERRDILGIFPIKKKKM

SEQ ID NO: 672 - protein, 234 aa, Homo sapiens
MRIRFTSPHPKDFPDEVLQLIHERDNICKQIHLPAQSGSSRVLEAMRRGYSREAYVELVHHIRESIPGVSLSSDFIAGFCGETEEDHVQTVSLLREVQYNMGFLFAYSMRQKTRAYHRLKDDVPEEVKLRRLEELITIFREEATKANQTSVGCTQLVLVEGLSKRSATDLCGRNDGNLKVIFPDAEMEDVNNPGLRVRAQPGDYVLVKITSASSQTLRGHVLCRTTLRDSSAYC

SEQ ID NO: 673 - protein, 470 aa, Homo sapiens
MWFTYLLLYLHSVRAYSSRGAGLLLLLGQVADGLCTPLVGYEADRAASCCARYGPRKAWHLVGTVCVLLSFPFIFSPCLGCGAATPEWAALLYYGPFIVIFQFGWASTQISHLSLIPELVTNDHEKVELTALRYAFTVVANITVYGAAWLLLHLQGSSRVEPTQDISISDQLGGQDVPVFRNLSLLVVGVGAVFSLLFHLGTRERRRPHAEEPGEHTPLLAPATAQPLLLWKHWLREPAFYQVGILYMTTRLIVNLSQTYMAMYLTYSLHLPKKFIATIPLVMYLSGFLSSFLMKPINKCIGRNMTYFSGLLVILAFAAWVALAEGLGVAVYAAAVLLGAGCATILVTSLAMTADLIGPHTNSGAFVYGSMSFLDKVANGLAVMAIQSLHPCPSELCCRACVSFYHWAMVAVTGGVGVAAALCLCSLLLWPTRLRRSRGGEHRTPSEGEGISTAPPPCWNETQPQGGAKL

SEQ ID NO: 674 - protein, 260 aa, Homo sapiens
MAGSPLLWGPRAGGVGLLVLLLLGLFRPPPALCARPVKEPRGLSAASPPLAETGAPRRFRRSVPRGEAAGAVQDLARALAHLLEAERQERARAEAQEAEDQQARVLAQLLRVWGAPRNSDPALGLDDDPDAPAAQLARALLRARLDPAALAAQLVPAPVPAAALRPRPPVYDDGPAGPDAEEAGDETPDVDPELLRYLLGRILAGSADSEGVAAPRRLRRAADHDVGSELPPEGVLGALLRVKRLETPAPQVPARRLLPP

SEQ ID NO: 675 - protein, 95 aa, Homo sapiens
MHLCICAVWVLVALLRMHGASPAQTSGTRSGNGGCRRHGAGQGRGAATQPLRPPRGTASGQLMALLSALLPRLSGSSTPMMAHGRPAPPQWSRVS

SEQ ID NO: 676 - protein, 130 aa, Homo sapiens
METLGALLVLEFLLLSPVEAQQATEHRLKPWLVGLAAVVGFLFIVYLVLLANRLWCSKARAEDEEETTFRMESNLYQDQSEDKREKKEAKEKEEKRKKEKKTAKEGESNLGLDLEEKEPGDHERAKSTVM

SEQ ID NO: 677 - protein, 80 aa, Homo sapiens
MSLIWRDVYLYGCGCICHGRCCAGFPQHSRHVWRTNAGLILPGNRVPFCELEGCTRRSSYWNHLVILGGHWGLHLPCTSL

SEQ ID NO: 678 - protein, 49 aa, Homo sapiens
MFPWCVCVIACISAVTPLIQGFTFCSFSYPQYSTVRYFERETTLTLLLL

SEQ ID NO: 679 - protein, 41 aa, Homo sapiens
MNLSFLSFFLFFYLLWSPAESVYKKGMVKKNLSHSIVEKIK

SEQ ID NO: 680 - protein, 50 aa, Homo sapiens [sequence omitted]

SEQ ID NO: 681 - protein, 318 aa, Homo sapiens
MAKRTFSNLETFLIFLLVMMSAITVALLSLLFITSGTIENHKDLGGHFFSTTQSPPATQGSTAAQRSTATQHSTATQSSTATQTSPVPLTPESPLFQNFSGYHIGVGRADCTGQVADINLMGYGKSGQNAQGILTRLYSRAFIMAEPDGSNRTVFVSIDIGMVSQRLRLEVLNRLQSKYGSLYRRDNVILSGTHTHSGPAGYFQYTVFVIASEGFSNQTFQHMVTGILKSIDIPHTNMKPGKIFINKGNVDGVQINRSPYSYLQNPQSERARYSSNTDKEMIVLKMVDLNGDDLGLISFSFSKSALGTYYEPRNTSLE

SEQ ID NO: 682 - protein, 55 aa, Homo sapiens
MPGGRDGLLYLYHGYSALLLWPVAFLHLLFLILLGMCFACCIPTSSAPLHTPWLA

SEQ ID NO: 683 - protein, 113 aa, Homo sapiens
  SITE (38): Xaa equals any of the naturally occurring L-amino acids
MRPLLLGGYWVLCLSVLGHAALYHFWLREEGKGPPQVXSVLALALPAGSCAPGLPFPGPLIPTQLLFALEWGTPTPLRDHPPHSMHSAPQNPPVFLGTHTCPPSWYFRLIPQA

SEQ ID NO: 684 - protein, 87 aa, Homo sapiens
MDLTVEGFQSWMWRGLTFLLPFLFFGHFWQLFNALTLFNLAQDPQCKEWQVLMCGFPFLLLFLGNFFTTLRVVHHKFHSQRHGSKKD

SEQ ID NO: 685 - protein, 161 aa, Homo sapiens
MALSLTLCFVMFWTPNVSEKILIDIIGVDFAFAELCVVPLRIFSFFPVPVTVRAHLTGWLMTLKKTFVLAPSSVLRIIVLIASLVVLPYLGVHGATLGVGSLLAGFVGESTMVAIAACYVYRKQKKKMENESATEGEDSAMTDMPPTEEVTDIVEMREENE

SEQ ID NO: 686 - protein, 348 aa, Homo sapiens
MNMTQARVLVAAVVGLVAVLLYASIHKIEEGHLAVYYRGGALLTSPSGPGYHIMLPFITTFRSVQTTLQTDEVKNVPCGTSGGVMIYIDRIEVVNMLAPYAVFDIVRNYTADYDKTLIFNKIHHELNQFCSAHTLQEVYIELFDQIDENLKQALQKDLNLMAPGLTIQAVRVTKPKIPEAIRRNFELMEAEKTKLLIAAQKQKVVEKEAETERKKAVIEAEKIAQVAKIRFQQKVMEKETEKRISEIEDAAFLAREKAKADAEYYAAHKYATSNKHKLTPEYLELKKYQAIASNSKIYFGSNIPNMFVDSSCALKYSDIRTGRESSLPSKEALEPSGENVIQNKESTG

SEQ ID NO: 687 - protein, 151 aa, Homo sapiens
MRRLLLVTSLVVVLLWEAGAVPAPKVPIKMQVKHWPSEQDPEKAWGARVVEPPEKDDQLVVLFPVQKPKLLTTEEKPRGQGRGPILPGTKAWMETEDTLGRVLSPEPDHDSLYHPPPEEDQGEERPRLWVMPNHQVLLGPEEDQDHIYHPQ

SEQ ID NO: 688 - protein, 41 aa, Homo sapiens
MQVACVMKVSAQWVCFFVVFSPLCSSVKCASSGQNRGRGDQ

SEQ ID NO: 689 - protein, 44 aa, Homo sapiens
MPLCGLYCLRILMFPLRSANSVPLQCLPPSSLANKDSHFRAPRK

SEQ ID NO: 690 - protein, 116 aa, Homo sapiens
MTPLLTLILVVLMGLPLAQALDCHVCAYNGDNCFNPMRCPAMVAYCMTTRTYYTPTRMKVSKSCVPRCFETVYDGYSKHASTTSCCQYDLCNGTGLATPATLALAPILLATLWGLL

SEQ ID NO: 691 - protein, 50 aa, Homo sapiens
MPGILAGIPVKDLCLSLLQGFRLLLLCVCPGWLSGWMGGQKGSPRIVDIG

SEQ ID NO: 692 - protein, 206 aa, Homo sapiens
  SITE (143): Xaa equals any of the naturally occurring L-amino acids
MASHGLCPCLLMGTGWGLWTLLPDLEVMAGKGRMPFAGISVTSGFLRSLKRAPLPHTGSPDPRPSGIWSGVRTTSEEAGATSTQISTAAPRFHSRRKGPKRNLAPQLRVLVHRTVPPGQLVYAPQTVDSLRGTLLRPPAWLLXQVPCFYSGQPLLVSASVLCRDLMQFLFLLKSYLLPFLEVCRIGWEQIQRILGAGLWRQKEGNG

SEQ ID NO: 693 - protein, 107 aa, Homo sapiens
  SITE (7): Xaa equals any of the naturally occurring L-amino acids
  SITE (9): Xaa equals any of the naturally occurring L-amino acids
  SITE (13): Xaa equals any of the naturally occurring L-amino acids
  SITE (95): Xaa equals any of the naturally occurring L-amino acids
MAVVLSXKXHRGXYCGRTSLLLSLLSCLLLLLLLLLLLLWSLSEIKTLKLICILSARDADGSRAKSHGFQIRYSAHSFQGHRFLKGPGFEEMANXEPSENLIWKTCM

SEQ ID NO: 694 - protein, 55 aa, Homo sapiens
MLPSNWSGTWALIQLSIPFTLAFHQPNKNQLTQKKRKAPQGSFDPDIYIDAIGVP

SEQ ID NO: 695 - protein, 75 aa, Homo sapiens [sequence omitted]

SEQ ID NO: 696 - protein, 97 aa, Homo sapiens [sequence omitted]

SEQ ID NO: 697 - protein, 187 aa, Homo sapiens
  SITE (167): Xaa equals any of the naturally occurring L-amino acids
MGFFLVLVMEQITLAYKEQSGPSPLEETRALLGTVNGGPQHWHDGPGVPQASGAPATPSALRACVLVFSLALHSVFEGLAVGLQRDRARAMELCLALLLHKGILAVSLSLRLLQSHLRAQVVAGCGILFSCMTPLGIGLGAALAESAGPLHQLAQSVLEGMAAGTFXYITFLEILLFHPKFKGVSRR

SEQ ID NO: 698 - protein, 113 aa, Homo sapiens
MILSLLFSLGGPLGWGLLGAWAQASSTSLSDLQSSRTPGVWKAEAEDTSKDPVGRNWCPYPMSKLVTLLALCKTEKFLIHSQQPCPQELQTARKSKSCTAWPTSQCTRSSRRC

SEQ ID NO: 699 - protein, 140 aa, Homo sapiens
  SITE (36): Xaa equals any of the naturally occurring L-amino acids
MFLFGGFLMTLFGLFVSLVFLGQAFTIMLVYVWSRXNPYVRMNFFGLLNFQAPFLPWVLMGFSLLLGNSIIVDLLGIAVGHIYFFLEDVFPNQPGGIRILKTPSILKAIFDTPDEDPNYNPLPEERPGGFAWGEGQRLGG

SEQ ID NO: 700 - protein, 278 aa, Homo sapiens
MQWLRVRESPGEATGHRVTMGTAALGPVWAALLLFLLMCEIPMVELTFDRAVASDCQRCCDSEDPLDPAHVSSASSSGRPHALPEIRPYINITILKGDKGDPGPMGLPGYMGREGPQGEPGPQGSKGDKGEMGSPGAPCQKRFFAFSVGRKTALHSGEDFQTLLFERVFVNLDGCFDMATGQFAAPLRGIYFFSLNVHSWNYKETYVHIMHNQKEAVILYAQPSERSIMQSQSVMLDLAYGDRVWVRLFKRQRENAIYSNDFDTYITFSGHLIKAEDD

SEQ ID NO: 701 - protein, 354 aa, Homo sapiens
MWRLWPGSPLVPLSWLWPARAAFLSGPWTLPPCLPDPLLAVPKCCLTLGIHLLPAWPGPPVGGGCSQLHRGCCYPGMGCLNRDLCPPSLVSRRWGDQLLWSPDGSKILATTPSAVFRVWEAQMWTCERWPTLSGRCQTGCWSPDGSRLLFTVLGEPLIYSLSFPERCGEGKGCVGGAKSATIVADLSETTIQTPDGEERLGGEAHSMVWDPSGERLAVLMKGKPRVQDGKPVILLFRTRNSPVFELLPCGIIQGEPGAQPQLITFHLPSTKGPCSVWAGPQAELPTSRCTLSMPSFHVLAQCLGGPRNPLLGVEALFMTCPSLLRHPQPLPLGTLSQGHHLFCPTPHIPTSKNK

SEQ ID NO: 702 - protein, 60 aa, Homo sapiens
MIRIQFLHLFLWVGFIFRQPPSSYPQDGRDSPWSFPCRDRSPGNNTSIPSHETVLNFILT

SEQ ID NO: 703 - protein, 232 aa, Homo sapiens
  SITE (36): Xaa equals any of the naturally occurring L-amino acids
  SITE (67): Xaa equals any of the naturally occurring L-amino acids
  SITE (70): Xaa equals any of the naturally occurring L-amino acids
  SITE (71): Xaa equals any of the naturally occurring L-amino acids
  SITE (82): Xaa equals any of the naturally occurring L-amino acids
  SITE (92): Xaa equals any of the naturally occurring L-amino acids
MAISIPNRIFPITALTLLALVYSLVLLLPFYNCTEXTKYRRFPDWLDHWMLCRKQLGLVALGFAFLXVLXXLVIPIRYYVRXRLGNLTVTQXILKKENPFSTSSAWLSDSYVALGILGFFLFVLLGITSLPSVSNAVNWREFRFVQSKLGYLTLILCTAHTLVYGGKRFLSPSNLRWYLPAAYVLGLIIPCTVLVIKFVLIMPCVDNTLTRIRRAGKGTQNTRKSIEWKINI

SEQ ID NO: 704 - protein, 46 aa, Homo sapiens
MTLSLQLAELVHFVCAFQSQWTGVYPMMPPLKPTEPLCFACVPCRV

SEQ ID NO: 705 - protein, 152 aa, Homo sapiens
  SITE (66): Xaa equals any of the naturally occurring L-amino acids
  SITE (77): Xaa equals any of the naturally occurring L-amino acids
  SITE (81): Xaa equals any of the naturally occurring L-amino acids
  SITE (84): Xaa equals any of the naturally occurring L-amino acids
  SITE (86): Xaa equals any of the naturally occurring L-amino acids
  SITE (87): Xaa equals any of the naturally occurring L-amino acids
  SITE (93): Xaa equals any of the naturally occurring L-amino acids
  SITE (103): Xaa equals any of the naturally occurring L-amino acids
  SITE (110): Xaa equals any of the naturally occurring L-amino acids
MDHSPTTGVVTVIVILIAIAALGAFDPGLLVLPAAAAHQPVRGRGEHRGGWGDQGTLPAGAVFGQXTVRGEKGQADXSQTXRKXTXXPGCKGXLVPVCKPAKXGLGGAKXIRMRCCLRGRADTCWHGLCGFRPSHALMPGDLAVLGFPSASR

SEQ ID NO: 706 - protein, 88 aa, Homo sapiens
MVAGFVFYLGVFVVCHQLSSSLNATYRSLVAREKVFWDLAATRAVFGVQSTAAAVGSAGGPCAACRQGAWPAELVLVSHHDSNGILLL

SEQ ID NO: 707 - protein, 340 aa, Homo sapiens
MALRLLRRAARGAAAAALLRLKASLAADIPRLGYSSSSHHKYIPRRAVLYVPGNDEKKIKKIPSLNVDCAVLDCEDGVAANKKNEARLRIVKTLEDIDLGPTEKCVRVNSVSSGLAEEDLETLLQSRVLPSSLMLPKVESPEEIQWFADKFSFHLKGRKLEQPMNLIPFVETAMGLLNFKAVCEETLKVGPQVGLFLDAVVFGGEDFRASIGATSSKETLDILYARQKIVVIAKAFGLQAVDLVYIDFRDGAGLLRQSREGAAMGFTGKQVIHPNQIAVVQEQFSPSPEKIKWAEELIAAFKEHQQLGKGAFTFQGSMIDMPLLKQAQNTVTLATSIKEK

SEQ ID NO: 708 - protein, 64 aa, Homo sapiens
MVRHIRERRRQPLAFQRVLLSLCLLEGIWHSPAAAAGGGSHCSSWPSLYTTFQRVSLLELDLGL

SEQ ID NO: 709 - protein, 44 aa, Homo sapiens
  SITE (16): Xaa equals any of the naturally occurring L-amino acids
MCLPLLHCTGALWGKXVLLFLYCLAQSFAYSRHQTVGLVVHDYW

SEQ ID NO: 710 - protein, 20 aa, Homo sapiens
MACCNPYKYYFYLSCSVCFL

SEQ ID NO: 711 - protein, 88 aa, Homo sapiens
  SITE (71): Xaa equals any of the naturally occurring L-amino acids
MSGSSLPRALALSLLLVSGSLLPGPGAAQNVKSTIWTGSEVENEVVKRKGKDRRKAAVVQGEKQDARLKEXNLCLRSIPENYKLFRKG

SEQ ID NO: 712 - protein, 221 aa, Homo sapiens
  SITE (184): Xaa equals any of the naturally occurring L-amino acids
MAGGVRPLRGLRALCRVLLFLSQFCILSGGESTEIPPYVMKCPSNGLCSRLPADCIDCTTNFSCTYGKPVTFDCAVKPSVTCVDQDFKSQKNFIINMTCRFCWQLPETDYECTNSTSCMTVSCPRQRYPANCTVRDHVHCLGNRTFPKMLYCNWTGGYKWSTALALSITLGGFGADRFYLGQWXEGLGKLFSFGGLGIWTLIDVLLIGVGYVGPADGSLYI

SEQ ID NO: 713 - protein, 39 aa, Homo sapiens
MWLTQPESLSLCVSVSQDWAHILALSITMLWDFREFPHL

SEQ ID NO: 714 - protein, 62 aa, Homo sapiens [sequence omitted]

SEQ ID NO: 715 - protein, 64 aa, Homo sapiens
MVSPLISALFHVPFLWLGMFFPHSLSGPFPSHLRRASSSRKPLVKPPRARQYPPLASSGYRGRI

SEQ ID NO: 716 - protein, 62 aa, Homo sapiens
MKNSTSLLYKLFSSLSVFIFKFLLLFYTLHIALGVKIQYKPLAHFIDHSCIQQVSQVQWSIP

SEQ ID NO: 717 - protein, 92 aa, Homo sapiens [sequence omitted]

SEQ ID NO: 718 - protein, 45 aa, Homo sapiens
  SITE (43): Xaa equals any of the naturally occurring L-amino acids
MSDKLSPSTVPLLLPVLFKVTILLQRVCPEDSPSSSVLPESVXRE

SEQ ID NO: 719 - protein, 103 aa, Homo sapiens
MAFLLERSGTLLICSMWWHHGYSNITGTEGERRNLKRNKTNFRRFQDGRIGTAPVYSSQCERCRRWVISAFPTEQTAHQKIISHAWLGGSHAHGASLIASTAV

SEQ ID NO: 720 - protein, 73 aa, Homo sapiens
MHAYACVCACMLVCVCVCVCRALVIPTEQRHRRVAHGRTSDSTLPCTVKIWPSERGDGRGERGERRRGTDWRG

SEQ ID NO: 721 - protein, 221 aa, Homo sapiens
  SITE (51): Xaa equals any of the naturally occurring L-amino acids
MALALAALAAVEPACGSRYQQLQNEEESGEPEQAAGDAPPPYSSISAESAXYFDYKDESGFPKPPSYNVATTLPSYDEAERTKAEATIPLVPGRDEDFVGRDDFDDADQLRIGNDGIFMLTFFMAFLFNWIGFFLSFCLTTSAAGRYGAISGFGLSLIKWILIVRFSTYFPGYFDGQYWLWWVFLVLGFLLFLRGFINYAKVRKMPETFSNLPRTRVLFIY

SEQ ID NO: 722 - protein, 139 aa, Homo sapiens
MALGIQKRFSPEVLGLCASTALVWVVMEVLALLLGLYLATVRSDLSTFHLLAYSGYKYVGMILSVLTGLLFGSDGYYVALAWTSSALMYFIVRSLRTAALGPDSMGGPVPRQRLQLYLTLGAAAFQPLIIYWLTFHLVR

SEQ ID NO: 723 - protein, 42 aa, Homo sapiens
MRKEEGIAHLSIAFFVQVLCLYQLLPVILPQFNLGSGKNMNR

SEQ ID NO: 724 - protein, 121 aa, Homo sapiens
  SITE (30): Xaa equals any of the naturally occurring L-amino acids
  SITE (32): Xaa equals any of the naturally occurring L-amino acids
  SITE (87): Xaa equals any of the naturally occurring L-amino acids
  SITE (101): Xaa equals any of the naturally occurring L-amino acids
  SITE (115): Xaa equals any of the naturally occurring L-amino acids
MCSHSTLIHLYLVLPFFFLFLPSSFPFPSXSXSSILPSLRLPPFFPPSLFLHSSLPPSLSHPLGLSITSSRQSFLDYHHLCTKHLSXTLCGLIYHCLNIFXTRAVMWHMQVSFLXIHWLLP

SEQ ID NO: 725 - protein, 490 aa, Homo sapiens
MRPAFALCLLWQALWPGPGGGEHPTADRAGCSASGACYSLHHATMKRQAAEEACILRGGALSTVRAGAELRAVLALLRAGPGPGGGSKDLLFWVALERRRSHCTLENEPLRGFSWLSSDPGGLESDTLQWVEEPQRSCTARRCAVLQATGGVEPAGWKEMRCHLRANGYLCKYQFEVLCPAPRPGAASNLSYRAPFQLHSAALDFSPPGTEVSALCRGQLPISVTCIADEIGARWDKLSGDVLCPCPGRYLRAGKCAELPNCLDDLGGFACECATGFELGKDGRSCVTSGEGQPTLGGTGVPTRRPPATATSPVPQRTWPIRVDEKLGETPLVPEQDNSVTSIPEIPRWGSQSTMSTLQMSLQAESKATITPSGSVISKFNSTTSSATPQAFDSSSAVVFIFVSTAVVVLVILTMTVLGLVKLCFHESPSSQPRKESMGPPGLESDPEPAALGSSSAHCTNNGVKVGDCDLRDRAEGALLAESPLGSSDA

SEQ ID NO: 726 - protein, 105 aa, Homo sapiens
MTHRRHCGLARWILMKIFCWRVSTVTSTAGALTNPHSCYTSVLKVGATGVGQSLSVWTMPGLLLEQFSTGVELLLSSSRFSNSMEYKNRLSSVEDRSSVVTCLKA

SEQ ID NO: 727 - protein, 57 aa, Homo sapiens [sequence omitted]

SEQ ID NO: 728 - protein, 71 aa, Homo sapiens
MRIHFKILVLVIYFILLGSFSDRCSLLDCKSRIQRIFICNILNLSLVSCHLCRYSFDCLTRGKCFPLSFPA

SEQ ID NO: 729 - protein, 68 aa, Homo sapiens [sequence omitted]

SEQ ID NO: 730 - protein, 233 aa, Homo sapiens
  SITE (173): Xaa equals any of the naturally occurring L-amino acids
MHRGKLDCAGGALLSSYLIVLMILLAVVICTVSAIMCVSMRGTICNPGPRKSMSKLLYIRLALFFPEMVWASLGAAWVADGVQCDRTVVNGIIATVVVSWIIIAATVVSIIIVFDPLGGKMAPYSSAGPSHLDSHDSSQLLNGLKTAATSVWETRIKLLCCCIGKDDHTRVAXSSTAELFSTYFSDTDLVPSDIAAGLALLHQQQDNIRNNQDLPRWSAMPQGAPRKLIWMQN

SEQ ID NO: 731 - protein, 66 aa, Homo sapiens [sequence omitted]

SEQ ID NO: 732 - protein, 40 aa, Homo sapiens
MSVYVNIMHIVIYIYLCVYMCVAQSHTHTQICIQMLPGLQ

SEQ ID NO: 733 - protein, 249 aa, Homo sapiens
  SITE (147): Xaa equals any of the naturally occurring L-amino acids
  SITE (150): Xaa equals any of the naturally occurring L-amino acids
  SITE (196): Xaa equals any of the naturally occurring L-amino acids
  SITE (222): Xaa equals any of the naturally occurring L-amino acids
MVCVFMCIVGVCVACCACVYCGCLLSRAVERTSGKQPQHQGQARSAECMEAGQVGAWDEGSTEMQGCQGPWNQEPMIKATVHTALEAKDIFISQGLKSMGQGWAPGQDWGYRVDQSPSLPPGAYPHPFTSQVSPPQPLGELLLIPQXVAXVTLLPEASPHPLKHPLPAAHLQHSQRAPWPVSTGLSLLGGAGAEQXPGLGVPAPRSTPSPTASLFNLRQAVXLLSLTFPLCKMREGTAPSKPSFSLKPL

SEQ ID NO: 734 - protein, 127 aa, Homo sapiens
MQGSDAGHGGTHIYRALVQWPLAWVFYLSHAKTHWGEELRFSFRRKNLRLREAMRHETCQVTQLVAGKADSNLCLRDSETWFWPPLWAACSSLQATACRLSSPSKGLGASRECPWLASGRAALVSFL

SEQ ID NO: 735 - protein, 82 aa, Homo sapiens
  SITE (51): Xaa equals any of the naturally occurring L-amino acids
MLIALFCILFQILFSIPTRIFYIFLINKRVHIFTTYLMSEQKNHDWVRRTXKLHRVWLISGKMLLVADIKALIRWLWGPNPE

SEQ ID NO: 736 - protein, 90 aa, Homo sapiens
  SITE (29): Xaa equals any of the naturally occurring L-amino acids
  SITE (30): Xaa equals any of the naturally occurring L-amino acids
  SITE (65): Xaa equals any of the naturally occurring L-amino acids
MLRCSFSSFLLCHTILLFLGSSAHLLVEXXVWGLYEYRIGDMVDQKATFCVQKQECLFPLGSWVXRVEGGAFAREPPSSTQYFPVSCLYQ

SEQ ID NO: 737 - protein, 36 aa, Homo sapiens
MGCTALLLLFHLCVPCEPYGTHEKELVPGLYFLVYR

SEQ ID NO: 738 - protein, 46 aa, Homo sapiens
MCIPEALGKNSLFLSSTFLWLLAFFGLWSHHSYLEGQHLQICFFFT

SEQ ID NO: 739 - protein, 34 aa, Homo sapiens
  SITE (27): Xaa equals any of the naturally occurring L-amino acids
MSVFLLITLALAILYIIRSIVFSLALXQNGSLQG

SEQ ID NO: 740 - protein, 82 aa, Homo sapiens
MAISCWASLTVKSLYCLLGFWWEAVISSNELPLPWICQEADGNLANSGRYQAPSSAPVTLFYTCGSTTVCSEGQSLPLLCFS

SEQ ID NO: 741 - protein, 57 aa, Homo sapiens
MPPHRQTDGQMGLPAPALWVWGLLLSSSFQTLLPAFPKPPALNLGCSTRPIPSFLKI

SEQ ID NO: 742 - protein, 55 aa, Homo sapiens
MPRWLSLLALTSLTGILSGTLGFSPHGWSSPRRHLSPRPECPAASQTTCKSLGQH

SEQ ID NO: 743 - protein, 59 aa, Homo sapiens
MTPSLLSEKLCSLFFVLLGIASAAFVSALWAWSSHTERLTAEPSSSITCLSPPWFFFPF

SEQ ID NO: 744 - protein, 54 aa, Homo sapiens
MWPFLHLLNMPFTLTQVVASPSSCSNWKPQHPEMPPPQIHCTHVCLCMRVCARV

SEQ ID NO: 745 - protein, 81 aa, Homo sapiens
  SITE (44): Xaa equals any of the naturally occurring L-amino acids
MRMRVAVAPRPHQHLVVSVSWILAILISVSGYHCFHLQFSYMVXNIFPHVYLSSAYLLRPVICSDLLPVFVCLHVCLCLIF

SEQ ID NO: 746 - protein, 80 aa, Homo sapiens
MCVVCVCVWCMCVCGVCVCLCVCGVCMCISLNEKLAPMIMELTTPKVCRQQAGGPGGPVVWLQPVSEGLRTRRAGGAAAV

SEQ ID NO: 747 - protein, 180 aa, Homo sapiens
MYSCLLLPDLLYLTLSPLVVAMLLTPHFNVANPQNLLAGLWLENEHSFTLMAPERARTHHCQPEERKVLFCLFPIVPNSQAQVQPPQMPPFCCAAAKEKTQEEQLQEPLGSQCPDTCPNSLCPSHTQLTKANTLSLFFFFSFFLSRVSLLSPRLECNGRILAHCNLHLPGSSNSPVSASR

SEQ ID NO: 748 - protein, 53 aa, Homo sapiens
MSTFVCVCVFCFVLRSEARAKRKQDQRNTKRCLLTKGQRDLSVNQSKINRTAN

SEQ ID NO: 749 - protein, 80 aa, Homo sapiens
MALWVTCILSLCTWFSCLYGADSLANKCLSAGATRKAFPFCVLFRDLEVGLGFEGFVTHLACKLFCYCELSDSALSLGHE

SEQ ID NO: 750 - protein, 51 aa, Homo sapiens [sequence omitted]

SEQ ID NO: 751 - protein, 320 aa, Homo sapiens
MRGSVECTWGWGHCAPSPLLLWTLLLFAAPFGLLGEKTRQLLEFDSTNVSDTAAKPLGRPYPPYSLADFSWNNITDSLDPATLSATFQGHPMNDPTRTFANGSLAFRVQAFSRSSRPAQPPRLLHTADTCQLEVALIGASPRGNRSLFGLEVATLGQGPDCPSMQEQHSIDDEYAPAVFQLDQLLWGSLPSGFAQWRPVAYSQKPGGRESALPCQASPLHPALAYSLPQSPIVRAFFGSQNNFCAFNLTFGASTGPGYWDQHYLSWSMLLGVGFPPVDGLSPLVLGIMAVALGAPGLMLLGGGLVLLLHHKKYSEYQSIN

SEQ ID NO: 752 - protein, 115 aa, Homo sapiens
MLALSSSFLVLSYLLTRWCGSVGFILANCFNMGIRITQSLCFIHRYYRRAPTGPWLACTYRQSCSGHLPSVVGLLLFRRYSSAVSRAGQPDWHTLLWGPSVWEQLSGQHSSQRPS

SEQ ID NO: 753 - protein, 402 aa, Homo sapiens
MYSGNRSGGHGYWDGGGAAGAEGPAPAGTLSPAPLFSPGTYERLALLLGSIGLLGVGNNLLVLVLYYKFQRLRTPTHLLLVNISLSDLLVSLFGVTFTFVSCLRNGWVWDTVGCVWDGFSGSLFGIVSIATLTVLAYERYIRVVHARVINFSWAWRAITYIWLYSLAWAGAPLLGWNRYILDVHGLGCTVDWKSKDANDSSFVLFLFLGCLVVPLGVIAHCYGHILYSIRMLRCVEDLQTIQVIKILKYEKKLAKMCFLMIFTFLVCWMPYIVICFLVVNGHGHLVTPTISIVSYLFAKSNTVYNPVIYVFMIRKFRRSLLQLLCLRLLRCQRPAKDLPAAGSEMQIRPIVMSQKDGDRPKKKVTFNSSSIIFIITSDESLSVDDSDKTNGSKVDVIQVRPL

SEQ ID NO: 754 - protein, 76 aa, Homo sapiens [sequence omitted]

SEQ ID NO: 755 - protein, 41 aa, Homo sapiens
MAVPLFLYIFTLLPLLPFLLSLCFSPLTVKRSSSSESKSSL

SEQ ID NO: 756 - protein, 35 aa, Homo sapiens
IYSSGYFQIYNMLLLTILILLCNRTPELIPGFYIR

SEQ ID NO: 757 - protein, 159 aa, Homo sapiens [sequence omitted]

SEQ ID NO: 758 - protein, 59 aa, Homo sapiens
MLQQKTQFYSILWLCSIPWCVCTTFSLYSPPLMGTRVDFMSLNMCCNEKKHIFYKMIEV

SEQ ID NO: 759 - protein, 226 aa, Homo sapiens
METVVIVAIGVLATIFLASFAALVLVCRQRYCRPRDLLQRYDSKPIVDLIGAMETQSEPSELELDDVVITNPHIEAILENEDWIEDASGLMSHCIAILKICHTLTEKLVAMTMGSGAKMKTSASVSDIIVVAKRISPRVDDVVKSMYPPLDPKLLDARTTALLLSVSHLVLVTRNACHLTGGLDWIDQSLSAAEEHLEVLREAALASEPDKGLPGPEGFLQEQSAI

SEQ ID NO: 760 - protein, 484 aa, Homo sapiens
MPRHLSGLLLLLWPLLLLLPPTPAAPGPLARPGLRRLGTRGPGGSPGRRPVSAVPTRAPYSGAGQPGGARGAGVCRSRPLDLVFIIDSSRSVRPLEFTKVKTFVSQIIDTLDIGAADTRVAVVNYASTVKIEFHLQTHSDKQSLKQAVARITPLSTGTMSGLAIQTAMDEAFTVEAGARGPTSNIPKVAIIVTDGRPQDQVNEVAARARASGIELYAVGVDRADMESLKMMASEPLDEHVFYVETYGVIEKLSSRFQETFCALDPCVLGTHRCQHVCVSDGEGKHHCECSQGYSLNADQKTCSAIDKCALNTHGCEHICVNDRTGSYHCECYEGYTLNQDRKTCSAQDQCAFGTHGCQHICVNDRDGSHHCECYEGYTLNADNKTCSVRSECAGGSHGCQHLCVDDGPAAYHCDCFPGYTLTEDRRTCAAIEEARRLVSTEDACGCEATLAFQERASSYLQRLNAKLDDILGKLQADAYGQIHR

SEQ ID NO: 761 - protein, 410 aa, Homo sapiens
MQPPSLLLLVLGLLAAPAAALVRIPLHKFTSVRRTMSELGGPVEDLIARGPISKYAQGVPSVAGGPVPEVLRNYMDAQYYGEIGIGTPPQCFTVVFDTGSSNLWVPSIHCKLLDIACWIHHKYNSGKSSTYVKNGTSFDIHYGSGSLSGYLSQDTVSVPCKSGLSSLAGVKVERQTFGEATKQPGITFIAAKFDGILGMAYPRISVNNVLPVFDNLMQQKLVEKNIFSFYLNRDPGAQPGGELMLGGTDSKYYKGPLSYLNVTRKAYWQVHMEQVDVGSSLTLCKGGCEAIVDTGTSLIVGPVDEVRELQKAIGAVPLIQGEYMIPCEKVSTLPEVTLTLGGKPYKLSSEDYTLKVSQGGKSICLSGFMGMDIPPPGGPLWILGDVFIGRYYTVFDRDQNRVGLAEATRL

SEQ ID NO: 762 - protein, 82 aa, Homo sapiens
MLLLQSLFFPMSWGSGGGGKGRDDLPREKPTTCPVFDRLFDIFAKIPLVESQASCARIGIAASHWRLDCSVDGMQADCLSLI

SEQ ID NO: 763 - protein, 129 aa, Homo sapiens
MAPSGPLLLVLLVPLAAARAGPYFRPGRGCRLPLRGDQLSGLGRRTYPRPHEYLSPSDLPKSWDWRNVNGVNYASATRNQHIPQYCGSCWAHGSTSAMAGPDQHQEKGGVALHPAVRAARPRLRQRGLL

SEQ ID NO: 764 - protein, 55 aa, Homo sapiens
MREKTGALPRCLGLLGVGLLWRWCGRRARAGVGKAWSATRSPSDSCFPGVARVGI

SEQ ID NO: 765 - protein, 494 aa, Homo sapiens
MRPPGFRNFLLLASSLLFAGLSAVPQSFSPSLRSWPGAACRLSRAESERRCRAPGQPPGAALCHGRGRCDCGVCICHVTEPGMFFGPLCECHEWVCETYDGSTCAGHGKCDCGKCKCDQGWYGDACQYPTNCDLTKKKSNQMCKNSQDIICSNAGTCHCGRCKCDNSDGSGLVYGKFCECDDRECIDDETEEICGGHGKCYCGNCYCKAGWHGDKCEFQCDITPWESKRRCTSPDGKICSNRGTCVCGECTCHDVDPTGDWGDIHGDTCECDERDCRAVYDRYSDDFCSGHGQCNCGRCDCKAGWYGKKCEHPQSCTLSAEESIRKCQGSSDLPCSGRGKCECGKCTCYPPGDRRVYGKTCECDDRRCEDLDGVVCGGHGTCSCGRCVCERGWFGKLCQHPRKCNMTEEQSKNLCESADGILCSGKGSCHCGKCICSAEEWYISGEFCDCDDRDCDKHDGLICTGNGICSCGNCECWDGWNGNACEIWLGSEYP

SEQ ID NO: 766 - protein, 164 aa, Homo sapiens
MTTWSCLVAMIVSGVITAVWAVRAAPIWRSQVKQKMRIGKQGNCRPPRCICSALGLLAPWMAVVLSQLSVRCVVSWVQGKPSSPRPRGSAASPAPGATPPTPRKPVSWLGYRENHRPKKPKSCTRLPGLPKLEPSSTLKGQDSWQMGHQQDKTLWSWASTGGSS

SEQ ID NO: 767 - protein, 56 aa, Homo sapiens [sequence omitted]

SEQ ID NO: 768 - protein, 40 aa, Homo sapiens
MVAMVFLKISVLPLMCRGQTKHKVLRDHAYPRVSQKRGHI

SEQ ID NO: 769 - protein, 624 aa, Homo sapiens
MEIPGSLCKKVKLSNNAQNWGMQRATNVTYQAHHVSRNKRGQVVGTRGGFRGCTVWLTGLSGAGKTTVSMALEEYLVCHGIPCYTLDGDNIRQGLNKNLGFSPEDREENVRRIAEVAKLFADAGLVCITSFISPYTQDRNNARQIHEGASLPFFEVFVDAPLHVCEQRDVKGLYKKARAGEIKGFTGIDSEYEKPEAPELVLKTDSCDVNDCVQQVVELLQERDIVPVDASYEVKELYVPENKLHLAKTDAETLPALKINKVDMQWVQVLAEGWATPLNGFMREREYLQCLHFDCLLDGGVINLSVPIVLTATHEDKERLDGCTAFALMYEGRRVAILRNPEFFEHRKEERCARQWGTTCKNHPYIKMVMEQGDWLIGGDLQVLDRVYWNDGLDQYRLTPTELKQKFKDMNADAVFAFQLRNPVHNGHALLMQDTHKQLLERGYRRPVLLLHPLGGWTKDDDVPLMWRMKQHAAVLEEGVLNPETTVVAIFPSPMMYAGPTEVQWHCRARMVAGANFYIVGRDPAGMPHPETGKDLYEPSHGAKVLTMAPGLITLEIVPFRVAAYNKKKKRMDYYDSEHHEDFEFISGTRMRKLAREGQKPPEGFMAPKAWTVLTEYYKSLEKA

SEQ ID NO: 770 - protein, 131 aa, Homo sapiens [sequence omitted]

SEQ ID NO: 771 - protein, 41 aa, Homo sapiens
MCVCLICSICQFLWCKYSHYSCFQANIVIPQKMELGRHNQD

SEQ ID NO: 772 - protein, 79 aa, Homo sapiens [sequence omitted]

SEQ ID NO: 773 - protein, 211 aa, Homo sapiens
MVFLKFFCMSFFCHLCQGYFDGPLYPEMSNGTLHHYFVPDGDYEENDDPEKCQLLFRVSDHRRCSQGEGSQVGSLLSLTLREEFTVLGHQVEDAGRVLEGISKSISYDLDGEESYGKYLRRESHQIGDAYSNSDKSLTELESKFKQGQEQDSRQESRLNEDFLGMLVHTRSLLKETLDISVGLRDKYELLALTIRSHGTRLGRLKNDYLKV

SEQ ID NO: 774 - protein, 51 aa, Homo sapiens [sequence omitted]

SEQ ID NO: 775 - protein, 53 aa, Homo sapiens
  SITE (49): Xaa equals any of the naturally occurring L-amino acids
MSHHAGLGGGILFSLKISFFIALAVVGGSRGVNDCQLGGCRVGSCPRVXVRVA

SEQ ID NO: 776 - protein, 48 aa, Homo sapiens [sequence omitted]

SEQ ID NO: 777 - protein, 201 aa, Homo sapiens [sequence omitted]

SEQ ID NO: 778 - protein, 44 aa, Homo sapiens [sequence omitted]

SEQ ID NO: 779 - protein, 420 aa, Homo sapiens
MAPWPPKGLVPAVLWGLSLFLNLPGPIWLQPSPPPQSSPPPQPHPCHTCRGLVDSFNKGLERTIRDNFGGGNTAWEEENLSKYKDSETRLVEVLEGVCSKSDFECHRLLELSEELVESWWFHKQQEAPDLFQWLCSDSLKLCCPAGTFGPSCLPCPGGTERPCGGYGQCEGEGTRGGSGHCDCQAGYGGEACGQCGLGYFEAERNASHLVCSACFGPCARCSGPEESNCLQCKKGWALHHLKCVDIDECGTEGANCGADQFCVNTEGSYECRDCAKACLGCMGAGPGRCKKCSPGYQQVGSKCLDVDECETEVCPGENKQCENTEGGYRCICAEGYKQMEGICVKEQIPESAGFFSEMTEDELVVLQQMFFGIIICALATLAAKGDLVFTAIFIGAVAAMTGYWLSERSDRVLEGFIKGR

SEQ ID NO: 780 - protein, 387 aa, Homo sapiens
  SITE (228): Xaa equals any of the naturally occurring L-amino acids
  SITE (359): Xaa equals any of the naturally occurring L-amino acids
MGAFLDKPKTEKHNAHGAGNGLRYGLSSMQGWRVEMEDAHTAVVGIPHGLEDWSFFAVYDGHAGSRVANYCSTHLLEHITTNEDFRAAGKSGSALELSVENVKNGIRTGFLKIDEYMRNFSDLRNGMDRSGSTAVGVMISPKHIYFINCGDSRAVLYRNGQVCFSTQDHKPCNPREKERIQNAGGSVMIQRVNGSLAVSRALGDYDYKCVDGKGPTEQLVSPEPEVYXILRAEEDEFIILACDGIWDVMSNEELCEYVKSRLEVSDDLENVCNWVVDTCLHKGSRDNMSIVLVCFSNAPKVSDEAVKKDSELDKHLESRVEEIMEKSGEEGMPDLAHVMRILSAENIPNLPPGGGLAGXRNVIEAVYSRLNPHRESDGGAGDLEDPW

SEQ ID NO: 781 - protein, 49 aa, Homo sapiens
MGVGVLRILLSCLGEAAPKSAGTSLESAKECWSAATLLVLCVLCQLQHG

SEQ ID NO: 782 - protein, 47 aa, Homo sapiens
MINEWCFKLLSLWSFAYSNCKLIHKCKFVFLKKKKTGKEVSVKGSKL

SEQ ID NO: 783 - protein, 159 aa, Homo sapiens
MLLLLIFWIAPAHGPTNIMVYISICSLLGSFTVPSTKGIGLAAQDILHNNPSSQRALCLCLVLLAVLGCSIIVQFRYINKALECFDSSVFGAIYYVVFTTLVLLASAILFREWSNVGLVDFLGMACGFTTVSVGIVLIQVFKEFNFNLGEMNKSNMKTD

SEQ ID NO: 784 - protein, 102 aa, Homo sapiens
MTVRRLSLLCRDLWALWLLLKAGAVRGARAGPRLPGRCCGATCGDAGRGWTFWAQPCPQRLLGQKPGAGGCRGWVLGWVPPRPEEPCSLAGKVCTGLARWMV

SEQ ID NO: 785 - protein, 53 aa, Homo sapiens
  SITE (11): Xaa equals any of the naturally occurring L-amino acids
MCKAVCKHRLXLFAVSSFSLGLGWVCVLVLMLWPVRLSLAPRPVQLQQRRSHC

SEQ ID NO: 786 - protein, 472 aa, Homo sapiens
MKFLIFAFFGGVHLLSLCSGKAICKNGISKRTFEEIKEEIASCGDVAKAIINLAVYGKAQNRSYERLALLVDTVGPRLSGSKNLEKAIQIMYQNLQQDGLEKVHLEPVRIPHWERGEESAVMLEPRIHKIAILGLGSSIGTPPEGITAEVLVVTSFDELQRRASEARGKIVVYNQPYINYSRTVQYRTQGAVEAAKVGALASLIRSVASFSIYSPHTGIQEYQDGVPKIPTACITVEDAEMMSRMASHGIKIVIQLKMGAKTYPDTDSFNTVAEITGSKYPEQVVLVSGHLDSWDVGQGAMDDGGGAFISWEALSLIKDLGLRPKRTLRLVLWTAEEQGGVGAFQYYQLHKVNISNYSLVMESDAGTFLPTGLQFTGSEKARAIMEEVMSLLQPLNITQVLSHGEGTDINFWIQAGVPGASLLDDLYKYFFFHHSHGDTMTVMDPKQMNVAAAVWAVVSYVVADMEEMLPRS

SEQ ID NO: 787 - protein, 83 aa, Homo sapiens
MKKVCWVWALAHLVLCERWLTAGCLLYVGVIQPCKGSPSSVCKARRCLHPKYRIKRYGYYKYSVRLIICHHHPHALKAELTDD

SEQ ID NO: 788 - protein, 359 aa, Homo sapiens
MKLGCVLMAWALYLSLGVLWVAQMLLAASFETLQCEGPVCTEESSCHTEDDLTDAREAGFQVKAYTFSEPFHLIVSYDWLILQGPAKPVFEGDLLVLRCQAWQDWPLTQVTFYRDGSALGPPGPNREFSITVVQKADSGHYHCSGIFQSPGPGIPETASVVAITVQELFPAPILRAVPSAEPQAGGPMTLSCQTKLPLQRSAARLLFSFYKDGRIVQSRGLSSEFQIPTASEDHSGSYWCEAATEDNQVWKQSPQLEIRVQGASSSAAPPTLNPAPQKSAAPGTAPEEAPGPLPPPPTPSSEDPGFSSPLGMPDPHLYHQMGLLLKHMQDVRVLLGHLLMELRELSGHRKPGTTKATAE

SEQ ID NO: 789 - protein, 192 aa, Homo sapiens
MEALLQSLVIVLLGFKSFLSEELGSEVLNLLTNKQYELLSKNLRKTRELFVHGLPGSGKTILALRIMEKIRNVFHCEPANILYICENQPLKKLVSFSKKNICQPVTRKTFMKNNFEHIQHIIIDDAQNFRTEDGDWYGKAKFITQTARDGPGVLWIFLDYFQTYHLSCSASPLPQTSIQEKRSTEWSAMQVQ

SEQ ID NO: 790 - protein, 379 aa, Homo sapiens
  SITE (283): Xaa equals any of the naturally occurring L-amino acids
  SITE (303): Xaa equals any of the naturally occurring L-amino acids
  SITE (307): Xaa equals any of the naturally occurring L-amino acids
MGYIDDPDKYHQGFELLLSALGDPSERVVSATHQVFLPAYAAWTTELGNLQSHLILTLLNKIEKLLREGEHGLDEHKLHMYLSALQSLIPSLFALVLQNAPFSSKAKLHGEVPQIEVTRFPRPMSPLQDVSTIIGSREQLAVLLQLYDYQLEQEGTTGWESLLWVVNQLLPQLIEIVGKINVTSTACVHEFSRFFWRLCRTFGKIFTNTKVKPQFQEILRLSEENIDSSAGNGVLTKATVPIYATGVLTCYIQEEDRKLLVGFLEDVMTLLSLSHAPLDSLKXSFVELGANQAYHELLLTVLXYGVXHTSALVRCTAARMFELLVKGVNETLVAQRVVPALITLSSDPEISVRIATIPAFGTIMETVIQRELLERVKMQ

SEQ ID NO: 791 - protein, 48 aa, Homo sapiens
MSTVTWLLKLFTQFMFPPTVSNSHTCARYYVFNFCLIISFNFNFHYHW

SEQ ID NO: 792 - protein, 41 aa, Homo sapiens
MKILILFIFIPGLLVEKNGPDHVCVCMCVRVCVCAHLGLFI

SEQ ID NO: 793 - protein, 100 aa, Homo sapiens
  SITE (92): Xaa equals any of the naturally occurring L-amino acids
  SITE (96): Xaa equals any of the naturally occurring L-amino acids
MFVAVFYWVLTVFFLIIYITMTYTRIPQVPWTTVGLCFNGSAFVLYLSAAVVDASSVSPEKDSHNFNSWAASSFFAFLVTICYAGNTYFSFXAWRXRTIQ

SEQ ID NO: 794 - protein, 142 aa, Homo sapiens [sequence omitted]

SEQ ID NO: 795 - protein, 57 aa, Homo sapiens
MVYRAFLIIILRFILIFLFKLNYSKLCPEIPFGLKFFSFVCIKVQIKKTSRKRRPYL

SEQ ID NO: 796 - protein, 74 aa, Homo sapiens
MTNVYSLDGILVFGLLFVCTCAYFKKVPRLKTWLLSEKKGVWGVFYKAAVIGTRLHAAVAIACVVMAFYVLFIK

SEQ ID NO: 797 - protein, 45 aa, Homo sapiens [sequence omitted]

SEQ ID NO: 798 - protein, 399 aa, Homo sapiens
MGILLGLLLLGHLTVDTYGRPILEVPESVTGPWKGDVNLPCTYDPLQGYTQVLVKWLVQRGSDPVTIFLRDSSGDHIQQAKYQGRLHVSHKVPGDVSLQLSTLEMDDRSHYTCEVTWQTPDGNQVVRDKITELRVQKLSVSKPTVTTGSGYGFTVPQGMRISLQCQARGSPPISYIWYKQQTNNQEPIKVATLSTLLFKPAVIADSGSYFCTAKGQVGSEQHSDIVKFVVKDSSKLLKTKTEAPTTMTYPLKATSTVKQSWDWTTDMDGYLGETSAGPGKSLPVFAIILIISLCCMVVFTMAYIMLCRKTSQQEHVYEAARAHAREANDSGETMRVAIFASGCSSDEPTSQNLGNNYSDEPCIGQEYQIIAQINGNYARLLDTVPLDYEFLATEGKSVC

SEQ ID NO: 799 - protein, 223 aa, Homo sapiens
MKFVPCLLLVTLSCLGTLGQAPRQKQGSTGEEFHFQTGGRDSCTMRPSSLGQGAGEVWLRVDCRNTDQTYWCEYRGQPSMCQAFAADPKSYWNQALQELRRLHHACQGAPVLRPSVCREAGPQAHMQQVTSSLKGSPEPNQQPEAGTPSLRPKATVKLTEATQLGKDSMEELGKAKPTTRPTAKPTQPGPRPGGNEEAKKKAWEHCWKPFQALCAFLISFFRG

SEQ ID NO: 800 - protein, 52 aa, Homo sapiens
MPSLNLVLRPLICLASITSFLIFFPLLTLILCSPNSPPFPLPAHPERHTHTQ

SEQ ID NO: 801 - protein, 135 aa, Homo sapiens
MGLWLGMLACVFLATAAFVAYTARLDWKLAAEEAKKHSGRQQQQRAESTATRPGPEKAVLSSVATGSSPGITLTTYSRSECHVDFFRTPEEAHALSAPTSRLSVKQLVIRRGAALGAASATLMVGLTVRILATRH

SEQ ID NO: 802 - protein, 181 aa, Homo sapiens
MTVILIILIVVMARYCRSKNKNGYEAGKKDHEDFFTPQQHDKSKKPKKDKKNKKSKQPLYSSIVTVEASKPNGQRYDSVNEKLSDSPSMGRYRSVNGGPGSPDLARHYKSSSPLPTVQLHPQSPTAGKKHQAVQDLPPANTFVGAGDNISIGSDHCSEYSCQTNNKYSKQMRLHPYITVFG

SEQ ID NO: 803 - protein, 61 aa, Homo sapiens [sequence omitted]

SEQ ID NO: 804 - protein, 58 aa, Homo sapiens
MRTFLTFVILKVILIFLSSCASFTRNLLTWPNDVSTEQFETRPFGSELLQTVINVSRT

SEQ ID NO: 805 - protein, 950 aa, Homo sapiens
MTWRMGPRFTMLLAMWLVCGSEPHPHATIRGSHGGRKVPLVSPDSSRPARFLRHTGRSRGIERSTLEEPNLQPLQRRRSVPVLRLARPTEPPARSDINGAAVRPEQRPAARGSPREMIRDEGSSARSRMLRFPSGSSSPNILASFAGKNRVWVISAPHASEGYYRLMMSLLKDDVYCELAERHIQQIVLFHQAGEEGGKVRRITSEGQILEQPLDPSLIPKLMSFLKLEKGKFGMVLLKKTLQVEERYPYPVRLEAMYEVIDQGPIRRIEKIRQKGFVQKCKASGVEGQVVAEGNDGGGGAGRPSLGSEKKKEDPRRAQVPPTRESRVKVLRKLAATAPALPQPPSTPRATTLPPAPATTVTRSTSRAVTVAARPMTTTAFPTTQRPWTPSPSHRPPTTTEVITARRPSVSENLYPPSRKDQHRERPQTTRRPSKATSLESFTNAPPTTISEPSTRAAGPGRFRDNRMDRREHGHRDPNVVPGPPKPAKEKPPKKKAQDKILSNEYEEKYDLSRPTASQLEDELQVGNVPLKKAKESKKHEKLEKPEKEKKKKMKNENADKLLKSEKQMKKSEKKSKQEKEKSKKKKGGKTEQDGYQKPTNKHFTQSPKKSVADLLGSFEGKRRLLLITAPKAENNMYVQQRDEYLESFCKMATRKISVITIFGPVNNSTMKIDHFQLDNEKPMRVVDDEDLVDQRLISELRKEYGMTYNDFFMVLTDVDLRVKQYYEVPITMKSVFDLIDTFQSRIKDMEKQKKEGIVCKEDKKQSLENFLSRFRWRRRLLVISAPNDEDWAYSQQLSALSGQACNFGLRHITILKLLGVGEEVGGVLELFPINGSSVVEREDVPAHLVKDIRNYFQVSPEYFSMLLVGKDGNVKSWYPSPMWSMVIVYDLIDSMQLRRQEMAIQQSLGMRCPEDEYAGYGYHSYHQGYQDGYQDDYRHHESYHHGYPY

SEQ ID NO: 806 - protein, 260 aa, Homo sapiens
MLALLGLSQALNILLGLKGLAPAEISAVCEKGNFNVAHGLAWSYYIGYLRLILPELQARIRTYNQHYNNLLRGAVSQRLYILLPLDCGVPDNLSMADPNIRFLDKLPQQTGDRAGIKDRVYSNSIYELLENGQRAGTCVLEYATPLQTLFAMSQYSQAGFSGEDRLEQAKLFCRTLEDILADAPESQNNCRLIAYQEPADDSSFSLSQEVLRHLRQEEKEEVTVGSLKTSAVPSTSTMSQEPELLISGMEKPLPLRTDFS

SEQ ID NO: 807 - protein, 84 aa, Homo sapiens [sequence omitted]

SEQ ID NO: 808 - protein, 35 aa, Homo sapiens
MPLPSSFPLPVFLSSCPFLMSVSIGFLILVFNVHP

SEQ ID NO: 809 - protein, 55 aa, Homo sapiens
MVNIFGFVSCIVFRCSCSALLHESNHRPYLNKWSLLSTNKTLFRNNRGLDLVLVC

SEQ ID NO: 810 - protein, 78 aa, Homo sapiens
MVCFQSNKPSTSTWRQLSFVFVLFCLFCLGHAFLSLPFYILSIIAMCLEQWAFHNMNSLYHHEWEVRGNLIHVDFTLP

SEQ ID NO: 811 - protein, 41 aa, Homo sapiens [sequence omitted]

SEQ ID NO: 812 - protein, 58 aa, Homo sapiens
MRISRCNISLEIVSPSILLTFLDLIILLWALASCYRRFTSFPALNLPDVNSTLHYLQQ

SEQ ID NO: 813 - protein, 606 aa, Homo sapiens
MTVVGNPRSWSCQWLPILILLLGTGHGPGVEGVTHYKAGDPVILYVNKVGPYHNPQETYHYYQLPVCCPEKIRHKSLSLGEVLDGDRMAESLYEIRFRENVEKRILCHMQLSSAQVEQLRQAIEELYYFEFVVDDLPIRGFVGYMEESGFLPHSHKIGLWTHLDFHLEFHGDRIIFANVSVRDVKPHSLDGLRPDEFLGLTHTYSVRWSETSVERRSDRRRGDDGGFFPRTLEIHWLSIINSMVLVFLLVGFVAVILMRVLRNDLARYNLDEETTSAGSGDDFDQGDNGWKIIHTDVFRFPPYRGLLCAVLGVGAQFLALGTGIIVMALLGMFNVHRHGAINSAAILLYALTCCISGYVSSHFYRQIGGERWVWNIILTTSLFSVPFFLTWSVVNSVHWANGSTQALPATTILLLLTVWLLVGFPLTVIGGIFGKNNASPFDAPCRTKNIAREIPPQPWYKSTVIHMTVGGFLPFSAISVELYYIFATVWGREQYTLYGILFFVFAILLSVGACISIALTYFQLSGEDYRWWWRSVLSVGSTGLFIFLYSVFYYARRSNMSGAVQTVEFFGYSLLTGYVFFLMLGTISFFSSLKFIRYIYVNLKMD

SEQ ID NO: 814 - protein, 62 aa, Homo sapiens [sequence omitted]

SEQ ID NO: 815 - protein, 56 aa, Homo sapiens
  SITE (32): Xaa equals any of the naturally occurring L-amino acids
MLSFFICLLIFVHLLLLSFLISDWPPPTGSAXHKILRLMVVQRLSLLDQRKRWSEA

SEQ ID NO: 816 - protein, 90 aa, Homo sapiens
MAIRLVFLALAGLVDGKPVWITLWMDAKRPNLAGTGSTWGSRRDSHCCHGPTAWSLPCLLCLFRAQQKDRERSLLGVPLPTLQGGNLSDG

SEQ ID NO: 817 - protein, 672 aa, Homo sapiens
MCSRVPLLLPLLLLLALGPGVQGCPSGCQCSQPQTVFCTARQGTTVPRDVPPDTVGLYVFENGITMLDAGSFAGLPGLQLLDLSQNQIASLPSGVFQPLANLSNLDLTANRLHEITNETFRGLRRLERLYLGKNRIRHIQPGAFDTLDRLLELKLQDNELRALPPLRLPRLLLLDLSHNSLLALEPGILDTANVEALRLAGLGLQQLDEGLFSRLRNLHDLDVSDNQLERVPPVIRGLRGLTRLRLAGNTRIAQLRPEDLAGLAALQELDVSNLSLQALPGDLSGLFPRLRLLAAARNPFNCVCPLSWFGPWVRESHVTLASPEETRCHFPPKNAGRLLLELDYADFGCPATTTTATVPTTRPVVREPTALSSSLAPTWLSPTAPATEAPSPPSTAPPTVGPVPQPQDCPPSTCLNGGTCHLGTRHHLACLCPEGFTGLYCESQMGQGTRPSPTPVTPRPPRSLTLGIEPVSPTSLRVGLQRYLQGSSVQLRSLRLTYRNLSGPDKRLVTLRLPASLAEYTVTQLRPNATYSVCVMPLGPGRVPEGEEACGEAHTPPAVHSNHAPVTQAREGNLPLLIAPALAAVLLAALAAVGAAYCVRRGRAMAAAAQDKGQVGPGAGPLELEGVKVPLEPGPKATEAVERPCPAGLSVKCHSWASKAWPQSPLHAKPYI

SEQ ID NO: 818 - protein, 282 aa, Homo sapiens
MLALTLAKADSPRTALLCSAWLLTASFSAQQHKGSLQVHQTLSVEMDQVLKALSFPKKKAALLSAAILCFLRTALRQSFSSALVALVPSGAQPLPATKDTVLAPLRMSQVRSLVIGLQNLLVQKDPLLSQACVGCLEALLDYLDARSPDIALHVASQPWNRFLLFTLLDAGENSFLRPEILRLMTLFMRYRSSSVLSHEEVGDVLQGVALADLSTLSNTTLQALHGFFQQLQSMGHLADHSMAQTLQASLEGLPPSTSSGQPPLQDMLCLGGVAVSLSHIRN

SEQ ID NO: 819 - protein, 178 aa, Homo sapiens
MLPLLIICLLPAIEGKNCLRCWPELSALIDYDLQILWVTPGPPTELSQSIHSLFLEDNNFLKPWYLDRDHLEEETAKFFTQVHQAIKTLRDDKTVLLEEIYTHKNLFTERLNKISDGLKEKGAPPLSMNAFPAPSPTCTPEPLGSVCLPSTSVSLPSHPPWQPAMSPVPGTGGPPCGL

SEQ ID NO: 820 - protein, 298 aa, Homo sapiens
  SITE (42): Xaa equals any of the naturally occurring L-amino acids
  SITE (58): Xaa equals any of the naturally occurring L-amino acids
MARRSRHRLLLLLLRYLVVALGYHKAYGFSAPKDQQVVTAVXYQEAILACKTPKKTVXSRLEWKKLGRSVSFVYYQQTLQGDFKNRAEMIDFNIRIKNVTRSDAGKYRCEVSAPSEQGQNLEEDTVTLEVLVAPAVPSCEVPSSALSGTVVELRCQDKEGNPAPEYTWFKDGIRLLENPRLGSQSTNSSYTMNTKTGTLQFNTVSKLDTGEYSCEARNSVGYRRCPGKRMQVDDLNISGIIAAVVVVALVISVCGLGVCYAQRKGYFSKETSFQKSNSSSKATTMSENDFKHTKSFII

SEQ ID NO: 821 - protein, 46 aa, Homo sapiens
MEPVALLQPTWWLLNVTLPLVAWSGPLICRPLLHGEGRQGAACLQG

SEQ ID NO: 822 - protein, 65 aa, Homo sapiens
MIKILKEAIEETSFCSFWRISFQLSIHHIFLIFCAQLTTLLYSTFLFIPISWFLIVPGAVDKTIL

SEQ ID NO: 823 - protein, 84 aa, Homo sapiens
MKLLYLFLAILLAIEEPVISGKRHILRCMGNSGICRASCKKNEQPYLYCRNCQSCCLQSYMRISISGKEENTDWSYEKQWPRLP

SEQ ID NO: 824 - protein, 44 aa, Homo sapiens
MGWLWLELLGLSIEETLVWAFLNKFLDSSAALLWRILGKSNLST

SEQ ID NO: 825 - protein, 158 aa, Homo sapiens
MALEVLMLLAVLIWTGAENLHVKISCSLDWLMVSVIPVAESRNLYIFADELHLGMGCPANRIHTYVYEFIYLVRDCGIRTRVVSEETLLFQTELYFTPRNIDHDPQEIHLECSTSRKSVWLTPVSTENEIKLDPSPFIADFQTTAEELGLLSSSPNLL

SEQ ID NO: 826 - protein, 89 aa, Homo sapiens
MVSASVFVGLVIFYIAFCLLWPLVVKGCTMIRWKINNLIASESYYTYASISGISSMPSLRHSRMGSMFSSRMTEDRAEPKEAVERQLMT

SEQ ID NO: 827 - protein, 94 aa, Homo sapiens
MLVIAGGILAALLLLIVVVLCLYFKIHNALKAAKEPEAVAVKNHNPDKVWWAKNSQAKTIATESCPALQCCEGYRMCASFDSLPPCCCDINEGL

SEQ ID NO: 828 - protein, 39 aa, Homo sapiens
MAFGQEVTHLTKTSWLAPLRFIKGLLGPWGWILLILDLE

SEQ ID NO: 829 - protein, 90 aa, Homo sapiens
MALFSCLLLLKQSDGASPVLRALAASCLASPAGCCGTRKALNGNVGEKVGFTFMSFQGCDPSSPGCLCCSLLPSNSQLVFISFLVLSGLA

SEQ ID NO: 830 - protein, 101 aa, Homo sapiens
  SITE (67): Xaa equals any of the naturally occurring L-amino acids
MELERCSVVLCILANLAVLRALFLPCIIFHCVSDSRSVNRETKVKFVHTSVHGVGHSFVQSAFKAFXLVPPEAVPEQKDPDPEFPTVKYPNPEEGKGVLVT

SEQ ID NO: 831 - protein, 86 aa, Homo sapiens [sequence omitted]

SEQ ID NO: 832 - protein, 246 aa, Homo sapiens
MALLLCLVCLTAALAHGCLHCHSNFSKKFSFYRHHVNFKSWWVGDIPVSGALLTDWSDDTMKELHLAIPAKITREKLDQVATAVYQMMDQLYQGKMYFPGYFPNELRNIFREQVHLIQNAIIESRIDCQHRCGKQGSVQAEGRAGGSSGPWRLRGALAALVRVSGIFQYETISCNNCTDSHVACFGYNCESSAQWKSAVQGLLNYINNWHKQDTSMSLVSPALRCLEPPHLANLTLEDAAECLKQH

SEQ ID NO: 833 - protein, 84 aa, Homo sapiens
  SITE (65): Xaa equals any of the naturally occurring L-amino acids
MWSSSWDHRITTPRLANFFFFFFFFFFVEMGFRYVGQAGLKLLASSNLPALASQSAGITGVSHHXWLGGLIKTPILSLTPRVSG

SEQ ID NO: 834 - protein, 110 aa, Homo sapiens
  SITE (93): Xaa equals any of the naturally occurring L-amino acids
MFLASWLLFCIVAPKDDAHLSFIQCKDIWKDNRKYSCFHFKSDQLLELASKACTSFQAQSRSFTAGAVPSEHPELPCGSQQLCCGCTARLGGXWIGASRCGSGSAFLASP

SEQ ID NO: 835 - protein, 56 aa, Homo sapiens [sequence omitted]

SEQ ID NO: 836 - protein, 53 aa, Homo sapiens
MQECLLHGCCCYLLRLGVLGTVQCISTWLILTANEQHRLKETSNSQSPAVSRA

SEQ ID NO: 837 - protein, 50 aa, Homo sapiens
  SITE (43): Xaa equals any of the naturally occurring L-amino acids
  SITE (50): Xaa equals any of the naturally occurring L-amino acids
MNFLVFLSLSSSLVSAAGPRFPSREERGVGGVVLIKSEDMTLXERSKGSX

SEQ ID NO: 838 - protein, 32 aa, Homo sapiens
MPVPLWLVLWFCFLLYVASRRTFGLANYMPLP

SEQ ID NO: 839 - protein, 71 aa, Homo sapiens
MVQGPLTHLMLVLLISLIFLSRGSGRAWAFSHSCFKTSDLLPCRNRWEVIEFLHYSNLHSHISLSVTKTFL

SEQ ID NO: 840 - protein, 230 aa, Homo sapiens
MASLGLQLVGYILGLLGLLGTLVAMLLPSWKTSSYVGASIVTAVGFSKGLWMECATHSTGITQCDIYSTLLGLPADIQAAQAMMVTSSAISSLACIISVVGMRCTVFCQESRAKDRVAVAGGVFFILGGLLGFIPVAWNLHGILRDFYSPLVPDSMKFEIGEALYLGIISSLFSLIAGIILCFSCSSQRNRSNYYDAYQAQPLATRSSPRPGQPPKVKSEFNSYSLTGYV

SEQ ID NO: 841 - protein, 37 aa, Homo sapiens
MCYIPGSTGGQCWPWCWCWLCREALEWLCGAVSAGPA

SEQ ID NO: 842 - protein, 133 aa, Homo sapiens
MRVPLVLSWAFVLVGFSGVYLASESFWFPPSLCDLTSPPGLHLWKFIRDLVSMEELTDSAREMGYWMMVFSLKAMFPVSSGCFQERQETNKSLTLLRCSQRDTSPLMDGQTWARVRVTKPPTTATAAYNRHIR

SEQ ID NO: 843 - protein, 42 aa, Homo sapiens
MFLFITFTILAIFIIEPRNLRVDLNLIKFQTSWPKTLVEEQN

SEQ ID NO: 844 - protein, 85 aa, Homo sapiens
  SITE (68): Xaa equals any of the naturally occurring L-amino acids
MGMPLVTVTAATFPTLSCPPRAWPEVEAPEAPALPVVPELPEVPMEMPLVLPPELELLSLEAVHRYQXGGTLMGWTRAEASANGS

SEQ ID NO: 845 - protein, 102 aa, Homo sapiens [sequence omitted]

SEQ ID NO: 846 - protein, 102 aa, Homo sapiens
  SITE (91): Xaa equals any of the naturally occurring L-amino acids
  SITE (92): Xaa equals any of the naturally occurring L-amino acids
  SITE (93): Xaa equals any of the naturally occurring L-amino acids
MGRRSGLLGLRPGRSRWRWSGSVWVRSVLLLLGGLRASATSTPVSLGSSPPCRHHVPSDTEVINKVHLKANHVVKRDVDEHLRIKTVYDKXXXSCSLRKRIL

SEQ ID NO: 847 - protein, 56 aa, Homo sapiens
MFLKVLVFLIFFSPFSSSLFSGEAVRGRGAGLGLGIGRGWTSCLSVLNGCDGARSH

SEQ ID NO: 848 - protein, 52 aa, Homo sapiens
MGPCRASRCLSLLVLFPPGVAGRPAPGRLHPVPTGPLPRMYSAGARGRHGAH

SEQ ID NO: 849 - protein, 159 aa, Homo sapiens
MSQAWVPGLAPTLLFSLLAGPQKIAAKCGLILACPKGFKCCGDSCCQENELFPGPVRIFVIIFLVILSVFCICGLAKCFCRNCREPEPDSPVDCRGPLELPSIIPPERVRVSLSAPPPPYSEVILKPSLGPTPTEPPPPYSFRPEEYTGDQRGIDNPAF

SEQ ID NO: 850 - protein, 50 aa, Homo sapiens
MDGGPGAFSRAWVLQIPWLLLSGGNFALCEPRPCPSAGHPWQEAGLPSSP

SEQ ID NO: 851 - protein, 151 aa, Homo sapiens; identical to SEQ ID NO: 687

SEQ ID NO: 852 - protein, 522 aa, Homo sapiens
MRLRVRLLKRTWPLEVPETEPTLGHLRSHLRQSLLCTWGYSSNTRFTITLNYKDPLTGDEETLASYGIVSGDLICLILQDDIPAPNIPSSTDSEHSSLQNNEQPSLATSSNQTSMQDEQPSDSFQGQAAQSGVWNDDSMLGPSQNFEAESIQDNAHMAEGTGFYPSEPMLCSESVEGQVPHSLETLYQSADCSDANDALIVLIHLLMLESGYIPQGTEAKALSMPEKWKLSGVYKLQYMHPLCEGSSATLTCVPLGNLIVVNATLKINNEIRSVKRLQLLPESFICKEKLGENVANIYKDLQKLSRLFKDQLVYPLLAFTRQALNLPDVFGLVVLPLELKLRIFRLLDVRSVLSLSAVCRDLFTASNDPLLWRFLYLRDFRDNTVRVQDTDWKELYRKRHIQRKESPKGRFVMLLPSSTHTIPFYPNPLHPRPFPSSRLPPGIIGGEYDQRPTLPYVGDPISSLIPGPGETPSQFPPLRPRFDPVGPLPGPNPILPGRGGPNDRFPFRPSRGRPTDGRLSFM

SEQ ID NO: 853 - protein, 45 aa, Homo sapiens
MLVSLIICLLLDLLNQPSLLRDLILKQHTGNPHLSFPLKYSHWMG

SEQ ID NO: 854 - protein, 168 aa, Homo sapiens
MVTFITATLWIAVFSYIMVWLVTIIGYTLGIPDVIMGITFLAAGQVSRLHGQPNCGETRPWGHGSLQHHRSNVFDILVGLGVPWGLQTMVVNYGSTVKINSRGLVYSVVLLLGSVALTVLGIHLNKWRLDRKLGVYVLVLYAIFLCFSIMIEFNVFTFVNLPMCREDD

SEQ ID NO: 855 - protein, 168 aa, Homo sapiens
  SITE (83): Xaa equals any of the naturally occurring L-amino acids
MPLLRGLLWLQVLCAGPLHTEAVVLLVPSDDGRAFLLRSRLLHPEAHVPPAADRGASLQCVLHQAAPKSRPRSPAAGAALLHXPRRTGDEPCREFHGNGFPGPTQLTPGECGLPAPSSLLQHASAPVRTGSEGQVVGCPRARGETGEGLSLAFLSSLMFTSRNGLVGC

SEQ ID NO: 856 - protein, 43 aa, Homo sapiens [sequence omitted]

SEQ ID NO: 857 - protein, 187 aa, Homo sapiens
MVAATVAAAWLLLWAAACAQQEQDFYDFKAVNIRGKLVSLEKYRGSVSLVVNVASECGFTDQHYRALQQLQRDLGPHHFNVLAFPCNQFGQQEPDSNKEIESFARRTYSVSFPMFSKIAVTGTGAHPAFKYLAQTSGKEPTWNFWKYLVAPDGKVVGAWDPTVSVEEVRPQITALVRKLILLKREDL

SEQ ID NO: 858 - protein, 52 aa, Homo sapiens
MKCFFLFVVILIIMKSNLSDIIIATYTYCIPDYFFHTFIFNLSVYLNSKFIS

SEQ ID NO: 859 - protein, 40 aa, Homo sapiens
MRRQTFMSILVFQCSPISFGLCINKERTVVSSVITDNLCL

SEQ ID NO: 860 - protein, 346 aa, Homo sapiens [sequence omitted]

SEQ ID NO: 861 - protein, 165 aa, Homo sapiens
  SITE (127): Xaa equals any of the naturally occurring L-amino acids
MCLSLLAALACSAGDTWASEVGPVLSKSSPRLITTWEKVPVGTNGGVTVVGLVSSLLGGTFVGIAYFLTQLIFVNDLDISAPQWPIIAFGGLAGLLGSIVDSYLGATMQYTGLDESTGMVVNSPTNXARHIAGKPILDNNAVNLFSSVLIALLLPTAAWGFWPRG

SEQ ID NO: 862 - protein, 122 aa, Homo sapiens
MPPLAPQLCRAVFLVPILLLLQVKPLNGSPGPKDGSQTEKTPSADQNQEQFEEHFVASSVGEMWQVVDMAQQEEDQSSKTAAVHKHSFHLSFCFSLASVMVFSGGPLRRTFPNIQLCFMLTH

SEQ ID NO: 863 - protein, 208 aa, Homo sapiens
MWLFILLSLALISDAMVMDEKVKRSFVLDTASAICNYNAHYKNHPKYWCRGYFRDYCNIIAFSPNSTNHVALRDTGNQLIVTMSCLTKEDTGWYWCGIQRDFARDDMDFTELIVTDDKGTLANDFWSGKDLSGNKTRSCKAPKVVRKADRSRTSILIICILITGLGIISVISHLTKRRRSQRNRRVGNTLKPFSRVLTPKEMAPTEQM

SEQ ID NO: 864 - protein, 51 aa, Homo sapiens
MIKHVAWLIFTNCIFFCPVAFFSFAPLITAISISPEIMKSVTLIFFPCLLA

SEQ ID NO: 865 - protein, 118 aa, Homo sapiens
MCYLLLLLIQTAELLIHPQGLQAVSNGESALKGTRPTFSSPFILVTEGRKEWEGVFLSSGWKGNTLSNYYISLVFYYSRILQPYFYCLWGKLEMVTLIRSVWRGINGGDKISVGFGKC

SEQ ID NO: 866 - protein, 169 aa, Homo sapiens
MWAVLRLALRPCARASPAGPRAYHGDSVASLGTQPDLGSALYQENYKQMKALVNQLHERVEHIKLGGGEKARALHISRGKLLPRERIDNLIDPGSPFLELSQFAGYQLYDNEEVPGGGIITGIGRVSGVECMIIANDATVKGGAYYPVTVKKQLRAQEIAMQTGSPAST

SEQ ID NO: 867 - protein, 47 aa, Homo sapiens
MTAGFMGMAVAIILFGWIIGVLGCCWDRGLMQYVAGCSSSWEGKQWN

SEQ ID NO: 868 - protein, 203 aa, Homo sapiens
MQLGSVLLTRCPFWGCFSQLMLYAERAEARRKPDIPVPYLYFDMGAAVLCASFMSFGVKRRWFALGAALQLAISTYAAYIGGYVHYGDWLKVRMYSRTVAIIGGFLVLASGAGELYRRKPRSRSLQSTGQVFLGIYLICVAYSLQHSKEDRLAYLNHLPGGELMIQLFFVLYGILAPGLSVRLLRDPRCPDPGCTAAPCHAAH

SEQ ID NO: 869 - protein, 123 aa, Homo sapiens
MHDGSKPFPRYGYKPSPPNGCGSPLFGVHLNIGIPSLTKCCNQHDRCYETCGKSKNDCDEEFQYCLSKICRDVQKTLGLTQHVQACETTVELLFDSVIHLGCKPYLDSQRAACRCHYEEKTDL

SEQ ID NO: 870 - protein, 91 aa, Homo sapiens
MLRCGGRGLLLGLAVAAAAVMAARLMGWWGPRAGFRLFIPEELSRYRGGPGDPGLYLALLGRVYDVSSGRSTTSLGPTIAASQAETHPELS

SEQ ID NO: 871 - protein, 23 aa, Homo sapiens
LGSLSTAPSSALPTLGARRTRSK

SEQ ID NO: 872 - protein, 60 aa, Homo sapiens
MGNCQAGHNLHLCLAHHPPLVCATLILLLLGLSGLGLGSFLLTHRTGLRTLTSPRTGSLF

SEQ ID NO: 873 - protein, 173 aa, Homo sapiens
MEAPGPRALRTALCGGCCCLLLCAQLAVAGKGARGFGRGALIRLNIWPAVQGACKQLEVCEHCVEGDRARNLSSCMWEQCRPEEPGHCVAQSEVVKEGCSIYNRSEACPAAHHHPTYEPKTVTTGSPPVPEAHSPGFDGASFIGGVVLVLSLQAVAFFVLHFLKAKDSTYQTL

SEQ ID NO: 874 - protein, 210 aa, Homo sapiens
  SITE (139): Xaa equals any of the naturally occurring L-amino acids
  SITE (187): Xaa equals any of the naturally occurring L-amino acids
MEAPGPRALRTALCGGCCCLLLCAQLAVAGKGARGFGRGALIRLNIWPAVQGACKQLEVCEHCVEGDRARNLSSCMWEQCRPEEPGHCVAQSEVVKEGCSIYNRSEACPAAHHHPTYEPKTVTTGSPPVPEAHSPGFDXASFIGGVVLVLSLQAVAFFVLTSSRPRTAPTRRCEYLASSKYLSPSSXLVPAHVPFSTQGAVFSTGKPSGR

SEQ ID NO: 875 - protein, 99 aa, Homo sapiens
MEGPRGWLVLCVLAISLASMVTEDLCRAPDGKKGEAGRPGRRGRPGLKGEQGEPGAPGIRTGIQGLKGDQGEPGPSGNPGKVGYPGPSGPLRSPWHPGN

SEQ ID NO: 876 - protein, 245 aa, Homo sapiens; identical to SEQ ID NO: 554

SEQ ID NO: 877 - protein, 105 aa, Homo sapiens
  SITE (70): Xaa equals any of the naturally occurring L-amino acids
MISYIVLLSILLWPLVVYHELIQRMYTRLEPLLMQLDYSMKAEANALHHKHDKRKRQGKNAPPGGDEPLXETESESEAELAGFSPVVDVKKTALALAIYRLRAVR

SEQ ID NO: 878 - protein, 89 aa, Homo sapiens
  SITE (24): Xaa equals any of the naturally occurring L-amino acids
  SITE (75): Xaa equals any of the naturally occurring L-amino acids
MFKDYPPAIKPSYDVLLLLLLLVXLLQAGLNTGTAIQCVRFKVSARLQGASWDTQNGPQERLAGEVARSPLKEFXKEKAWRAVVVQMAQ

SEQ ID NO: 879 - protein, 147 aa, Homo sapiens
MLAGAGRPGLPQGRHLCWLLCAFTLKLCQAEAPVQEEKLSASTSNLPCWLVEEFVVAEECSPCSNFRAKTTPECGPTGYVEKITCSSSKRNEFKSCRFSFEWNNAYFGSSKGAVVCVALIFACLVIIRQRQLDRKALEKVRKQIESI

SEQ ID NO: 880 - protein, 127 aa, Homo sapiens [sequence omitted]

SEQ ID NO: 881 - protein, 9 aa, Homo sapiens
LGKPWRYPT

SEQ ID NO: 882 - protein, 91 aa, Homo sapiens
  SITE (84): Xaa equals any of the naturally occurring L-amino acids
MYGKSSTRAVLLLLGIQLTALWPIAAVEIYTSRVLEAVNGTDARLKCTFSSFAPVGDALTVTWNFRPLDGGPEQFVFYYHIDPXPTHEWAV

SEQ ID NO: 883 - protein, 708 aa, Homo sapiens
MKDMPLRIHVLLGLAITTLVQAVDKKVDCPRLCTCEIRPWFTPRSIYMEASTVDCNDLGLLTFPARLPANTQILLLQTNNIAKIEYSTDFPVNLTGLDLSQNNLSSVTNINVKKMPQLLSVYLEENKLTELPEKCLSELSNLQELYINHNLLSTISPGAFIGLHNLLRLHLNSNRLQMINSKWFDALPNLEILMIGENPIIRIKDMNFKPLINLRSLVIAGINLTEIPDNALVGLENLESISFYDNRLIKVPHVALQKVVNLKFLDLNKNPINRIRRGDFSNMLHLKELGINNMPELISIDSLAVDNLPDLRKIEATNNPRLSYIHPNAFFRLPKLESLMLNSNALSALYHGTIESLPNLKEISIHSNPIRCDCVIRWMNMNKTNIRFMEPDSLFCVDPPEFQGQNVRQVHFRDMMEICLPLIAPESFPSNLNVEAGSYVSFHCRATAEPQPEIYWITPSGQKLLPNTLTDKFYVHSEGTLDINGVTPKEGGLYTCIATNLVGADLKSVMIKVDGSFPQDNNGSLNIKIRDIQANSVLVSWKASSKILKSSVKWTAFVKTENSHAAQSARIPSDVKVYNLTHLNPSTEYKICIDIPTIYQKNRKKCVNVTTKGLHPDQKEYEKNNTTTLMACLGGLLGIIGVICLISCLSPEMNCDGGHSYVRNYLQKPTFALGELYPPLINLWEAGKEKSTSLKVKATVIGLPTNMS

SEQ ID NO: 884 - protein, 10 aa, Homo sapiens
MGLFLFLVSS

SEQ ID NO: 885 - protein, 941 aa, Homo sapiens
  SITE (807): Xaa equals any of the naturally occurring L-amino acids
  SITE (809): Xaa equals any of the naturally occurring L-amino acids
  SITE (815): Xaa equals any of the naturally occurring L-amino acids
  SITE (819): Xaa equals any of the naturally occurring L-amino acids
MVFLPLKWSLATMSFLLSSLLALLTVSTPSWCQSTEASPKRSDGTPFPWNKIRLPEYVIPVHYDLLIHANLTTLTFWGTTKVEITASQPTSTIILHSHHLQISRATLRKGAGERLSEEPLQVLEHPPQEQIALLAPEPLLVGLPYTVVIHYAGNLSETFHGFYKSTYRTKEGELRILASTQFEPTAARMAFPCFDEPAFKASFSIKIRREPRHLAISNMPLVKSVTVAEGLIEDHFDVTVKMSTYLVAFIISDFESVSKITKSGVKVSVYAVPDKMNQADYALDAAVTLLEFYEDYFSIPYPLPKQDLAAIPDFQSGAMENWGLTTYRESALLFDAEKSSASSKLGITMTVAHELAHQWFGNLVTMEWWNDLWLNEGFAKFMEFVSVSVTHPELKVGDYFFGKCFDAMEVDALNSSHPVSTPVENPAQIREMFDDVSYDKGACILNMLREYLSADAFKSGIVQYLQKHSYKNTKNEDLWDSMASICPTDGVKGMDGFCSRSQHSSSSSHWHQEGVDVKTMMNTWTLQRGFPLITITVRGRNVHMKQEHYMKGSDGAPDTGYLWHVPLTFITSKSDMVHRFLLKTKTDVLILPEEVEWIKFNVGMNGYYIVHYEDDGWDSLTGLLKGTHTAVSSNDRASLINNAFQLVSIGKLSIEKALDLSLYLKHETEIMPVFQGLNELIPMYKLMEKRDMNEVETQFKAFLIRLLRDLIDKQTWTDEGSVSERMLRSELLLLACVHNYQPCVQRAEGYFRKWKESNGNLSLPVDVTLAVFAVGAQSTEGWDFLYSKYQFSLSSTEKSQIEFALCXPXNKEKLXWLLXESFKGDKIKTQEFPQILTLIGRNPVGYPLAWQFLRKNWNKLVQKFELGSSSIAHMVMGTTNQFSTRTRLEEVKGFFSSLKENGSQLRCVQQTIETIEENIGWMDKNFDKIRVWLQSEKLERM

SEQ ID NO: 886 - protein, 612 aa, Homo sapiens
  SITE (245): Xaa equals any of the naturally occurring L-amino acids
  SITE (246): Xaa equals any of the naturally occurring L-amino acids
  SITE (249): Xaa equals any of the naturally occurring L-amino acids
MAAAGRLPSSWALFSPLLAGLALLGVGPVPARALHNVTAELFGAEAWGTLAAFGDLNSDKQTDLFVLRERNDLIVFLADQNAPYFKPKVKVSFKNHSALITSVVPGDYDGDSQMDVLLTYLPKNYAKSELGAVIFWGQNQTLDPNNMTILNRTFQDEPLIMDFNGDLIPDIFGITNESNQPQILLGGNLSWHPALTTTSKMRIPHSHAFIDLTEDFTADLFLTTLNATTSTFQFEIWENLDGNFXXSTXLEKPQNMMVVGQSAFADFDGDGHMDHLLPGCEDKNCQKSTIYLVRSGMKQWVPVLQDFSNKGTLWGFVPFVDEQQPTEIPIPITLHIGDYNMDGYPDALVILKNTSGSNQQAFLLENVPCNNASCEEARRMFKVYWELTDLNQIKDAMVATFFDIYEDGILDIVVLSKGYTKNDFAIHTLKNNFEADAYFVKVIVLSGLCSNDCPRKITPFGVNQPGPYIMYTTVDANGYLKNGSAGQLSQSAHLALQLPYNVLGLGRSANFLDHLYVGIPRPSGEKSIRKQEWTAIIPNSQLIVIPYPHNVPRSWSAKLYLTPSNIVLLTAIALIGVCVFILAIIGILHWQEKKADDREKRQEAHRFHFDAM

SEQ ID NO: 887 - protein, 456 aa, Homo sapiens
MAAAGRLPSSWALFSPLLAGLALLGVGPVPARALHNVTAELFGAEAWGTLAAFGDLNSDKQTDLFVLRERNDLIVFLADQNAPYFKPKVKVSFKNHSALITSVVPGDYDGDSQMDVLLTYLPKNYAKSELGAVIFWGQNQTLDPNNMTILNRTFQDEPLIMDFNGDLIPDIFGITNESNQPQILLGGNLSWHPALTTTSKMRIPHSHAFIDLTEDFTADLFLTTLNATTSTFQFEIWENLDGNFSVSTILEKPQNMMVVGQSAFADFDGDGHMDHLLPGCEDKNCQKSTIYLVRSGMKQWVPVLQDFSNKGTLWGFVPFVDEQQPTEIPIPITLHIGDYNMDGYPDALVILKNTSGSNQQAFLLENVPCNNASCEEARRMFKVYWELTDLNQIKDAMVATFFDIYEDGILDIVVLSKGYTKNDFAIHTLKNNFEADAYFVKVIVLSGLCSNDCPRR

SEQ ID NO: 888 - protein, 157 aa, Homo sapiens
MVKSVIFLSFWQGMLLAILEKCGAIPKIHSARVSVGEGTVAAGYHDFIICVEMFFAALALRHPFTYNVYADKRLDAQGRCAPMKSISSSLKETMNPHDIVQDAIHNFSPAYQQYTQQSTLEPGPTWRGGAHGLSRSHSLSGARDNEKTLLLSSDDEF

SEQ ID NO: 889 - protein, 118 aa, Homo sapiens
FLSSWQRPACGCQRPALPLHLGGAEQLGPSCPGGWVQTQAEDQPWPCPAICFHQAVSPPWLPFSLQAKVLLIPTPLVFACPALLFAWRVGGAQWQGISGPWGRGDGNMCPTAPSPPPP

SEQ ID NO: 890 - protein, 59 aa, Homo sapiens
MMKDVFFFLFLLAVWVVSFGVAKQAILIHNERRVDWLFRGPSTTPTSPSSGRSRATSTV

SEQ ID NO: 891 - protein, 109 aa, Homo sapiens
  SITE (94): Xaa equals any of the naturally occurring L-amino acids
MNTLVLWIFGFLICLGIILAIGNSIWESQTGDQFRTFLFWNEGEKSSVFSGFLTFWSYIIILNTVVPISLYVSVEVIRLGHSYFINWDRKMYYXRKAIPAVARTTTLNE

SEQ ID NO: 892 - protein, 46 aa, Homo sapiens
  SITE (45): Xaa equals any of the naturally occurring L-amino acids
INHVFIWGSIAIYFSILFTMHSNGIFGIFPNQFPFVGNARHSLTXK

SEQ ID NO: 893 - protein, 6 aa, Homo sapiens
TVAIYD

SEQ ID NO: 894 - protein, 11 aa, Homo sapiens
FLVCLLLGPRS

SEQ ID NO: 895 - protein, 56 aa, Homo sapiens
  SITE (35): Xaa equals any of the naturally occurring L-amino acids
  SITE (42): Xaa equals any of the naturally occurring L-amino acids
  SITE (46): Xaa equals any of the naturally occurring L-amino acids
KSQMQSFTIVTAYGRCLSLTCLPTLNQMLVFKSNXSLVSPHXLTFXNIFARFENFQ

SEQ ID NO: 896 - protein, 53 aa, Homo sapiens
NYNRGGTFLYQKAKIKHHVLMVFYKSTSNSTESLIWSLLNSWSDKVTFPKRVR

SEQ ID NO: 897 - protein, 566 aa, Homo sapiens
MAPLALHLLVLVPILLSLVASQDWKAERSQDPFEKCMQDPDYEQLLKVVTWGLNRTLKPQRVIVVGAGVAGLVAAKVLSDAGHKVTILEADNRIGGRIFTYRDQNTGWIGELGAMRMPSSHRILHKLCQGLGLNLTKFTQYDKNTWTEVHEVKLRNYVVEKVPEKLGYALRPQEKGHSPEDIYQMALNQALKDLKALGCRKAMKKFERHTLLEYLLGEGNLSRPAVQLLGDVMSEDGFFYLSFAEALRAHSCLSDRLQYSRIVGGWDLLPRALLSSLSGLVLLNAPVVAMTQGPHDVHVQIETSPPARNLKVLKADVVLLTASGPAVKRITFSPPLPRHMQEALRRLHYVPATKVFLSFRRPFWREEHIEGGHSNTDRPSRMIFYPPPREGALLLASYTWSDAAAAFAGLSREEALRLALDDVAALHGPVVRQLWDGTGVVKRWAEDQHSQGGFVVQPPALWQTEKDDWTVPYGRIYFAGEHTAYPHGWVETAVKLLRAAIKINSRKGPASDTASPEGHASDMEGQGHVHGVASSPSHDLAKEEGSHPPVQGQLSLQNTTHTRTSH

SEQ ID NO: 898 - protein, 319 aa, Homo sapiens
  SITE (68): Xaa equals any of the naturally occurring L-amino acids
  SITE (115): Xaa equals any of the naturally occurring L-amino acids
  SITE (213): Xaa equals any of the naturally occurring L-amino acids
MAPLALHLLVLVPILLSLVASQDWKAERSQDPFEKCMQDPDYEQLLKVTILEADNRIGGRIFTYRDQXTGWIGELGAMRMPSSHRILHKLCQGLGLNLTKFTQYDKNTWTEVHEXKLRNYVVEKVPEKLGYALRPQEKGHSPEDIYQMALNQALKDLKALGCRKAMKKFERHTLLEYLLGEGNLSRPAVQLLGDVMSEDGFFYLSFAEALRAXSCLSDRLQYSRIVGGWDLLPRALLSSLSGLVLLNAPVVAMTQGPHDVHVQIETSPPARNLKVLKADVVLLTASGPAVKRITFSPRCPATCRRRCGGCTTCRPPRCS

SEQ ID NO: 899 - protein, 46 aa, Homo sapiens; identical to SEQ ID NO: 594

SEQ ID NO: 900 - protein, 64 aa, Homo sapiens
  SITE (7): Xaa equals any of the naturally occurring L-amino acids
  SITE (27): Xaa equals any of the naturally occurring L-amino acids
SWVIVVXIWGYLLEGHGVPFCKSYGPXPWKLHTHHAAYNSGSSQVYRILGNSPCPVLIHCSFSG

SEQ ID NO: 901 - protein, 14 aa, Homo sapiens
  SITE (9): Xaa equals any of the naturally occurring L-amino acids
  SITE (14): Xaa equals any of the naturally occurring L-amino acids
WKGLLEGSXEATMX

SEQ ID NO: 902 - protein, 107 aa, Homo sapiens
  SITE (66): Xaa equals any of the naturally occurring L-amino acids
PLGREPLAGFLSFLSFSLLWCLEAFPRLQFLTTLTDFAIVLSPPLSFPKLTLWRLIKRKNHRPGAXLTPRRRANHLRCGVRDQPDQNRETPSLLNNTKLAGRGGARL

SEQ ID NO: 903 - protein, 127 aa, Homo sapiens
MPRAPWRIPLCALPTLCLGSPLPSQPTHPIFYDHRAPTWKMAHPGGPRSSHSPRGPGGHPALRQRLPCRRGEPETALCSSAPGAGFAEPPCKASPGWGPPSRGPQGDRSQGEWLPALGTPCGGPDDS

SEQ ID NO: 904 - protein, 90 aa, Homo sapiens
  SITE (31): Xaa equals any of the naturally occurring L-amino acids
  SITE (57): Xaa equals any of the naturally occurring L-amino acids
MPRAPWRIPLCALPTLCLGSPLPSQPTHPIXYDHRAPTWKMAHPGGPRSSHSPRTWXTPSSQTKAALPAGGARNSPLQLCTRSRFCGTPM

SEQ ID NO: 905 - protein, 308 aa, Homo sapiens
  SITE (87): Xaa equals any of the naturally occurring L-amino acids
  SITE (185): Xaa equals any of the naturally occurring L-amino acids
MPVPWFLLSLALGRSPVVLSLERLVGPQDATHCSPGLSCRLWDSDILCLPGDIVPAPGPVLAPTHLQTELVLRCQKETDCDLCLRVXVHLAVHGHWEEPEDEEKFGGAADLGVEEPRNASLQAQVVLSFQAYPTARCVLLEVQVPAALVQFGQSVGSVVYDCFEAALGSEVRIWSYTQPRYEKEXNHTQQLPDCRGLEVWNSIPSCWALPWLNVSADGDNVHLVLNVSEEQHFGLSLYWNQVQGPPKPRWHKNLTGPQIITLNHTDLVPCLCIQVWPLEPDSVRRTSAPSGRTPAHTRTSGKPPDCDC

SEQ ID NO: 906 - protein, 55 aa, Homo sapiens
MSSDFLCFFFKLCNQMILCFFFRGAEYWFLLLVVFSFLCHSCFFFVFSVSNTICI

SEQ ID NO: 907 - protein, 214 aa, Homo sapiens
  SITE (199): Xaa equals any of the naturally occurring L-amino acids
  SITE (206): Xaa equals any of the naturally occurring L-amino acids
  SITE (214): Xaa equals any of the naturally occurring L-amino acids
MLGARAWLGRVLLLPRAGAGLAASRRCPGVWPRTWPHRSPSRGSSSRDKDRSATVSSSVPMPAGGKGSHPSSTPQRVPNRLIHEKSPYLLQHAYNPVDWYPWGQEAFDKARKENKPIFLSVGYSTCHWCHMMEEESFQNEEIGRLLSEDFVSVKVDREERPDVDKVYMTFVQATSSGGGWPMNVWLTPNLQPFVGGTIXLLKDGLXRVGSAQCX

SEQ ID NO: 908 - protein, 43 aa, Homo sapiens
MLGARAWLGRVLLLPRAGAGLAASRRSACSPTSRLNSLRSLIP

SEQ ID NO: 909 - protein, 98 aa, Homo sapiens; identical to SEQ ID NO: 602

SEQ ID NO: 910 - protein, 22 aa, Homo sapiens
LPRPCAPSPVWRQVGREEASLL

SEQ ID NO: 911 - protein, 25 aa, Homo sapiens
  SITE (9): Xaa equals any of the naturally occurring L-amino acids
CAVRFREQXAPERVFLPTRGRKSEP

SEQ ID NO: 912 - protein, 365 aa, Homo sapiens
  SITE (144): Xaa equals any of the naturally occurring L-amino acids
  SITE (201): Xaa equals any of the naturally occurring L-amino acids
MFVGLMAFLLSFYLIFTNEGRALKTATSLAEGLSLVVSPDSIHSVAPENEGRLVHIIGALRTSKLLSDPNYGVHLPAVKLRRHVEMYQWVETEESREYTEDGQVKKETRYSYNTEWRSEIINSKNFDREIGHKNPSAMAVESFXATAPFVQIGRFFLSSGLIDKVDNFKSLSLSKLEDPHVDIIRRGDFFYHSENPKYPEXGDLRVSFSYAGLSGDDPDLGPAHVVTVIARQRGDQLVPFSTKSGDTLLLLHHGDFSAEEVFHRELRSNSMKTWGLRAAGWMAMFMGLNLMTRILYTLVDWFPVFRDLVNIGLKAFAFCVATSLTLLTVAAGWLFYRPLWALLIAGLALVPILVARTRVPAKKLE

SEQ ID NO: 913 - protein, 108 aa, Homo sapiens
  SITE (48): Xaa equals any of the naturally occurring L-amino acids
  SITE (55): Xaa equals any of the naturally occurring L-amino acids
  SITE (58): Xaa equals any of the naturally occurring L-amino acids
  SITE (67): Xaa equals any of the naturally occurring L-amino acids
MFYKLTLILCELSVAGVTQAASQRPLQRLPRHICSQRNPPGRCLLKAXLQTTWGXPDXQFPGCPHPXRVTLNARQMGNGKEKKAADLKLKFPQKRFYLSAFSERIKAF

SEQ ID NO: 914 - protein, 73 aa, Homo sapiens
  SITE (38): Xaa equals any of the naturally occurring L-amino acids
  SITE (48): Xaa equals any of the naturally occurring L-amino acids
  SITE (54): Xaa equals any of the naturally occurring L-amino acids
  SITE (55): Xaa equals any of the naturally occurring L-amino acids
  SITE (68): Xaa equals any of the naturally occurring L-amino acids
MFYKLTLILCELSVAGVTQAASQRPLQRLPRHICSQRXPPGRCLLKAXLQTTWXXPDKPIPRLSPPLXSDPKR

SEQ ID NO: 915 - protein, 81 aa, Homo sapiens
MSKRSASFILLPLLFLKGSFAKLNARISDCLEERYCHNLWMVFQGCVITELHLSRMSKTLSSLCYDFVINVYIFFKFLDIT

SEQ ID NO: 916 - protein, 201 aa, Homo sapiens; identical to SEQ ID NO: 612

SEQ ID NO: 917 - protein, 203 aa, Homo sapiens
MTLRPSLLPLHLLLLLLLSAAVCRAEAGLETESPVRTLQVETLVEPPEPCAEPAAFGDTLHIHYTGSLVDGRIIDTSLTRDPLVIELGQKQVIPGLEQSLLDMCVGEKRRAIIPSHLAYGKRGFPPSVPADAVVQYDVELIALIRANYWLKLVKGILPLVGMAMVPPSWASLGITYTERPIDPKSPKRSSRKRNETRAKRNNK

SEQ ID NO: 918 - protein, 122 aa, Homo sapiens
  SITE (89): Xaa equals any of the naturally occurring L-amino acids
  SITE (91): Xaa equals any of the naturally occurring L-amino acids
  SITE (94): Xaa equals any of the naturally occurring L-amino acids
  SITE (97): Xaa equals any of the naturally occurring L-amino acids
  SITE (98): Xaa equals any of the naturally occurring L-amino acids
MHRSEPFLKMSLLILLFLGLAEACTPREVNLLKGIIGLMSRLSPDEILGLLSLQVLHEETSGCKEEVKPFSGTTPSRKPLPKREEHVEXPXNAXTWXXTYLFVSYNKGDWFTFSSQVLLPLL

SEQ ID NO: 919 - protein, 194 aa, Homo sapiens
  SITE (138): Xaa equals any of the naturally occurring L-amino acids
MKLASGFLVLWLSLGGGLAQSDTSPDTEESYSDWGLRHLRGSFESVNSYFDSFLELLGGKNGVCQYRCRYGKAPMPRPGYKPQEPNGCGSYFLGLKVPESMDLGIPAMTKCCNQLDVCYDTCGANKYRCDAKFRWCLXSICSDLKRSLGFVSKVEACDSLVDTVFNTVWTLGCRPFMNSQRAACICAEEEKEEL

SEQ ID NO: 920 - protein, 67 aa, Homo sapiens [sequence omitted]

SEQ ID NO: 921 - protein, 170 aa, Homo sapiens
MATAMDWLPWSLLLFSLMCETSAFYVPGVAPINFHQNDPVEIKAVKLTSSRTQLPYEYYSLPFCQPSKITYKAENLGEVLRGDRIVNTPFQVLMNSEKKCEVLCSQSNKPVTLTVEQSRLVAERITEDYYVHLIADNLPVATRLELYSNRDSDDKKKESDIKWASRWDTY

SEQ ID NO: 922 - protein, 151 aa, Homo sapiens
HASGARRRLQAPPVPHDPQLPAGLRHSAVLYDPHRHLCSHAWDAVALQPGSSHDHSLLPLHVHGGVWRIFCWPSVPHFKRPSVEERSLLYGNSVPWCGFWHLLRIELLHLGKALIRSGALSHHGGSAVHVVRDLPAPRLLGLLLRLPKAAI

SEQ ID NO: 923 - protein, 236 aa, Homo sapiens
  SITE (55): Xaa equals any of the naturally occurring L-amino acids
MISLPGPLVTNLLRFLFLGLSALAPPSRAQLQLHLPANRLQAVEGGEVVLPAWYXLHGEVSSSQPWEVPFVMWFFKQKEKEDQVLSYINGVTTSKPGVSLVYSMPSRNLSLRLEGLQEKDSGPYSCSVNVQDKQGKSRGHSIKTLELNVLVPPAPPSCRLQGVPHVGANVTLSCQSPRSKPAVQYQWDRQLPSFQTFFAPALDVIRGSLSLTNLSSSMAGVYVCKAHNEVGTANVM

SEQ ID NO: 924 - protein, 11 aa, Homo sapiens
MSGGLSFLLLV

SEQ ID NO: 925 - protein, 302 aa, Homo sapiens
MARARGSPCPPLPPGRMSWPHGALLFLWLFSPPLGAGGGGVAVTSAAGGGSPPATSCPVACSCSNQASRVICTRRDLAEVPASIPVNTRYLNLQENGIQVIRTDTFKHLRHLEILQLSKNLVRKIEVGAFNGLPSLNTLELFDNRLTTVPTQAFEYLSKLRELWLRNNPIESIPSYAFNRVPSLRRLDLGELKRLEYISEAAFEGLVNLRYLNLGMCNLKDIPNLTALVRLEELELSGNRLDLIRPGSFQGLTSLRKLWLMHAQVATIERNAFDDLKSLEELNLSHNNLMSLPHDLFTPLHR

SEQ ID NO: 926 - protein, 224 aa, Homo sapiens
  SITE (76): Xaa equals any of the naturally occurring L-amino acids
MARARGSPCPPLPPGRMSWPHGALLFLWLFSPPLGAGGGGVAVTSAAGGGSPPATSCPVACSCSNQASRVICTRRXLAEVPASIPVNTRYLNLQENGIQVIRTDTFKHLRHLEILQLSKNLVRKIEVGAFNGLPSLNTLELFDNRLTTVPTQAFEYLSKLRELWLRNNPIESIPSYAFNRVPSLRRLDLGELKRLEYISEAAFEGLVNLRYLNLGMCNLKDIPN

SEQ ID NO: 927 - protein, 108 aa, Homo sapiens; identical to SEQ ID NO: 658

SEQ ID NO: 928 - protein, 130 aa, Homo sapiens
STCCGWGPLGHSRVRGCHCHLGHVGRHQHFVVTNSTVTNIFGQIPFYTSRQLLVCNPTGQREGPVTWLSHCPAPQMVLGLLFSLGPANTTVFTSAHWLSAVVPGSQWHVSPRSSLIPQHTPKGSVANTLN

SEQ ID NO: 929 - protein, 122 aa, Homo sapiens
  SITE (19): Xaa equals any of the naturally occurring L-amino acids
  SITE (73): Xaa equals any of the naturally occurring L-amino acids
KAPSSHPGLTCVSLSRLQXSLSLCFPSGPCWAGLLSSLALAGGAPGALPPWQPGQDSKMRTAELVGGSHGPAXGPGEAEPEPTAVVLWTVDPEGGLGQVPAEGPGGLCVPLGPGALVTWTPG

SEQ ID NO: 930 - protein, 223 aa, Homo sapiens
  SITE (132): Xaa equals any of the naturally occurring L-amino acids
AWYLLRVQVLQLVAAYLSLPSNNLSHSLWEQLCAQGWQTPEIALIDSHKLLRSIILLLMGSDILSTQKAAVETSFLDYGENLVQKWQVLSEVLSCSEKLVCHLGRLGSVSEAKAFCLEALKLTTKLQIPRQXALFLVLKGELELARNDIDLCQSDLQQVLFLLESCTEFGGVTQHLDSVKKVHLQKGKQQAQVPCPPQLPEEELFLRGPALELVPLWPRSLAP

SEQ ID NO: 931 - protein, 8 aa, Homo sapiens
AWFLVKPE

SEQ ID NO: 932 - protein, 83 aa, Homo sapiens [sequence omitted]

SEQ ID NO: 933 - protein, 243 aa, Homo sapiens; identical to SEQ ID NO: 666

SEQ ID NO: 934 - protein, 154 aa, Homo sapiens
  SITE (150): Xaa equals any of the naturally occurring L-amino acids
MARHGLPLLPLLSLLVGAWLKLGNGQATSMVQLQGGRFLMGTNSPDSRDGEGPVREATVKPFAIDIFPVTNKDFRDFVREKKYRTEAEMFGWSFVFEDFVSDELRNKATQPMKSVLWWLPVEKAFWRQPAGPGSGIRERLEHPVLHVSWXDARA

SEQ ID NO: 935 - protein, 57 aa, Homo sapiens
MPCTCTWRNWRQWIRPLVAVIYLVSIVVAVPLCVWELQKLEVGIHTKAWFIAGIFLL

SEQ ID NO: 936 - protein, 107 aa, Homo sapiens
  SITE (92): Xaa equals any of the naturally occurring L-amino acids
MVRYTYSMLSVIGISYAVLTWLSQTLWMPIYPLCVLAEAFAIYQSLPYFESFGTYSTKLPFDLSIYFPYVLKIYLMMLFIGMYFTYSHLYSXRRDILGIFPIKKKKM

SEQ ID NO: 937 - protein, 37 aa, Homo sapiens
MVRYTYSMLSVIGISYAVLTWAQSNTMDANLSFVCSC

SEQ ID NO: 938 - protein, 46 aa, Homo sapiens
MKSQCYSPSYFAFFCLVFFQITSASSQTLRGHVLCRTTLRDSSAYC

SEQ ID NO: 939 - protein, 442 aa, Homo sapiens
  SITE (364): Xaa equals any of the naturally occurring L-amino acids
MWFTYLLLYLHSVRAYSSRGAGCCCCWARWRRAVHTARGLRGRPRRQLLRPLRPAQGLAPGRHRLRPAVLPLHLQPLPGLWGGHAEWAALLYYGPFIVIFQFGWASTQISHLSLIPELVTNDHEKVELTALRYAFTVVANITVYGAAWLLLHLQGSSRVEPTQDISISDQLGGQDVPVFRNLSLLVVGVGAVFSLLFHLGTRERRRPHAEEPGEHTPLLAPATAQPLLLWKHWLREPAFYQVGILYMTTRLIVNLSQTYMAMYLTYSLHLPKKFIATIPLVMYLSGFLSSFLMKPINKCIGRNMTYFSGLLVILAFAAWVALAEGLGVAVYAAAVLLGAGCATILVTSLAMTADLIGPHTNSGXFVYGSMSFLDKVANGLAVMAIQSLHPCPSELCCRACVSFYHWAMVAVTGGVGVAAALCLCSLLLWPTRLRRWDRDARP

SEQ ID NO: 940 - protein, 309 aa, Homo sapiens
  SITE (26): Xaa equals any of the naturally occurring L-amino acids
  SITE (84): Xaa equals any of the naturally occurring L-amino acids
  SITE (111): Xaa equals any of the naturally occurring L-amino acids
AADNYGIPRACRNSARSYGAAWLLLXPAGSSRVEPTQDISISDQLGGQDVPVFRNLSLLVVGVGAVFSLLFHLGTRERRRPHAXEPGEHTPLLAPATAQPLLLWKHWLREXAFYQVGILYMTTRLIVNLSQTYMAMYLTYSLHLPKKFIATIPLVMYLSGFLSSFLMKPINKCIGRNMTYFSGLLVILAFAAWVALAEGLGVAVYAAAVLLGAGCATILVTSLAMTADLIGPHTNSGAFVYGSMSFLDKVANGLAVMAIQSLHPCPSELCCRACVSFYHWAMVAVTGGVGVAAALCLCSLLLWPTRLRR

SEQ ID NO: 941 - protein, 243 aa, Homo sapiens
  SITE (26): Xaa equals any of the naturally occurring L-amino acids
  SITE (84): Xaa equals any of the naturally occurring L-amino acids
  SITE (111): Xaa equals any of the naturally occurring L-amino acids
AADNYGIPRACRNSARSYGAAWLLLXPAGSSRVEPTQDISISDQLGGQDVPVFRNLSLLVVGVGAVFSLLFHLGTRERRRPHAXEPGEHTPLLAPATAQPLLLWKHWLREXAFYQVGILYMTTRLIVNLSQTYMAMYLTYSLHLPKKFIATIPLVMYLSGFLSSFLMKPINKCIGRNMTYFSGLLVILAFAAWVALAEGLGVAVYAAAVLLGAGCATILVTSLAMTADLIGPHTNSGLSCTAP

SEQ ID NO: 942 - protein, 148 aa, Homo sapiens
MAGSPLLWGPRAGGVGLLVLLLLGLFRPPPALCARPVKEPRGLSAASPPLARLALLAASGGQCPEVRRRGRCRPGAGAGASAGAERQERARAEAQRLRISRRASWRSCCASGAPPATLIRLWAWTTTPTRLQRSSLALCSAPALTLPP

SEQ ID NO: 943 - protein, 80 aa, Homo sapiens; identical to SEQ ID NO: 677

SEQ ID NO: 944 - protein, 47 aa, Homo sapiens
ILKSEPKLVSFINILGKEERKKEGGRERKKERKKERKKERKKKKKNS

SEQ ID NO: 945 - protein, 89 aa, Homo sapiens
MAKRTFSNLETFLIFLLVMMSAITVALLSLLFITSGTIENHKDLGGHFFSTTQSPPATQGSTAAQRSTATQHSTATQSSNSQLKLLQCL

SEQ ID NO: 946 - protein, 486 aa, Homo sapiens
MQPSGLEGPGTFGRWPLLSLLLLLLLLQPVTCAYTTPGPPRALTTLGAPRAHTMPGTYAPSTTLSSPSTQGLQEQARALMRDFPLVDGHNDLPLVLRQVYQKGLQDVNLRNFSYGQTSLDRLRDGLVGAQFWSAYVPCQTQDRDALRLTLEQIDLIRRMCASYSELELVTSAKALNDTQKLACLIGVEGGHSLDNSLSILRTFYMLGVRYLTLTHTCNTPWAESSAKGVHSFYNNISGLTDFGEKVVAEMNRLGMMVDLSHVSDAVARRALEVSQAPVIFSHSAARGVCNSARNVPDDILQLLKKNGGVVMVSLSMGVIQCNPSANVSTVADHFDHIKAVIGSKFIGIGGDYDGAGKFPQGLEDVSTYPVLIEELLSRGWSEEELQGVLRGNLLRVFRQVEKVQEENKWQSPLEDKFPDEQLSSSCHSDLSRLRQRQSLTSGQELTEIPIHWTAKLPAKWSVSESSPHMAPVLAVVATFPVLILWL

SEQ ID NO: 947 - protein, 151 aa, Homo sapiens; identical to SEQ ID NO: 687

SEQ ID NO: 948 - protein, 65 aa, Homo sapiens
  SITE (24): Xaa equals any of the naturally occurring L-amino acids
MCKGLKNPEGLLLLLLLLLFTDTXNSHCLPPYLSCFLHERQPELQSVCISAAYVLAPLQNPVSSL

SEQ ID NO: 949 - protein, 299 aa, Homo sapiens
  SITE (172): Xaa equals any of the naturally occurring L-amino acids
  SITE (174): Xaa equals any of the naturally occurring L-amino acids
GGEEEGEEGAEISGLGAGRRSAPIAVGLGFLGVGGRGGSDMEANGSQGTSGSANDSQHDPGKMFIGGLSWQTSPDSLRDYFSKFGEIRECMVMRDPTTKRSRGFGFVTFADPASVDKVLGQPHHELDSKTIDPKVAFPRRAQPKMVTRTKKIFVGGLSANTVVEDVKQYFEXFXKVEDAMLMFDKTTNRHRGFGFVTFENEDVVEKVCEIHFHEINNKMVECKKAQPKEVMFPPGTRGRARGLPYTMDAFMLGMGMLGESGQDRRSPWTGRAMEASTPNWVTYQWGKLLHLSKPQFPCL

SEQ ID NO: 950 - protein, 488 aa, Homo sapiens
  SITE (344): Xaa equals any of the naturally occurring L-amino acids
  SITE (416): Xaa equals any of the naturally occurring L-amino acids
  SITE (429): Xaa equals any of the naturally occurring L-amino acids
  SITE (430): Xaa equals any of the naturally occurring L-amino acids
MILSLLFSLGGPLGWGLLGAWAQASSTSLSDLQSSRTPGVWKAEAEDTSKDPVGRNWCPYPMSKLVTLLALCKTEKFLIHSQQPCPQGAPDCQKVKVMYRMAHKPVYQVKQKVLTSLAWRCCPGYTGPNCEHHDSMAIPEPADPGDSHQEPQDGPVSFKPGHLAAVINEVEVQQEQQEHLLGDLQNDVHRVADSLPGLWKALPGNLTAAVMEANQTGHEFPDRSLEQVLLPHVDTFLQVHFSPIWRSFNQSLHSLTQAIRNLSLDVEANRQAISRVQDSAVARADFQELGAKFEAKVQENTQRVGQLRQDVEERLHAQHFTLHRSISELQADVDTKLKRLHKAXEAPGTNGSLVLATPGAGARPEPDSLQARLGQLQRNLSELHMTTARREEELQYTLEDMRATLTRHVDEIKELXSESDETFDQISKXXRQVEELQVNHTALRELRVILMEKSLIMEENKEEVERQLLELNLTLQHLQGGMPTSSST

SEQ ID NO: 951 - protein, 60 aa, Homo sapiens; identical to SEQ ID NO: 702

SEQ ID NO: 952 - protein, 306 aa, Homo sapiens
  SITE (171): Xaa equals any of the naturally occurring L-amino acids
  SITE (180): Xaa equals any of the naturally occurring L-amino acids
  SITE (182): Xaa equals any of the naturally occurring L-amino acids
  SITE (188): Xaa equals any of the naturally occurring L-amino acids
  SITE (208): Xaa equals any of the naturally occurring L-amino acids
  SITE (210): Xaa equals any of the naturally occurring L-amino acids
  SITE (211): Xaa equals any of the naturally occurring L-amino acids
  SITE (218): Xaa equals any of the naturally occurring L-amino acids
  SITE (219): Xaa equals any of the naturally occurring L-amino acids
MALRLLRRAARGAAAAALLRLKASLAADIPRLGYSSSSHHKYIPRRAVLYVPGNDEKKIKKIPSLNVDCAVLDCEDGVAANKKNEARLRIVKTLEDIDLGPTEKCVRVNSVSSGLAEEDLETLLQSRVLPSSLMLPKVESPEEIQWAVCEETLKVGPQVGLFLDAVRFWRXRLSSHIGAXSXKETLDXLYARQKIVVIAKAFGLQAVXLXXIDFRDGXXLLRQSREGAAMGFTGKQVIHPNQIAVVQEQFSPSPEKIKWAEELIAAFKEHQQLGKGAFTFQGSMIDMPLLKQAQNTVTLATSIKEK

SEQ ID NO: 953 - protein, 40 aa, Homo sapiens
MSGSSLPSALALSLLLVSGSLLPGPGAAQNVRVQSGQDQK

SEQ ID NO: 954 - protein, 64 aa, Homo sapiens; identical to SEQ ID NO: 715

SEQ ID NO: 955 - protein, 26 aa, Homo sapiens
MSFPHASTLPFHKLSDLQHTLPNHQG

SEQ ID NO: 956 - protein, 50 aa, Homo sapiens
  SITE (4): Xaa equals any of the naturally occurring L-amino acids
  SITE (10): Xaa equals any of the naturally occurring L-amino acids
  SITE (22): Xaa equals any of the naturally occurring L-amino acids
  SITE (35): Xaa equals any of the naturally occurring L-amino acids
  SITE (39): Xaa equals any of the naturally occurring L-amino acids
  SITE (42): Xaa equals any of the naturally occurring L-amino acids
VHAXTPFAGXCFDPVSLYWCYXNPGTHCYPTLRGXEQRXPSXRSHIVLRS

SEQ ID NO: 957 - protein, 103 aa, Homo sapiens
  SITE (77): Xaa equals any of the naturally occurring L-amino acids
MAFLLERSGTLLICSMWWHHGYSNITGTEGERRNLKRNKTNFRRFQDGRIGTAPVYSSQCERCRRWVISAFPTEQTXHQKIISHAWLGGSHAHGASLIASTAV

SEQ ID NO: 958 - protein, 103 aa, Homo sapiens
MLTFFMAFLFNWIGFFLSFCLTTSAAGRYGAISGFGLSLIKWILIVRFSTYFPGYFDGQYWLWWVFLVLGFLLFLRGFINYAKVRKMPETFSNLPRTRVLFIY

SEQ ID NO: 959 - protein, 198 aa, Homo sapiens
  SITE (29): Xaa equals any of the naturally occurring L-amino acids
MKKSLENLNRLQVMLLHLTAAFLQRAQHXFDYKDESGFPKPPSYNVATTLPSYDEAERTKAEATIPLVPGRDEDFVGRDDFDDADQLRIGNDGIFMLTFFMAFLFNWIGFFLSFCLTTSAAGRYGAISGFGLSLIKWILIVRFSTYFPGYFDGQYWLWWVFLVLGFLLFLRGFINYAKVRKMPETFSNLPRTRVLFIY

SEQ ID NO: 960 - protein, 106 aa, Homo sapiens
  SITE (3): Xaa equals any of the naturally occurring L-amino acids
MAXALAALAAVEPACAAGTSSCRMKKSLENLNRLQVMLLHLTAAFLQRAQFSTYFPGYFDGQYWLWWVFLVLGFLLFLRGFINYAKVRKMPETFSNLPRTRVLFIY

SEQ ID NO: 961 - protein, 68 aa, Homo sapiens
  SITE (3): Xaa equals any of the naturally occurring L-amino acids
  SITE (16): Xaa equals any of the naturally occurring L-amino acids
  SITE (51): Xaa equals any of the naturally occurring L-amino acids
MAXALAALAAARAACXAGTSSCRMKKSLENLNRLQVMLLHLTAAFLQRAHXILTTRMSLGFQSPHLTM

SEQ ID NO: 962 - protein, 23 aa, Homo sapiens
  SITE (3): Xaa equals any of the naturally occurring L-amino acids
  SITE (13): Xaa equals any of the naturally occurring L-amino acids
  SITE (16): Xaa equals any of the naturally occurring L-amino acids
MAXALAALAAVEXPAXPVPAVAE

SEQ ID NO: 963 - protein, 188 aa, Homo sapiens
  SITE (85): Xaa equals any of the naturally occurring L-amino acids
  SITE (104): Xaa equals any of the naturally occurring L-amino acids
  SITE (164): Xaa equals any of the naturally occurring L-amino acids
MRPAFALCLLWQALWPGPGGGEHPTADRAGCSASGACYSLHHATMKRQAAEEACILRGGALSTVRAGAELRAVLALLRAGPGPGXGSKDLLFWVALERRRSHCXLENEPLRGFSWLSSDPGGLESDTLQWVEEPQRSCTARRWVLPGHRWGRARSWKEMRCHLXANATCASTSLRSCVLRRAPGPPLT

SEQ ID NO: 964 - protein, 57 aa, Homo sapiens
MLETLSQFISILFVLLWIISDLILCFLKCGNPGTLDMVLPIWTNQYIHSSRSILSFI

SEQ ID NO: 965 - protein, 44 aa, Homo sapiens [sequence omitted]

SEQ ID NO: 966 - protein, 44 aa, Homo sapiens [sequence omitted]

SEQ ID NO: 967 - protein, 57 aa, Homo sapiens; identical to SEQ ID NO: 741

SEQ ID NO: 968 - protein, 93 aa, Homo sapiens
  SITE (24): Xaa equals any of the naturally occurring L-amino acids
  SITE (65): Xaa equals any of the naturally occurring L-amino acids
QVSLPTRLLQMPGMGLDSRFQAWXPSPYLGPQPRAPRPGLQPGPSLRGAEFRESCPRSQKRGREXGRPCPGCRPGGWGLPARLGQPQLQTGPG

SEQ ID NO: 969 - protein, 172 aa, Homo sapiens
  SITE (170): Xaa equals any of the naturally occurring L-amino acids
MRGSVECTWGWGHCAPSPLLLWTLLLFAAPFGLLGEKTRQLLEFDSTNVSDTAAKPLGRPYPPYSLADFSWNNITDSLDPATLSATFQGHPMNDPTRTFANGSLAFRVQAFSRSSRPAQPPRLLHTADTCQLEVALIGASPRGNRSLFGLEVATLGQGPDCPSMQEQHSXER

SEQ ID NO: 970 - protein, 131 aa, Homo sapiens
MRGSVECTWGWGHCAPSPLLLWTLLLFAAPFGLLGEKTRQLLEFDSTNVSDTAAKPLGRPYPPYSLADFSWNNITDSLDPATLSATFQGHPMNDPTRTFANGSLAFRSRPFPGPADQPNPLASCTQQTPVS

SEQ ID NO: 971 - protein, 121 aa, Homo sapiens
MCFLMIFTFLVCWMPYIVICFLVVNGHGHLVTPTISIVSYLFAKSNTVYNPVIYVFMIRKFRRSLLQLLCLRLLRCQRPAKDLPAAGSEMQIRPIVMSQKDGDRPKKSDFQLFFHHFYHHQ

SEQ ID NO: 972 - protein, 49 aa, Homo sapiens
  SITE (41): Xaa equals any of the naturally occurring L-amino acids
MGAHSFGFQLFMSVSVLWGRLCLYGRFSVITFASPPTTFMXIQCCSHCS

SEQ ID NO: 973 - protein, 148 aa, Homo sapiens [sequence omitted]

SEQ ID NO: 974 - protein, 484 aa, Homo sapiens
MPRHLSGLLLLLWPLLLLLPPTPAAPGPLARPGLRRLGTRGPGGSPGRRPGSAVPTRAPYSGAGQPGGARGAGVCRSRPLDLVFIIDSSRSVRPLEFTKVKTFVSQIIDTLDIGAADTRVAVVNYASTVKIEFHLQTHSDKQSLKQAVARITPLSTGTMSGLAIQTAMDEAFTVEAGARGPTSNIPKVAIIVTDGRPQDQVNEVAARARASGIELYAVGVDRADMESLKMMASEPLDEHVFYVETYGVIEKLSSRFQETFCALDPCVLGTHRCQHVCVSDGEGKHHCECSQGYSLNADQKTCSAIDKCALNTHGCEHICVNDRTGSYHCECYEGYTLNQDRKTCSAQDQCAFGTHGCQHICVNDRDGSHHCECYEGYTLNADNKTCSVRSECAGGSHGCQHLCVDDGPAAYHCDCFPGYTLTEDRRTCAAIEEARRLVSTEDACGCEATLAFQERASSYLQRLNAKLDDILGKLQADAYGQIHR

SEQ ID NO: 975 - protein, 266 aa, Homo sapiens
  SITE (45): Xaa equals any of the naturally occurring L-amino acids
  SITE (47): Xaa equals any of the naturally occurring L-amino acids
  SITE (51): Xaa equals any of the naturally occurring L-amino acids
  SITE (134): Xaa equals any of the naturally occurring L-amino acids
  SITE (183): Xaa equals any of the naturally occurring L-amino acids
  SITE (222): Xaa equals any of the naturally occurring L-amino acids
  SITE (224): Xaa equals any of the naturally occurring L-amino acids
  SITE (255): Xaa equals any of the naturally occurring L-amino acids
MPRHLSGLLLLLWPLLLLLPPTPAAPGPLARPGLRRLGTRGPGGXPXRRPXSAVPTRAPYSGAGQPGGARGAGVCRSRPLDLVFIIDSSRSVRPLEFTKVKTFVSQIIDTLDIGAADTRVAVVNYASTVKIEFXLQTHSDKQSLKQAVARITPLSTGTMSGLAIQTAMDEAFTVEAGARGPTXNIPKVAIIVTDGRPQDQVNEVAARARASGIELYAVGVDXAXMESLQDEWPAKPLDEHVFYVETYGVIEKPSXRFQETLLRSWN

SEQ ID NO: 976 - protein, 5 aa, Homo sapiens
VLLIL

SEQ ID NO: 977 - protein, 84 aa, Homo sapiens
KMHFNKNKSILKSFSFVRGNMNEIHSYLKTEYFTAKTLNISRAYHILNTLWSCSYFNIPGSGGQLACLWLRICFHACFLSFFYL

SEQ ID NO: 978 - protein, 115 aa, Homo sapiens
  SITE (50): Xaa equals any of the naturally occurring L-amino acids
  SITE (70): Xaa equals any of the naturally occurring L-amino acids
  SITE (86): Xaa equals any of the naturally occurring L-amino acids
  SITE (100): Xaa equals any of the naturally occurring L-amino acids
MQPPSLLLLVLGLLAAPAAALVRIPLHKFTSVRRTMSELGGPVEDLIARXPISKYAQGVPSVAGGPVPEXLKETTWNAQILRGKFXHPGTPPRKLLPPVXPFEKRGSFPTLLGSP

SEQ ID NO: 979 - protein, 92 aa, Homo sapiens
  SITE (43): Xaa equals any of the naturally occurring L-amino acids
  SITE (69): Xaa equals any of the naturally occurring L-amino acids
  SITE (70): Xaa equals any of the naturally occurring L-amino acids
LVVLGVCAAQHELTPRLRAGVPVQVEREDVLLHQLLLHQVIKXGKHIVDRDAGVGHAQDAVELGRDEGXXRLLGGFPERLPLHLDASQARQT

SEQ ID NO: 980 - protein, 368 aa, Homo sapiens
  SITE (310): Xaa equals any of the naturally occurring L-amino acids
  SITE (365): Xaa equals any of the naturally occurring L-amino acids
MQPSSLLPLALCLLAAPASALVRIPLHKFTSIRRTMSEVGGSVEDLIAKGPVSKYSQAVPAVTEGPIPEVLKNYMDAQYYGEIGIGTPPQCFTVVFDTGSSNLWVPSIHCKLLDIACWIHHKYNSDKSSTYVKNGTSFDIHYGSGSLSGYLSQDTVSVPCQSASSASALGGVKVERQVFGEATKQPGITFIAAKFDGILGMAYPRISVNNVLPVFDNLMQQKLVDQNIFSFYLSRDPDAQPGGELMLGGTDSKYYKGSLSYLNVTRKAYWQVHLDQVEVASGLTLCKEGCEAIVDTGTSLMVGPVDEVRXLQKAIGAVPLIQGEYMIPCEKVSTLPAITLKLGGKGYKLSPEDYTLKVSQAGKTXCLS

SEQ ID NO: 981 - protein, 67 aa, Homo sapiens
MAPSGPLLLVLLVPLAAARPGPTSVPAGAAACPCGGTSCRGWGAGPTPGRTSTCPHLTCPRAGTGAT

SEQ ID NO: 982 - protein, 14 aa, Homo sapiens
PQGPNDVTAKLLCP

SEQ ID NO: 983 - protein, 6 aa, Homo sapiens
MLLLYL

SEQ ID NO: 984 - protein, 469 aa, Homo sapiens
MRPPGFRNFLLLASSLLFAGLSAVPQSFSPSLRSWPGAACRLSRAESERRCRAPGQPPGAALCHGRGRCDCGVCICHVTEPGMFFGPLCECHEWVCETYDGSTCAGHGKCDCGKCKCDQGWYGDACQYPTNCDLTKKKSNQMCKNSQDIICSNAGTCHCGRCKCDNSDGSGLVYGKFCECDDRECIDDETEEICGGHGKCYCGNCYCKAGWHGDKCEFQCDITPWESKRRCTSPDGKICSSRGTCVCGECTCHDVDPTGDWGDIHGDTCECDERDCRAVYDRYSDDFCSGHGQCNCGRCDCKAGWYGKKCEHPQSCTLSAEESIRKCQGSSDLPCSGRGKCECGKCTCYPPGDRRVYGKTCECDDRRCEDLDGVVCGGHGTCSCGRCVCERGWFGKLCQHPRKCNMTEEQSKNLCESADGILCSGKGSCHCGKCICSAEEWYISGEFCDCDDRDCDKHDGLICTREWNM

SEQ ID NO: 985 - protein, 161 aa, Homo sapiens
  SITE (123): Xaa equals any of the naturally occurring L-amino acids
  SITE (129): Xaa equals any of the naturally occurring L-amino acids
  SITE (145): Xaa equals any of the naturally occurring L-amino acids
  SITE (146): Xaa equals any of the naturally occurring L-amino acids
  SITE (157): Xaa equals any of the naturally occurring L-amino acids
MTTWSCLVAMIVSGVITAVWAVRAAPIWRSQVKQKMRIGKQGNCRPPRCICSALGLLAPWMAVVLSQLSVRCVVSWVQGKPSSPRPRGSAASPAPGATPPTPRKPVSWLGYRENHRPKKPKSXTRCLVXQNWSLPPISKDRTAGXXDTNRTRRSGLXLRLG

SEQ ID NO: 986 - protein, 325 aa, Homo sapiens
  SITE (10): Xaa equals any of the naturally occurring L-amino acids
  SITE (136): Xaa equals any of the naturally occurring L-amino acids
  SITE (186): Xaa equals any of the naturally occurring L-amino acids
  SITE (234): Xaa equals any of the naturally occurring L-amino acids
VPPAVCPAGXFCQNQCFTKRQYPETKIIKTDGKGWGLVAKRDIRKGEFVNEYVGELIDEEECMARIKHAHENDITHFYMLTIDKDRIIDAGPKGNYSRFMNHSCQPNCETLKWTVNGDTRVGLFAVCDIPAGTELXFNYNLDCLGNEKTVCRCGASNCSGFLGDRPKTSTTLSSEEKGKKTKKKTXRRRAKGEGKRQSEDECFRCGDGGQLVLCDRKFCTKAYHLSCLGLGKRXFGKWECPWHHCDVCGKPSTSFCHLCPNSFCKEHQDGTAFSCTPDGRSYCCEHDLGAASVRSTKTEKPPPEPGKPKGKRRRRRGWRRVTEGK

SEQ ID NO: 987 - protein, 40 aa, Homo sapiens; identical to SEQ ID NO: 768

SEQ ID NO: 988 - protein, 61 aa, Homo sapiens
MQGKFMKVQVYRFLKYLLMLLCMFVNRGMSKDSTKKPGQEKLKVSLGSILNMKSQRPLSWC

SEQ ID NO: 989 - protein, 131 aa, Homo sapiens [sequence omitted]

SEQ ID NO: 990 - protein, 173 aa, Homo sapiens
MVFLKFFCMSFFCHLCQGYFDGPLYPEMSNGTLHHYFVPDGDYEENDDPEKCQLLFRVSDHRRCSQGEGSQVGSLLSLTLREEFTVLGHQVEGCWARAGGHQQKHLLRPRRGRELWQVPAAGVPPDRGMPTPTRTNPSLSWRASSSRARNRTAGRRAGSTRTFWECWSTPGPC

SEQ ID NO: 991 - protein, 51 aa, Homo sapiens [sequence omitted]

SEQ ID NO: 992 - protein, 48 aa, Homo sapiens [sequence omitted]

SEQ ID NO: 993 - protein, 10 aa, Homo sapiens
IYQHFSLWLG

SEQ ID NO: 994 - protein, 4 aa, Homo sapiens
MFKM

SEQ ID NO: 995 - protein, 201 aa, Homo sapiens [sequence omitted]

SEQ ID NO: 996 - protein, 392 aa, Homo sapiens
  SITE (251): Xaa equals any of the naturally occurring L-amino acids
MAPWPPKGLVPAVLWGLSLFLNLPGPIWLQPSPPPQSSPPPQPHPCHTCRGLVDSFNKGLERTIRDNFGGGNTAWEEENLSKYKDSETRLVEVLEGVCSKSDFECHRLLELSEELVESWWFHKQQEAPDLFQWLCSDSLKLCCPAGTFGPSCLPCPGGTERPCGGYGQCEGEGTRGGSGHCDCQAGYGGEACGQCGLGYFEAERNASHLVCSACFGPCARCSGPEESNCLQCKKGWALHHLKCVDCAKACXGCMGAGPGRCKKCSPGYQQVGSKCLDVDECETEVCPGENKQCENTEGGYRCICAEGYKQMEGICVKEQIPESAGFFSEMTEDELVVLQQMFFGIIICALATLAAKGDLVFTAIFIGAVAAMTGYWLSERSDRVLEGFIKGR

SEQ ID NO: 997 - protein, 63 aa, Homo sapiens [sequence omitted]

SEQ ID NO: 998 - protein, 69 aa, Homo sapiens
MSRKSLAFPIICSYLCFLTVATCSIACTTVFFANLRHTRYICIELSALETSGVISPQINNVPEVHGKYS

SEQ ID NO: 999 - protein, 102 aa, Homo sapiens
MTVRRLSLLCRDLWALWLLLKAGAVRGARAGPRLPGRCCGATCGDAGRGWTFWAQPCPQKLLGQKPGAGGCRGWVLGWVPPRPEEPCSLAGKVCTGLARWMV

SEQ ID NO: 1000 - protein, 53 aa, Homo sapiens
  SITE (41): Xaa equals any of the naturally occurring L-amino acids
MCKAVCKHRLRLFAVSSFSLGLGWVCVLVLMLWPVRLSLAXRPVQLQQRRSHC

SEQ ID NO: 1001 - protein, 472 aa, Homo sapiens; identical to SEQ ID NO: 786

SEQ ID NO: 1002 - protein, 178 aa, Homo sapiens
SIYSPHTGIQEYQDGVPKIPTACITVEDAEMMSRMASHGIKIVIQLKMGAKTYPDTDSFNTVAEITGSKYPEQVVLVSGHLDSWDVGQGAMDDGGGAFISWEALSLIKDLGLRPKRTLRLVLWTAEEQGGVGAFQYYQLHKVNISNYSLVMESDAGTFLPTGLQFTGSEKARASWRRL

SEQ ID NO: 1003 - protein, 199 aa, Homo sapiens
  SITE (142): Xaa equals any of the naturally occurring L-amino acids
MKLGCVLMAWALYLSLGVLWVAQMLLAASFETLQCEGPVCTEESSCHTEDDLTDAREAGFQVKAYTFSEPFHLIVSYDWLILQGPAKPVFEGDLLVLRCQAWQDWPLTQVTFYRDGSALGPPGPNREFSITVVQKADSGHYXCSGIFQSPGPGIPETASVVAITVQELFPAPILLLQGWKDSAKQGGSPQNSRSPQLQK

SEQ ID NO: 1004 - protein, 2 aa, Homo sapiens
SW

SEQ ID NO: 1005 - protein, 32 aa, Homo sapiens
CLETFWSLYLGGWGMVGCVCYWHPVNRSQGCR

SEQ ID NO: 1006 - protein, 283 aa, Homo sapiens
MYLSALQSLIPSLFALVLQNAPFSSKAKLHGEVPQIEVTRFPRPMSPLQDVSTIIGSREQLAVLLQLYDYQLEQEGTTGWESLLWVVNQLLPQLIEIVGKINVTSTACVHEFSRFFWRLCRTFGKIFTNTKVKPQFQEILRLSEENIDSSAGNGVLTKATVPIYATGVLTCYIQEEDRKLLVGFLEDVMTLLSLSHAPLDSLKASFVELGANPAYHELLLTVLWYGVVHTSALVRCTAARMFEVCQHMPLLVSIIMIFFFLRRRREFFLIKRLCISKKKKKKK

SEQ ID NO: 1007 - protein, 286 aa, Homo sapiens
  SITE (204): Xaa equals any of the naturally occurring L-amino acids
  SITE (224): Xaa equals any of the naturally occurring L-amino acids
  SITE (228): Xaa equals any of the naturally occurring L-amino acids
  SITE (264): Xaa equals any of the naturally occurring L-amino acids
  SITE (271): Xaa equals any of the naturally occurring L-amino acids
MYLSALQSLIPSLFALVLQNAPFSSKAKLHGEVPQIEVTRFPRPMSPLQDVSTIIGSREQLAVLLQLYDYQLEQEGTTGWESLLWVVNQLLPQLIEIVGKINVTSTACVHEFSRFFWRLCRTFGKIFTNTKVKPQFQEILRLSEENIDSSAGNGVLTKATVPIYATGVLTCYIQEEDRKLLVGFLEDVMTLLSLSHAPLDSLKXSFVELGANQAYHELLLTVLXYGVXHTSALVRCTAARMFELLVKGVNETLVAQRVVPALHXLSPVDPXNLCQDCHNFQPLGLF

SEQ ID NO: 1008 - protein, 45 aa, Homo sapiens
  SITE (43): Xaa equals any of the naturally occurring L-amino acids
MQAPLQDCGRSVSLRLACVLAPLTTSSRGCHLQLPQDKGKARXDS

SEQ ID NO: 1009 - protein, 305 aa, Homo sapiens
MGILLGLLLLGHLTVDTYGRPILEVPESVTGPWKGDVNLPCTYDPLQGYTQVLVKWLVQRGSDPVTIFLRDSSGDHIQQAKYQGRLHVSHKVPGDVSLQLSTLEMDDRSHYTCEVTWQTPDGNQVVRDKITELRVQKHSSKLLKTKTEAPTTMTYPLKATSTVKQSWDWTTDMDGYLGETSAGPGKSLPVFAIILIISLCCMVVFTMAYIMLCRKTSQQEHVYEAARAHAREANDSGETMRVAIFASGCSSDEPTSQNLGNNYSDEPCIGQEYQIIAQINGNYARLLDTVPLDYEFLATEGKSVC

SEQ ID NO: 1010 - protein, 72 aa, Homo sapiens
MKFVPCLLLVTLSCLGTLGQAPRQKQGSTGEEFHFQTGGRDSCTMRPSSLGQGAGEVWLRVRLPQHRPDLLV

SEQ ID NO: 1011 - protein, 121 aa, Homo sapiens
MGLWLGMLACVFLATAAFVAYTARLDWKLAAEEAKKHSGRQQQQRAESTATRPGPEKAVLSSVATGSSPGITLTTYSRSECHVDFFRTPEEAHALSAPTSRLSVKQLVIRRGAALGAASAH

SEQ ID NO: 1012 - protein, 509 aa, Homo sapiens
MTWRMGPRFTMLLAMWLVCGSEPHPHATIRGSHGGRKVPLVSPDSSRPARFLRHTGRSRGIERSTLEEPNLQPLQRRRSVPVLRLARPTEPPARSDINGAAVRPEQRPAARGSPREMIRDEGSSARSRMLRFPSGSSSPNILASFAGKNRVWVISAPHASEGYYRLMMSLLKDDVYCELAERHIQQIVLFHQAGEEGGKVRRITSEGQILEQPLDPSLIPKLMSFLKLEKGKFGMVLLKKTLQVEERYPYPVRLEAMYEVIDQGPIRRIEKIRQKGFVQKCKASGVEGQVVAEGNDGGGGAGRPSLGSEKKKEDPRRAQVPPTRESRVKVLRKLAATAPAFPQPPSTPRATTLPPAPATTVTRSTSRAVTVAARPMTTTAFPTTQRPWTPSPSHRPPTTTEVITARRPSVSENLYPPSRKDQHRERPQTTRRPSKATSLESFTNAPPTTISEPSTRAAGPGRFRDNRMDRREHGHRDPNVVPGPPKPAKEKPPKKKAQDKILSNEYEEV

SEQ ID NO: 1013 - protein, 554 aa, Homo sapiens
MGPRFTMLLAMWLVCGSEPHPHATIRGSHGGRKVPLVSPDSSRPARFLRHTGRSRGIERSTLEEPNLQPLQRRRSVPVLRLARPTEPPARSDINGAAVRPEQRPAARGSPREMIRDEGSSARSRMLRFPSGSSSPNILASFAGKNRVWVISAPHASEGYYRLMMSLLKDDVYCELAERHIQQIVLFHQAGEEGGKVRRITSEGQILEQPLDPSLIPKLMSFLKLEKGKFGMVLLKKTLQVEERYPYPVRLEAMYEVIDQGPIRRIEKIRQKGFVQKCKASGVEGQVVAEGNDGGGGAGRPSQGSEKKKEDPRRAQVPPTRESRVKVLRKLAATAPAFPQPPSTPRATTLTPAPATTVTRSTSRAGNRCCKTYDHHWLSHHAEALDPLTLPTGPLQPLRVITARRPSVSRESLPSIPGRISTGRGHRQPGGPARPTSLESFTNAPPTTISEPSTRAAGPGRFRDNRMDRREHGHRDPNVVPGPPKPAKEKPPKKKAQDKILSNEYEEKYDLSRPTASQLEDELQVGNVPLKKAKESKKHEKLEKPEKEKKKKKKK

SEQ ID NO: 1014 - protein, 23 aa, Homo sapiens
MLALLGLLAGTEHPPGPQGPGPS

SEQ ID NO: 1015 - protein, 57 aa, Homo sapiens
MAGCCLKLFGVLSLCFLCGLISIERVICNPVSADFQVSTFCQRHCLLRSKVMFPIRG

SEQ ID NO: 1016 - protein, 25 aa, Homo sapiens
MVNIFGFVSCIVFVVAVQLCYMKQP

SEQ ID NO: 1017 - protein, 606 aa, Homo sapiens; identical to SEQ ID NO: 813

SEQ ID NO: 1018 - protein, 122 aa, Homo sapiens
  SITE (92): Xaa equals any of the naturally occurring L-amino acids
  SITE (100): Xaa equals any of the naturally occurring L-amino acids
  SITE (109): Xaa equals any of the naturally occurring L-amino acids
  SITE (116): Xaa equals any of the naturally occurring L-amino acids
MLALTLAKADSPRTALLCSAWLLTASFSAQQHKGSLQVHQTLSVEMDQVLKALSFPKKKAALLSTAILCFLRTALRQSFSSAWNPGALKGPXTAATKDTXLTSLRMSKXGPGHWAXKTSWCK

SEQ ID NO: 1019 - protein, 216 aa, Homo sapiens
  SITE (6): Xaa equals any of the naturally occurring L-amino acids
  SITE (18): Xaa equals any of the naturally occurring L-amino acids
CFPWGXALRQKLFPSALXALVPSGAQPLPATKDTVLAPLRMSQVRSLVIGLQNLLVQKDPLLSQACVGCLEALLDYLDARSPDIALHVASQPWNRFLLFTLLDAGENSFLRPEILRLMTLFMRYRSSSVLSHEEVGDVLQGVALADLSTLSNTTLQALHGFFQQLQSMGHLADHSMAQTLQASLEGLPPSTSSGQPPLQDMLCLGGVAVSLSHIRN

SEQ ID NO: 1020 - protein, 127 aa, Homo sapiens
MLPLLIICLLPAIEGKNCLRCWPELSALIDYDLQILWVTPGPPTELSQSIHSLFLEDNNFLKPWYLDRDHLEEETAKFFTQVHQAIKTLRDDKTVLLEEIYTHKNLFTERLNKISDGLKEKEPHPSP

SEQ ID NO: 1021 - protein, 164 aa, Homo sapiens
  SITE (126): Xaa equals any of the naturally occurring L-amino acids
MLPLLIICLLPAIEGKNCLRCWPELSALIDYDLQILWVTPGPPTELSQSIHSLFLEDNNFLKPWYLDRDHLEEETAKFFTQVHQAIKTLRDDKTVLLEEIYTHKNLFTERLNKISDGLKEKGAPPXSMNAFPAPSPTCTPEPLGSVCLPSTSVSLPSHLPGSLQ

SEQ ID NO: 1022 - protein, 39 aa, Homo sapiens; identical to SEQ ID NO: 828

SEQ ID NO: 1023 - protein, 60 aa, Homo sapiens
  SITE (2): Xaa equals any of the naturally occurring L-amino acids
MXLAFSVIILAGAGSSRSWNSVLVEKEVVEGGLGPWGNCSAEPLPHLLLPRTNLKAKVPG

SEQ ID NO: 1024 - protein, 240 aa, Homo sapiens
  SITE (67): Xaa equals any of the naturally occurring L-amino acids
GEGDDKEESVEKLDCHYSGHHPQPASFCTFGSRQIGRGYYVFDSRWNRLRCALNLMVEKHLNAQLWXKIPPVPSTTSPISTRIPHRTNSVPTSQCGVSYLAAATVSTSPVLLSSTCISPNSKSVPAHGTTLNAQPAASGAMDPVCSMQSRQVSSSSSSPSTPSGLSSVPSSPMSRKPQKLKSSKSLRPKESSGNSTNCQNASSSTSGGSGKKRKNSSPLLVHSSSSSSSSSSSSHSMGVF

SEQ ID NO: 1025 - protein, 71 aa, Homo sapiens; identical to SEQ ID NO: 839

SEQ ID NO: 1026 - protein, 140 aa, Homo sapiens
  SITE (136): Xaa equals any of the naturally occurring L-amino acids
MASLGLQLVGYILGLLGLLGTLVAMLLPSWKTSSYVGASIVTAVGFSKGLWMECATHSTGITQCDIYSTLLGLPADIQAAQAMMVTSSAISSLACIISVVGMRCTVFCQESRAKDRVAVAGGVFFILGSLLGFIPXAWNL

SEQ ID NO: 1027 - protein, 86 aa, Homo sapiens
  SITE (33): Xaa equals any of the naturally occurring L-amino acids
  SITE (43): Xaa equals any of the naturally occurring L-amino acids
RRFYSPLVPDSMKFEIGEALYLGIISSLFSLIXGIILCFSCSXQRNRSNYYDAYQAQPLATRSSPRPGQPPKVKSEFNSYSLTGYV

SEQ ID NO: 1028 - protein, 42 aa, Homo sapiens; identical to SEQ ID NO: 843

SEQ ID NO: 1029 - protein, 76 aa, Homo sapiens
INFTYKRLSLDFIYIYMCVCVCVCVCVCVCVYLKRTCASIKGNKMREYIIDFVKSKYLNYGFSIFKNSCSFCTYFF

SEQ ID NO: 1030 - protein, 91 aa, Homo sapiens
MLCHPHVHHHLVCLLATLTFSLNASCAEQTFHSQQSNGEFMATLPSISKQFGVIVWKPQRKDVIRLPVALSFSMGLGLLSPALGRFLASEL

SEQ ID NO: 1031 - protein, 145 aa, Homo sapiens
MSQAWVPGLAPTLLFSLLAGPQKIAAKCGLILACPKGFKCCGDSCCQENELFPGPVRIFVIIFLVILSVFCICGLAKCFCRNCREPEPDSPVDCRGPLELPSIIPPERVILKPSLGPTPTEPPPPYSFRPEEYTGDQRGIDNPAF

SEQ ID NO: 1032 - protein, 142 aa, Homo sapiens [sequence omitted]

SEQ ID NO: 1033 - protein, 119 aa, Homo sapiens
MRRLLLVTSLVVVLLWEAGAVPAPKVPIKMQVKHWPSEQDPEKAWGARVVEPPEKDDQLVVLFPVQKPKLLTTEEKPRGTKAWMETEDTLGRVLSPEPDHDSLYHPPPEEDQGEERPRL

SEQ ID NO: 1034 - protein, 462 aa, Homo sapiens
  SITE (115): Xaa equals any of the naturally occurring L-amino acids
MRLRVRLLKRTWPLEVPETEPTLGHLRSHLRQSLLCTWGYSSNTRFTITLNYKDPLTGDEETLASYGIVSGDLICLILQDDIPAPNIPSSTDSEHSSLQNNEQPSLATSSNQTSXQDEQPSDSFQGQAAQSGVWNDDSMLGPSQNFEAESIQDNAHMAEGTGFYPSEPMLCSESVEGQVPHSLETLYQSADCSDANDALIVLIHLLMLESGYIPQGTEAKALSMPEKWKLSGVYKLQYMHPLCEGSSATLTCVPLGNLIVVNALNLPDVFGLVVLPLELKLRIFRLLDVRSVLSLSAVCRDLFTASNDPLLWRFLYLRDFRDNTVRVQDTDWKELYRKRHIQRKESPKGRFVMLLPSSTHTIPFYPNPLHPRPFPSSRLPPGIIGGEYDQRPTLPYVGDPISSLIPGPGETPSQFPPLRPRFDPVGPLPGPNPILPGRGGPNDRFPFRPSRGRPTDGRLSFM

SEQ ID NO: 1035 - protein, 174 aa, Homo sapiens
MFVPSCLCLRFVVTSLLLQMTHSCGGFYICVIFETILSEFKTQIGRLYRKRHIQRKESPKGRFVMLLPSSTHTIPFYPNPLHPRPFPSSRLPPGIIGGEYDQRPTLPYVGDPISSLIPGPGETPSQFPPLRPRFDPVGPLPGPNPILPGRGGPNDRFPFRPSRGRPTDGRLSFM

SEQ ID NO: 1036 - protein, 53 aa, Homo sapiens
MVTFINATLWIAVFSYIMVWLVTIIGYTLGIPDVIMGITFLAAGQVFQTAWPA

SEQ ID NO: 1037 - protein, 169 aa, Homo sapiens
  SITE (6): Xaa equals any of the naturally occurring L-amino acids
  SITE (39): Xaa equals any of the naturally occurring L-amino acids
  SITE (44): Xaa equals any of the naturally occurring L-amino acids
  SITE (71): Xaa equals any of the naturally occurring L-amino acids
MVTFIXATLWIAVFSYIMVWLVTIIGYTLGIPDVIMGIXFLAAXTSVPDCMASLIVARQGLGDMAVSNTIXSNVFDILVGLGVPWGLQTMVVNYGSTVKINSRGLVYSVVLLLGSVALTVLGIHLNKWRLDRKLGVYVLVLYAIFLCFSIMIEFNVFTFVNLPMCREDD

SEQ ID NO: 1038 - protein, 187 aa, Homo sapiens; identical to SEQ ID NO: 857

SEQ ID NO: 1039 - protein, 40 aa, Homo sapiens; identical to SEQ ID NO: 859

SEQ ID NO: 1040 - protein, 122 aa, Homo sapiens; identical to SEQ ID NO: 862

SEQ ID NO: 1041 - protein, 159 aa, Homo sapiens
MWLFILLSLALISDAMVMDEKVKRSFVLDTASAICNYNAHYKNHPKYWCRGYFRDYCNIIAFSPNSTNHVALKDTGNQLIVTMSCLNKEDTGWYWCGIQRDFARDDMDFTELIVTDDKGTWPMTLVWERLSGTKPEAARLPKLSARLTAPGRPFSSFAY

SEQ ID NO: 1042 - protein, 71 aa, Homo sapiens
  SITE (40): Xaa equals any of the naturally occurring L-amino acids
  SITE (51): Xaa equals any of the naturally occurring L-amino acids
  SITE (55): Xaa equals any of the naturally occurring L-amino acids
MWLFILLSLALISDAMVMDEKVKRSLCWTRLLPSATTMPXTRITPNTGAEXISVXTATSSPSPLTAPIMWP

SEQ ID NO: 1043 - DNA, 15090 bp, Homo sapiens
acgttccctacttcctgtgctcttgcggagacgcgcgcgtcggggtttaacgcgtttctgggccgccgtaagcccggcctaggggcagctttgactcgagagccggctataggcgcatggaaggttccctggaacgggaggcgccagcgggggcgctggccgccgtgctaaagcacagctcgacgttgccgcccgaaagcacccaggtccggggctacgacttcaaccgcggtgtgaattaccgcgcactgctggaggccttcggcaccaccggcttccaagcaaccaacttcgggcgcgctgtacagcaagtcaatgccatggtgaggaccgggcggaatttctagggacgcggaggggcgtggcttgtagaaccaacgcggtactagacgggggcagcgtttccagtggaggggatatgtcttttatttgagttgcccaatagttggaggaaggcgggacctattctgggcgggagtttctgtcctgggaaggggattttgcactctggtagttacatgctggtacggtaacctgaggaggcgaggactgattcttggtgtgggggcgggttctaggtacatttaaagctttctggaatgggcggagcctggggcaagacaaattaagggaggatatgggaggaggagcctaagtctgggcggttcttgaatttagatttgcttttcccagcggggaagggaccggatctgaaaggagatgctctctgattcctaaaagggtgggggctggctgggcgcggtggcgcatgcctataatcccagcattttgggaagccgaggcgggtggatcaagagaagaggagttcgagacaagcctggccaacatggtgaaaccctgtctctactaaaatgcaaaaaattagccgggcatggtgttgcgcgcctgtagtcccagctactcgggaggctgaggcaggagaatcgcttgaacccgcgaggtggaggttgcagtgagctgagattgcgccactgcactccagcctggtgacagagcgatactctgtctcaaaaaaaaaaaaaaaaaaaggccgggcacggtggctcatgcctgtaatctcagcattttgggaggccgaggcgggcggatcacctgaggtcgggagttcgagaccagcctgaccaacatggagaaaccccgtctctactaaaatgcaaaaaattagccgggcatggtggtgcgcgcctgtagtcccagctactcgggaggctgaggcaggagaatcgcttgaacccgggaggtggagcttgcagtgagccgagatcgcgccattgcactctagcctgggtaacaagagtgaaactccgtccaaaaaaaaaaaaaaaagggtgggggcaaatcctgaacgtgtgtcttgagatctggtctgggaaggggcagagtttacacaggagatgttccttggtcccctgtagaactggtcctgtatccctgaatgtgcagggcctggggtgaaatctgtttctggagcccacctggagtcctgagtctgggatttaaggccagtgcttaacttgacttggcccttactcacagatcgagaagaagctggaaccactgtcacaggatgaagaccagcacgcggacctgacccagagccgccgcccacttaccagctgcaccattttcctgggatatacatccaacctcatcagttcaggcatccgtgagaccattcgctaccttgtgcagcacaacatggtggggacctggtgaggccgtggccttggcctctgggtcaatgggcaatgcagttattgatcgtttaagtgagatgggcagataggggtctgttataagcagaggaatagaatcaagttttgttttgtagcagagctccctcataagagtcactggacaaggatgaggttagaagttctgcccagaatgagggcaggggcttccttcttgggccaaattcactgccttgtggctgcaggtggacgtattggtgaccacagctggcggcgtggaggaagacctcatcaagtgcctggcgcccacatacttgggcgagtttagcctcagggggaaggagctccgggagaacgggatcaataggtgagaaccctgagtggtgttgggcaggggagctggaccaagggtcctggggcctgatgcctacatgcctcctgttctcaggatcggaaacctgctggtgcccaatgagaattactgcaagtttgaggactggctgatgcccattctggaccagatggtgatggagcagaacacagaggtggggctggggcaacctggaggggccagttcagtgggagtcaggggaggcatggcctgaaggtcacatcctctcctagggtgtaaagtggacgccttctaagatgatcgcccggctgggcaaggagatcaacaacccagagtccgtgtattactgggcccagaaggtgaggacctaagcgggagcaaagtagccagactttggcatgtgttaacttatttcatctttccagcctcctggggattcagtactgttattctcagcatcctcactcttagatgaggagactcaaacacagataggcgtggtaattttttttttttttgagacaggatcttgctctgtcacctaggctggagtgcagtggtgtgatcacagctcattgcagcctcaacctcctggggccaagcagtcctcccacctcagcctctcgagtagctgggaccacaggcacatgccatcatgcccagctaattttaaaaattttttgtagagatgggggtctccctgtgtttcccaggctggtcttgaactcctggcgtcaggcagtcctcccaccttggcctcccaaagtgctgggattacaggcgtgagccactgtgcccagccaggctaggtaattttgtctgaagtcacacagataactagtggggcctcagcatccttatgctcctcccagactatctctggaacagtagaggcaacacttagcaactctcctggggcctggctcagggtcccacactcccagatgctataaaataagagctacccactccctttaattagagaatcagaacctgaaaaaaaaaaaaaaaaagctacatagtctttttttttttttttttttttttgagacagagtcttgctctgtcgcccaggctggagtgtaatggtgtgatttcagctcactgcaccctccacctcccaggttcaagtgattctcccgcctcaccctcctgagtagctgggactataggcacccaccatcatgcccggccaatttttgtatttttctacagatggggtttcaccatgttggccaggctggtcttgaactcctgacctcaagtgatccacccgccttggcctcccaaagtgctgggattacaggggtgagccaccacacccagcctacttactctttcttttttacgagacagggtctcattctgtttcccaggctggagtgcaatggcacaataatggctcactgctgtcttgagcttctgggctcagtcgattctcctgcctcagcctgctgagtagctgggactacaggtgcgtgccaccatgcctggctaattgtttttgtagagatgggaactcaccatgttgcacaagctggctctttttttttttttgagacggagttttgctcttgttacccaggccagagtccaatggcgcaatcttggctcacagcaacctctacctcctgggttcaagcaattctcctgcctcagcatcaagttcccaagtagctgggattataggcatgtgccaccacccctggctaattttgtatttttagtagaggcagggtttctccatgttggtcaggctggtgtcgagctcctgacctcaggtgatccacccgcctcggcctcccaaagtgctgggattacaagcgtgagccaccgcgcccggccacaagctggctctttaaaaaagaattagacggccgggcacggtggctcatgcttgtaatcccagtactttgggggctgaggcgggtggatcacctgaagtcaggagttcaagaccagcctggccaacatggtggaaccctgtctctactaaaaaaacaaaatgcaaaattagctgggcatagtggcatgcgcctgtaatcctagctactcgggaggctgaagcaggagaatcactggaacccaggaggcagaggttgcagtgagctgagatagtgccattgcactccagcctgggcaacgagtgaaactccgtctcagggaataaaaaaaaagagagagaaacagctcagcaagctaagaataggctggttctttatgtgccaggcactatactaagtgttttctgtgggttttctcatataggcctcatctgtgagaggtgtttctgttatgcttataattgaggaaacagtcctagagaaattaggcaccccatccacagtcagatagtcatatagccagcatggagacgaggctctgagctccagccactgtcctgtcatgttctctgcagaaccacatccctgtgtttagtcccgcacttacagacggctcgctgggcgacatgatcttcttccattcctacaagaacccgggcctggtcctggacatcgttgagggtgaggcgctagggccacagaggagaggggaaggagggctggctgagtccaaggcctgacttcggcgctcttcccccagacctgaggctcatcaacacacaggccatctttgccaagtgcactgggatgatcattctgggcgggggcgtggtcaagcaccacattgccaatgccaacctcatggtgagtgggggtggcgcttcggcccactctgcagacatgctgtgtggtgggcctatgccatgtgctgggtagacagcatgaactagacaggccaggatccctgctccccgggactgatgttctagtaggggagatagcaaacaagtgacatccacgtcagggggcagtcattgctacggggaatactaaatgatggcatgagaagagaaaggggtgctgtccaacaagaggttttggaaggaggcttctggaagtgtgagctgggagcaggggtttggggaggcatctcccaggagctatgtggttgtctcccgtgccaggagtttgtgctgctgtactagcattgagcttctggattgcaaagttcccaggagagggaacagccattgcaaaggctctggggcgcctgaagtaatccaggaacagctgggtacctggtgaggggaaggtggagtggtgagggccaggaggtgatgcagggaggtgccacagggagcctgctgggccctgtgggctgaggcggggctttggcttttgcactgagagaagtgggagaggacttgactcgggttcccatgctccccctggtggccatgtggtgaacagatggtggcaggtgagtgagaactccagtccaggacagtggtgaccatgcagggatcaggaggcaggcggtggttggatttggagggcttctgaagatagagttgctggcagctcctgccttgcagatggggcagggttgttgacacctggctgttgggtctggggaaacacagccatcgttgcccagcagctctagtgaccccagacattgacatgggccctgtctgggagcgaatgtctgtgaagggcttccttcatctgggacacacctctcagcctgtttggctacggtgtcctccctctgtgtctgtctcctgtgactggctgactgggcccaccgtgcccccgcctccccacagcggaacggggccgactacgctgtttacatcaacacagcccaggagtttgatggctctgactcaggtgcccgaccagacgaggctgtctcctggggcaagatccgggtggatgcacagcccgtcaaggtaagcgctggctgggtggggcatagggtctctgggacgatgagtgtgggtcccatggcttacccaggttcccccctacccaggtctatgctgacgcctccctggtcttccccctgcttgtggctgaaacctttgcccagaagatggatgccttcatgcatgagaagaacgaggactgagcggctgcggtcccaggaaggtcttaccccctcttctatttattaatttgcagacccagcccctcccctactttttggtcagctacgtctctagaataagatggtatctgaagtccttccatgtctgtgtctcggtccttggtcctgttggtgggtcccctggcttcagcctgctccatcctctgcctcataggcctcctctcgccagcactggacgctgcctcccatggcggtcagcaggcagggctctgttgggtggtaggccagcgactgcaccacaccggaacccacaggcagggccagagccagcgcaccctgtggagcgaggggtagggagtggttatctgtggctgggctgtaccctggtttctgaggtccctgggcaccccccatctcagtcctgcctgaagccctcagtcacctctccccgaccttcagccacctgcctctaattgcctcctagacactgcaaaattaatctacctcagactgagcccctcagtagctctgtcctaccaggtgttcaggccgcaagtcttgggagcctcttattgattttttattttttaaaatagcagagatggggtcttaccatgttgcccaggctggtctcgaactcctggcctcaagtgatcctcctgccttggcctcccaaagtgctaggactacaggtgtgagccaccatgcctggctttgggagtctttttctttttctgtttttttttgagatggagtcttgctctgtcgccaggctggagtgcagtggcgccatctgggctcactgcaacctccgactccctagttcaagcgattctcctgcctcagcctcccgagtaggtgggattacaggcacgcgctaccatgcccagctaatttttgtatttttagtacagatggggtttcaccatgttggccaggatgatctctatctcctgacctcgtgatccacccccctcggcctcccaaagtgctgggattacaggtgtgaaccaccatgcctggccgggagtctttttcttgtaccacatgttcctctatcagttattcctcttggctctgcttctagaccatgtccagagactgctgattttctgccactaccatgtttggagcatgccttgctcacagcttgcctgttccctgccaccagctgggctccatcctgtccatttggcagccccaatgatccccacttcccctggtcccaacacaatgtaaacagttcctcaagcaagccatgcttcctctttccaccttgaaaatgtcccttgatgtgcctgccctccaaggcaacttctgttctactgggcccataagaaataggtggaacattcttgctaccttagttcctaaagcaagagcttgtccgccaagtcttcagggcccccccggttccctccatcctcttatgggccttagttcccctggccaagcccagcgctgatgtctcctttgccgagattcccccggctctgaccccactacaccaggatggtctgtttctggcctgactccccaccaggctgggacatgtcaaggacagggctcagggcttgaaaccatgcacagggatgctaagatgtagctccagtttcttgaatgactgcagccctatctcacccaaggttagacatggccgtcggctcccccttgcccaggggtcagtgccagttgctcggcctggcatctgcagcccagcctgaccccggatcttgccgcacctgccgccaccctgaagcctttgtttcctgactgatgcatgcgcaggctacacctcttaacatatgctgttccctttgcctggaatgcccttcctgcctcatcttctctctagcccaagctgggcacggtgtctcaggcctgtaatcccagcactttgggaggccgaggcgggtgaatcacttgaggtcaggagtttgagaccagcctggccaacatggtgaaaccctgtctctactaaaaatacaaaaattagccaggtatggtggtaggggcctgtaatcccagctactcaggaggctgagacatgagaatcacctgaaccctggggggaagaggttgcagtgagctgagatggcgccactgcatttgcctgggcaatagtctcaaaaaaagaaaaaagggccgggtgtggtggcttacgcctgtaatcctagcacttgggaaggctgaggtgggtggatcatgaggtcaggagtttaagaccagcctgaccaacatagtgaaaccctgtctctactaaaaatacaaaaattagctgggtgtggtggcacgcacctataatcccaactactcaggagactgaggcaggagaatcgcttgaacttgggaggcggagtttacagtgagccaagattgcgccactgcactctagcctgggcgacagagcaagacttgtctcaaaaaaaaaaaaaaaaaaaaaaaaaagatcctagccttcaggccctggagtgactgaggtaaggacagggctgagatggggcaggcatctaggtatgaagtagggctgggggcacctcacctccaccaggtcccagaagaacaccttcccgtcctcagaacagctgaccacatgtgtgtcacgctcgctcaggcagcagtccagcttgtattcctggttcttatggcccttgtacctaagggtggacaggatcggggggcttggtcctctccaggggtgggagaggagggaaggggatccccacgaccacaaggactcactcgcccagcagctcccctgtgtctttgtccaggagccgcaatgtggagtccaggctggacaccagggtgcactgcccatcccggctgaagcaggtgcaggtgatggggccttgggggaagggtgggtaggtgagtgagggtggggtgcccctggttggccccccatcttccctgcctgtcccacatccccagccacactcactgcccacgtagtctgagaagagctgccccatccttaggtcatagcgtctcacgcggccatccacggagctgcaggagagggtagatccagcgggaaccttgactacactcacatggctccaggcagccctgtgccttcccagcccagtgggcctgctcttccagtgcacaggagtggaattctgaagctctggccttgagactcaggcccagggccaattacgtcctactccatcatttccaagacccacaccccctttccaagcccttggagtccttctgattcccccttttcttccttttgtttgagacagagttttgctcttgttgctcaggctggagtgcaatggcatgatcttggctcaccggaacctctgcctcccgggttcaagagattctccttcctcagcctcccgagtagatgggaatacaggcatgcaccaccacgccctgctaattttgtatttttagtagagacggggtttctccatgttggtcaggctggtctcgaactcccaacctcaggtgatccgcccacctcagcctcccaaagtgctgggattacaggtgtgagccaccccacctggcccaattcccccttttcctgcattctccagctcctcctcctcagtactcagtcccaccactttccccactacccagcaccagcatctagactgttctggtctccctgcaccccccacagccaccagagggagcacttttcaaagtacagttgacccatgaacaacacggtttgaactgaacgcgtccacttatatgtggattttcttctgcctctatcagctgtgagacaccaagatcaatccctcctcttcctcctcctctgctttctcaacacgaagatctttatgacgatctcttcacttccacttaatgaatagaaaatatattttttccaccaggcgcggtggctcacgcctgtgattccagctctttgggaggccagggcaggtggatcacgaggtcaagagatggagaccctcctggccaacatggcgaaaccccgtctctactaaaaatacaaaaattagctgggcgtggtggcacgcgactgtagtcccagctactagggaggctgaggcaggagaatcgcctgaacctagaagttagaggttgcagtgagccgagatcacgtcactgcactccagcctggcaacagagcgagactgcgtctcaaaaaaaacaaaaattcttccttatgattatttttatgtatttatttatttaatttatttacttattttgagacggagtcttgctctatcgcccaggagtgtagtggtgcgatgtcggctcacagcaagctctgcctcctgggttcactccattctcctgcctcagcctcctgagtagctgggactacaggcgcctgccactatgcccggctaattttttgtatttttagtagagacggggtttcaccgtgttagccagaatgatctcgatctcctgacctcatgatccgcctgcctctgcctcccaaagtgctgggattacaggcatgagccacagcgcccggcctatttttatttatttttagaaatcattttatctttttttttttgagatggagtctcactttgtcgcccaggctggagtgcagtggcacaatctcggctcactgcaacctccaactcccgggttcaggcgattctcctgcctccgcctcccgagtggctgggattacaggctcccgtcaccacacctggctaatttttgcatttttagtagagacggggtttcaccatgttggccaggctgatctcaacctcctgacctcaagtgatctgcccaccttggcctcccaaagtgctgggattacaggtgtgagccaccgtgcccggccagattattattattttgtagacagtctgtctttcacccagcatggagtgcaatggtgcctcgaactcttggactcaagtgatccttccacttcagcctcccaagtagctgggattacagctgtgtgccactgtgcccagctgagagtaggttttaatctgagcatgggggcagctatgattccccgtagcacctggggtgagaccaggtcctggctccactcaccctgccaggatctcgtggtctgacaccttcacactggacacgccatctctggcctcatccagcgtctgcactggctcaggcctccgtgagcggcaatcccaacagcggatactggaatcaatagagcctgtgaggccagcatgatggtgaggtcaggtttggagggggagggcagcaccctgggcccccgtgcttaggccccagactcaccggacaggataactgtggcctcttcattaaactgcaccgtgttcaccttctgagaaagttattgccactcagaggaggctggactttggaggactgggataaaggcagggttcccagtgtcggttaaagcaagggcgaaggggaggtgaaaggttttgggggaacagcaaggacaggggttggtgactgcctagcctggcatgcggagtgggggatcgtcatctggggaagggatccttacggtgtaatgggggtggccgtgtcaccacctatgcgctaatacgggtcccctccactcaaatgagggtctccaggctttcactcacccctgcgtggccccggaatttgcgcacgacctgccctgatgccacatcccacagaaccaccgccttgtccccgccgccggagcagagactactgttgtcaaaggagctggagtaaaggaggaggaggatcagcatcgacctcggatcccagcctcagcgctcccatcccagcctggtccccggctcacccggccgcatccagcacctcgtagccgtggccgctgtacgtccgcagcagcgtcccccgaagcgggttccacagcttcagcgtcttgtcactgccgcacgtcaggcagtaattgccatccactggggaacaccaggcgggggttactgggccgtcgatctcaggaggcgggaggaggacccggaatgaagacgaaggcgctcaccattaaatcgtacggctcgcactgccccctgcccgcagtccagcgtcttcaaccgtttctgcggcagctctggaggccgcggctttggctcagggaaagccatgctcccaggactccttccttgcagccttaaatcggtctgtacggaaaattccgcgccttagaaacccacgcttgggtgtaaccttattattgttcttcctgacctacttcctgtttatcacttccgggttcatcattttggcatttcggtgatcgggttggaactattgaagcccgctttcaggttcttttccccattttccctttgaaaggaagacttctggcttctcctaaatctccgttctctgggtaaggggagtccaagcctctgtcatgaggaacggaaatgcgagggcctcgggtgttactctaaaatccgccctcagcttgcacgccggaagctgcgattcctgcagcggaagaggcgtgatctggccttcgactcgctatgtccactaacaatatgtcggacccacggaggccgaacaaagtgctgaggtgaggaccccagcgtcgtgggcacgggttcgggttgtgggtgtggatcggggccctgggaagcgcctgtctatcccgggggcaggacctgagcgcccctgaccctcgagcctgtcgcaggtacaagcccccgccgagcgaatgtaacccggccttggacgacccgacgccggactacatgaacctgctgggcatgatcttcagcatgtgcggcctcatgcttaaggtgggcggggttgagcttctatgggtgtagttggacctgagaacgaggcccgggggcgggtttggaatgaagcggggtgtcttgtcattgctgatggggcgggacctgagatcggccgggagtggggctgcgatgacgctgggccgagaaagccccagtctttggtgaagtcaaggattcgagtcaggttggggatgtggcagattggtctgcgagtggggccaggctttgaagcaacttggagaggagttgtggaaaaagggcagggtcttaagcatgtgggatgtcagagtctctcttggtcctgagagacgcaggccagacagtaggactagaaaccacgtatctagagtatgccatgagcaggtgggactgaggaattccgggtggggcaaggtcccagctgcatcagatggaatcagtgggcatgatctggtgtctggaaaggtggcttcggggactcattgttgtgcctttcactaacctgcccacccacttacctttccctagctgaagtggtgtgcttgggtcgctgtctactgctccttcatcagctttgccaactctcggagctcggaggacacgaagcaaatgatgagtagcttcatgtgagacttgccctacagaacaagtgactcttgagtaaggggtggggggaccccagcctggccatcctagactgacacctctctcctgtctcaggctgtccatctctgccgtggtgatgtcctatctgcagaatcctcagcccatgacgcccccatggtgataccagcctagaagggtcacattttggaccctgtctatccactaggcctgggctttggctgctaaacctgctgccttcagctgccatcctggacttccctgaatgaggccgtctcggtgcccccagctggatagagggaacctggccctttcctagggaacaccctaggcttacccctcctgcctcccttcccctgcctgctgctgggggagatgctgtccatgtttctaggggtattcatttgctttctcgttgaaacctgttgttaataaagtttttcactctggctgtcagcctcttctgttcagtggggtgttcctcctacctggcgggaagggctctagccccataggcctggtgtggggccccagtctggaggcttctggctgttcatttgcttacttcataaaccttgtgtcttaagtcaggtgctagggacaagacagtgacttctgccctctggcaactcaccagatggccctgctgacctagataatctaggctttggtttccttttttttttttcctttttaagaaagaaaatggtcttgatctgtcatgcaggctgagtgcagtggcacaatctatgttcactgcagcctcaaactcctgggctcaagcaatcctcccacctcagcctgccacgtaactgggaccacaaatgcgtgctaccatgcccagttaattcttgttttttttgagacagagttttgctcttgttgcccaggctggagggcaatggcatgatcttgatctcggctcactgcaacctccgcctcccaggttcaagtgattctcctgcctcagtctcccaagtagctgggattacaggcatgtgccaccatgcccagctaatttttgtatttttacattttgtgtaaaattacaaattttgtgttttcaaacccgtctctacaaaacaacccatgttgcccaggctggtctcaaactcccaggcccaagtgattcaccagcctggccctcccaaagtgctgggattgcaggcttgagccactgcgcctgccctgggctttgttttcttatcagagaatgaactggtaggaattgggaaaggcatgaaagactcggggtccttccccacttgtcagaccctcttttctctccggaacacccagggatccttctcaaccaggctggatcccatccctggtactccaggggtatttacccaacgtcccaatccccacagtataggactcttcatcagatcctcctcttaggcaagctaggtccttccaggaccctagcgctgaaggtccatgggacggacaccctggattcccatggacacactacaccggctaggaaaacccggcccccttaggaaaagcacttctgctcctaccggcattaagaggcattccgtcttggaattccggcattaagaggcattccgtcttcatagcccgtgagacgccagtgtcacctttagcccaaccagtgccctgagggtggcattttcctaccttcctgtaacgacccccgggattgcccagggctacagcctctctcccgtgagcctccagaccgcgccctggccccgcc

SEQ ID NO: 1044 - DNA, 15090 bp, Homo sapiens
acgttccctacttcctgtgctcttgcggagacgcgcgcgtcggggtttaacgcgtttctgggccgccgtaagcccggcctaggggcagctttgactcgagagccggctataggcgcatggaaggttccctggaacgggaggcgccagcgggggcgctggccgccgtgctaaagcacagctcgacgttgccgcccgaaagcacccaggtccggggctacgacttcaaccgcggtgtgaattaccgcgcactgctggaggccttcggcaccaccggcttccaagcaaccaacttcgggcgcgctgtacagcaagtcaatgccatggtgaggaccgggcggaatttctagggacgcggaggggcgtggcttgtagaaccaacgcggtactagacgggggcagcgtttccagtggaggggatatgtcttttatttgagttgcccaatagttggaggaaggcgggacctattctgggcgggagtttctgtcctgggaaggggattttgcactctggtagttacatgctggtacggtaacctgaggaggcgaggactgattcttggtgtgggggcgggttctaggtacatttaaagctttctggaatgggcggagcctggggcaagacaaattaagggaggatatgggaggaggagcctaagtctgggcggttcttgaatttagatttgcttttcccagcggggaagggaccggatctgaaaggagatgctctctgattcctaaaagggtgggggctggctgggcgcggtggcgcatgcctataatcccagcattttgggaagccgaggcgggtggatcaagagaagaggagttcgagacaagcctggccaacatggtgaaaccctgtctctactaaaatgcaaaaaattagccgggcatggtgttgcgcgcctgtagtcccagctactcgggaggctgaggcaggagaatcgcttgaacccgcgaggtggaggttgcagtgagctgagattgcgccactgcactccagcctggtgacagagcgatactctgtctcaaaaaaaaaaaaaaaaaaaggccgggcacggtggctcatgcctgtaatctcagcattttgggaggccgaggcgggcggatcacctgaggtcgggagttcgagaccagcctgaccaacatggagaaaccccgtctctactaaaatgcaaaaaattagccgggcatggtggtgcgcgcctgtagtcccagctactcgggaggctgaggcaggagaatcgcttgaacccgggaggtggagcttgcagtgagccgagatcgcgccattgcactctagcctgggtaacaagagtgaaactccgtccaaaaaaaaaaaaaaaagggtgggggcaaatcctgaacgtgtgtcttgagatctggtctgggaaggggcagagtttacacaggagatgttccttggtcccctgtagaactggtcctgtatccctgaatgtgcagggcctggggtgaaatctgtttctggagcccacctggagtcctgagtctgggatttaaggccagtgcttaacttgacttggcccttactcacagatcgagaagaagctggaaccactgtcacaggatgaagaccagcacgcggacctgacccagagccgccgcccacttaccagctgcaccattttcctgggatatacatccaacctcatcagttcaggcatccgtgagaccattcgctaccttgtgcagcacaacatggtggggacctggtgaggccgtggccttggcctctgggtcaatgggcaatgcagttattgatcgtttaagtgagatgggcagataggggtctgttataagcagaggaatagaatcaagttttgttttgtagcagagctccctcataagagtcactggacaaggatgaggttagaagttctgcccagaatgagggcaggggcttccttcttgggccaaattcactgccttgtggctgcaggtggacgtattggtgaccacagctggcggcgtggaggaagacctcatcaagtgcctggcgcccacatacttgggcgagtttagcctcagggggaaggagctccgggagaacgggatcaataggtgagaaccctgagtggtgttgggcaggggagctggaccaagggtcctggggcctgatgcctacatgcctcctgttctcaggatcggaaacctgctggtgcccaatgagaattactgcaagtttgaggactggctgatgcccattctggaccagatggtgatggagcagaacacagaggtggggctggggcaacctggaggggccagttcagtgggagtcaggggaggcatggcctgaaggtcacatcctctcctagggtgtaaagtggacgccttctaagatgatcgcccggctgggcaaggagatcaacaacccagagtccgtgtattactgggcccagaaggtgaggacctaagcgggagcaaagtagccagactttggcatgtgttaacttatttcatctttccagcctcctggggattcagtactgttattctcagcatcctcactcttagatgaggagactcaaacacagataggcgtggtaattttttttttttttgagacaggatcttgctctgtcacctaggctggagtgcagtggtgtgatcacagctcattgcagcctcaacctcctggggccaagcagtcctcccacctcagcctctcgagtagctgggaccacaggcacatgccatcatgcccagctaattttaaaaattttttgtagagatgggggtctccctgtgtttcccaggctggtcttgaactcctggcgtcaggcagtcctcccaccttggcctcccaaagtgctgggattacaggcgtgagccactgtgcccagccaggctaggtaattttgtctgaagtcacacagataactagtggggcctcagcatccttatgctcctcccagactatctctggaacagtagaggcaacacttagcaactctcctggggcctggctcagggtcccacactcccagatgctataaaataagagctacccactccctttaattagagaatcagaacctgaaaaaaaaaaaaaaaaagctacatagtctttttttttttttttttttttttgagacagagtcttgctctgtcgcccaggctggagtgtaatggtgtgatttcagctcactgcaccctccacctcccaggttcaagtgattctcccgcctcaccctcctgagtagctgggactataggcacccaccatcatgcccggccaatttttgtatttttctacagatggggtttcaccatgttggccaggctggtcttgaactcctgacctcaagtgatccacccgccttggcctcccaaagtgctgggattacaggggtgagccaccacacccagcctacttactctttcttttttacgagacagggtctcattctgtttcccaggctggagtgcaatggcacaataatggctcactgctgtcttgagcttctgggctcagtcgattctcctgcctcagcctgctgagtagctgggactacaggtgcgtgccaccatgcctggctaattgtttttgtagagatgggaactcaccatgttgcacaagctggctctttttttttttttgagacggagttttgctcttgttacccaggccagagtccaatggcgcaatcttggctcacagcaacctctacctcctgggttcaagcaattctcctgcctcagcatcaagttcccaagtagctgggattataggcatgtgccaccacccctggctaattttgtatttttagtagaggcagggtttctccatgttggtcaggctggtgtcgagctcctgacctcaggtgatccacccgcctcggcctcccaaagtgctgggattacaagcgtgagccaccgcgcccggccacaagctggctctttaaaaaagaattagacggccgggcatggtggctcatgcttgtaatcccagtactttgggggctgaggcgggtggatcacctgaagtcaggagttcaagaccagcctggccaacatggtggaaccctgtctctactaaaaaaacaaaatgcaaaattagctgggcatagtggcatgcgcctgtaatcctagctactcgggaggctgaagcaggagaatcactggaacccaggaggcagaggttgcagtgagctgagatagtgccattgcactccagcctgggcaacgagtgaaactccgtctcagggaataaaaaaaaagagagagaaacagctcagcaagctaagaataggctggttctttatgtgccaggcactatactaagtgttttctgtgggttttctcatataggcctcatctgtgagaggtgtttctgttatgcttataattgaggaaacagtcctagagaaattaggcaccccatccacagtcagatagtcatatagccagcatggagacgaggctctgagctccagccactgtcctgtcatgttctctgcagaaccacatccctgtgtttagtcccgcacttacagacggctcgctgggcgacatgatcttcttccattcctacaagaacccgggcctggtcctggacatcgttgagggtgaggcgctagggccacagaggagaggggaaggagggctggctgagtccaaggcctgacttcggcgctcttcccccagacctgaggctcatcaacacacaggccatctttgccaagtgcactgggatgatcattctgggcgggggcgtggtcaagcaccacattgccaatgccaacctcatggtgagtgggggtggcgcttcggcccactctgcagacatgctgtgtggtgggcctatgccatgtgctgggtagacagcatgaactagacaggccaggatccctgctccccgggactgatgttctagtaggggagatagcaaacaagtgacatccacgtcagggggcagtcattgctacggggaatactaaatgatggcatgagaagagaaaggggtgctgtccaacaagaggttttggaaggaggcttctggaagtgtgagctgggagcaggggtttggggaggcatctcccaggagctatgtggttgtctcccgtgccaggagtttgtgctgctgtactagcattgagcttctggattgcaaagttcccaggagagggaacagccattgcaaaggctctggggcgcctgaagtaatccaggaacagctgggtacctggtgaggggaaggtggagtggtgagggccaggaggtgatgcagggaggtgccacagggagcctgctgggccctgtgggctgaggcggggctttggcttttgcactgagagaagtgggagaggacttgactcgggttcccatgctccccctggtggccatgtggtgaacagatggtggcaggtgagtgagaactccagtccaggacagtggtgaccatgcagggatcaggaggcaggcggtggttggatttggagggcttctgaagatagagttgctggcagctcctgccttgcagatggggcagggttgttgacacctggctgttgggtctggggaaacacagccatcgttgcccagcagctctagtgaccccagacattgacatgggccctgtctgggagcgaatgtctgtgaagggcttccttcatctgggacacacctctcagcctgtttggctacggtgtcctccctctgtgtctgtctcctgtgactggctgactgggcccaccgtgcccccgcctccccacagcggaacggggccgactacgctgtttacatcaacacagcccaggagtttgatggctctgactcaggtgcccgaccagacgaggctgtctcctggggcaagatccgggtggatgcacagcccgtcaaggtaagcgctggctgggtggggcatagggtctctgggacgatgagtgtgggtcccatggcttacccaggttcccccctacccaggtctatgctgacgcctccctggtcttccccctgcttgtggctgaaacctttgcccagaagatggatgccttcatgcatgagaagaacgaggactgagcggctgcggtcccaggaaggtcttaccccctcttctatttattaatttgcagacccagcccctcccctactttttggtcagctacgtctctagaataagatggtatctgaagtccttccatgtctgtgtctcggtccttggtcctgttggtgggtcccctggcttcagcctgctccatcctctgcctcataggcctcctctcgccagcactggacgctgcctcccatggcggtcagcaggcagggctctgttgggtggtaggccagcgactgcaccacaccggaacccacaggcagggccagagccagcgcaccctgtggagcgaggggtagggagtggttatctgtggctgggctgtaccctggtttctgaggtccctgggcaccccccatctcagtcctgcctgaagccctcagtcacctctccccgaccttcagccacctgcctctaattgcctcctagacactgcaaaattaatctacctcagactgagcccctcagtagctctgtcctaccaggtgttcaggccgcaagtcttgggagcctcttattgattttttattttttaaaatagcagagatggggtcttaccatgttgcccaggctggtctcgaactcctggcctcaagtgatcctcctgccttggcctcccaaagtgctaggactacaggtgtgagccaccatgcctggctttgggagtctttttctttttctgtttttttttgagatggagtcttgctctgtcgccaggctggagtgcagtggcgccatctgggctcactgcaacctccgactccctagttcaagcgattctcctgcctcagcctcccgagtaggtgggattacaggcacgcgctaccatgcccagctaatttttgtatttttagtacagatggggtttcaccatgttggccaggatgatctctatctcctgacctcgtgatccacccccctcggcctcccaaagtgctgggattacaggtgtgaaccaccatgcctggccgggagtctttttcttgtaccacatgttcctctatcagttattcctcttggctctgcttctagaccatgtccagagactgctgattttctgccactaccatgtttggagcatgccttgctcacagcttgcctgttccctgccaccagctgggctccatcctgtccatttggcagccccaatgatccccacttcccctggtcccaacacaatgtaaacagttcctcaagcaagccatgcttcctctttccaccttgaaaatgtcccttgatgtgcctgccctccaaggcaacttctgttctactgggcccataagaaataggtggaacattcttgctaccttagttcctaaagcaagagcttgtccgccaagtcttcagggcccccccggttccctccatcctcttatgggccttagttcccctggccaagcccagcgctgatgtctcctttgccgagattcccccggctctgaccccactacaccaggatggtctgtttctggcctgactccccaccaggctgggacatgtcaaggacagggctcagggcttgaaaccatgcacagggatgctaagatgtagctccagtttcttgaatgactgcagccctatctcacccaaggttagacatggccgtcggctcccccttgcccaggggtcagtgccagttgctcggcctggcatctgcagcccagcctgaccccggatcttgccgcacctgccgccaccctgaagcctttgtttcctgactgatgcatgcgcaggctacacctcttaacatatgctgttccctttgcctggaatgcccttcctgcctcatcttctctctagcccaagctgggcacggtgtctcaggcctgtaatcccagcactttgggaggccgaggcgggtgaatcacttgaggtcaggagtttgagaccagcctggccaacatggtgaaaccctgtctctactaaaaatacaaaaattagccaggtatggtggtaggggcctgtaatcccagctactcaggaggctgagacatgagaatcacctgaaccctggggggaagaggttgcagtgagctgagatggcgccactgcatttgcctgggcaatagtctcaaaaaaagaaaaaagggccgggtgtggtggcttacgcctgtaatcctagcacttgggaaggctgaggtgggtggatcatgaggtcaggagtttaagaccagcctgaccaacatagtgaaaccctgtctctactaaaaatacaaaaattagctgggtgtggtggcacgcacctataatcccaactactcaggagactgaggcaggagaatcgcttgaacttgggaggcggagtttacagtgagccaagattgcgccactgcactctagcctgggcgacagagcaagacttgtctcaaaaaaaaaaaaaaaaaaaaaaaaaagatcctagccttcaggccctggagtgactgaggtaaggacagggctgagatggggcaggcatctaggtatgaagtagggctgggggcacctcacctccaccaggtcccagaagaacaccttcccgtcctcagaacagctgaccacatgtgtgtcacgctcgctcaggcagcagtccagcttgtattcctggttcttatggcccttgtacctaagggtggacaggatcggggggcttggtcctctccaggggtgggagaggagggaaggggatccccacgaccacaaggactcactcgcccagcagctcccctgtgtctttgtccaggagccgcaatgtggagtccaggctggacaccagggtgcactgcccatcccggctgaagcaggtgcaggtgatggggccttgggggaagggtgggtaggtgagtgagggtggggtgcccctggttggccccccatcttccctgcctgtcccacatccccagccacactcactgcccacgtagtctgagaagagctgccccatccttaggtcatagcgtctcacgcggccatccacggagctgcaggagagggtagatccagcgggaaccttgactacactcacatggctccaggcagccctgtgccttcccagcccagtgggcctgctcttccagtgcacaggagtggaattctgaagctctggccttgagactcaggcccagggccaattacgtcctactccatcatttccaagacccacaccccctttccaagcccttggagtccttctgattcccccttttcttccttttgtttgagacagagttttgctcttgttgctcaggctggagtgcaatggcatgatcttggctcaccggaacctctgcctcccgggttcaagagattctccttcctcagcctcccgagtagatgggaatacaggcatgcaccaccacgccctgctaattttgtatttttagtagagacggggtttctccatgttggtcaggctggtctcgaactcccaacctcaggtgatccgcccacctcagcctcccaaagtgctgggattacaggtgtgagccaccccacctggcccaattcccccttttcctgcattctccagctcctcctcctcagtactcagtcccaccactttccccactacccagcaccagcatctagactgttctggtctccctgcaccccccacagccaccagagggagcacttttcaaagtacagttgacccatgaacaacacggtttgaactgaacgcgtccacttatatgtggattttcttctgcctctatcagctgtgagacaccaagatcaatccctcctcttcctcctcctctgctttctcaacacgaagatctttatgacgatctcttcacttccacttaatgaatagaaaatatattttttccaccaggcgcggtggctcacgcctgtgattccagctctttgggaggccagggcaggtggatcacgaggtcaagagatggagaccctcctggccaacatggcgaaaccccgtctctactaaaaatacaaaaattagctgggcgtggtggcacgcgactgtagtcccagctactagggaggctgaggcaggagaatcgcctgaacctagaagttagaggttgcagtgagccgagatcacgtcactgcactccagcctggcaacagagcgagactgcgtctcaaaaaaaacaaaaattcttccttatgattatttttatgtatttatttatttaatttatttacttattttgagacggagtcttgctctatcgcccaggagtgtagtggtgcgatgtcggctcacagcaagctctgcctcctgggttcactccattctcctgcctcagcctcctgagtagctgggactacaggcgcctgccactatgcccggctaattttttgtatttttagtagagacggggtttcaccgtgttagccagaatgatctcgatctcctgacctcatgatccgcctgcctctgcctcccaaagtgctgggattacaggcatgagccacagcgcccggcctatttttatttatttttagaaatcattttatctttttttttttgagatggagtctcactttgtcgcccaggctggagtgcagtggcacaatctcggctcactgcaacctccaactcccgggttcaggcgattctcctgcctccgcctcccgagtggctgggattacaggctcccgtcaccacacctggctaatttttgcatttttagtagagacggggtttcaccatgttggccaggctgatctcaacctcctgacctcaagtgatctgcccaccttggcctcccaaagtgctgggattacaggtgtgagccaccgtgcccggccagattattattattttgtagacagtctgtctttcacccagcatggagtgcaatggtgcctcgaactcttggactcaagtgatccttccacttcagcctcccaagtagctgggattacagctgtgtgccactgtgcccagctgagagtaggttttaatctgagcatgggggcagctatgattccccgtagcacctggggtgagaccaggtcctggctccactcaccctgccaggatctcgtggtctgacaccttcacactggacacgccatctctggcctcatccagcgtctgcactggctcaggcctccgtgagcggcaatcccaacagcggatactggaatcaatagagcctgtgaggccagcatgatggtgaggtcaggtttggagggggagggcagcaccctgggcccccgtgcttaggccccagactcaccggacaggataactgtggcctcttcattaaactgcaccgtgttcaccttctgagaaagttattgccactcagaggaggctggactttggaggactgggataaaggcagggttcccagtgtcggttaaagcaagggcgaaggggaggtgaaaggttttgggggaacagcaaggacaggggttggtgactgcctagcctggcatgcggagtgggggatcgtcatctggggaagggatccttacggtgtaatgggggtggccgtgtcaccacctatgcgctaatacgggtcccctccactcaaatgagggtctccaggctttcactcacccctgcgtggccccggaatttgcgcacgacctgccctgatgccacatcccacagaaccaccgccttgtccccgccgccggagcagagactactgttgtcaaaggagctggagtaaaggaggaggaggatcagcatcgacctcggatcccagcctcagcgctcccatcccagcctggtccccggctcacccggccgcatccagcacctcgtagccgtggccgctgtacgtccgcagcagcgtcccccgaagcgggttccacagcttcagcgtcttgtcactgccgcacgtcaggcagtaattgccatccactggggaacaccaggcgggggttactgggccgtcgatctcaggaggcgggaggaggacccggaatgaagacgaaggcgctcaccattaaatcgtacggctcgcactgccccctgcccgcagtccagcgtcttcaaccgtttctgcggcagctctggaggccgcggctttggctcagggaaagccatgctcccaggactccttccttgcagccttaaatcggtctgtacggaaaattccgcgccttagaaacccacgcttgggtgtaaccttattattgttcttcctgacctacttcctgtttatcacttccgggttcatcattttggcatttcggtgatcgggttggaactattgaagcccgctttcaggttcttttccccattttccctttgaaaggaagacttctggcttctcctaaatctccgttctctgggtaaggggagtccaagcctctgtcatgaggaacggaaatgcgagggcctcgggtgttactctaaaatccgccctcagcttgcacgccggaagctgcgattcctgcagcggaagaggcgtgatctggccttcgactcgctatgtccactaacaatatgtcggacccacggaggccgaacaaagtgctgaggtgaggaccccagcgtcgtgggcacgggttcgggttgtgggtgtggatcggggccctgggaagcgcctgtctatcccgggggcaggacctgagcgcccctgaccctcgagcctgtcgcaggtacaagcccccgccgagcgaatgtaacccggccttggacgacccgacgccggactacatgaacctgctgggcatgatcttcagcatgtgcggcctcatgcttaaggtgggcggggttgagcttctatgggtgtagttggacctgagaacgaggcccgggggcgggtttggaatgaagcggggtgtcttgtcattgctgatggggcgggacctgagatcggccgggagtggggctgcgatgacgctgggccgagaaagccccagtctttggtgaagtcaaggattcgagtcaggttggggatgtggcagattggtctgcgagtggggccaggctttgaagcaacttggagaggagttgtggaaaaagggcagggtcttaagcatgtgggatgtcagagtctctcttggtcctgagagacgcaggccagacagtaggactagaaaccacgtatctagagtatgccatgagcaggtgggactgaggaattccgggtggggcaaggtcccagctgcatcagatggaatcagtgggcatgatctggtgtctggaaaggtggcttcggggactcattgttgtgcctttcactaacctgcccacccacttacctttccctagctgaagtggtgtgcttgggtcgctgtctactgctccttcatcagctttgccaactctcggagctcggaggacacgaagcaaatgatgagtagcttcatgtgagacttgccctacagaacaagtgactcttgagtaaggggtggggggaccccagcctggccatcctagactgacacctctctcctgtctcaggctgtccatctctgccgtggtgatgtcctatctgcagaatcctcagcccatgacgcccccatggtgataccagcctagaagggtcacattttggaccctgtctatccactaggcctgggctttggctgctaaacctgctgccttcagctgccatcctggacttccctgaatgaggccgtctcggtgcccccagctggatagagggaacctggccctttcctagggaacaccctaggcttacccctcctgcctcccttcccctgcctgctgctgggggagatgctgtccatgtttctaggggtattcatttgctttctcgttgaaacctgttgttaataaagtttttcactctggctgtcagcctcttctgttcagtggggtgttcctcctacctggcgggaagggctctagccccataggcctggtgtggggccccagtctggaggcttctggctgttcatttgcttacttcataaaccttgtgtcttaagtcaggtgctagggacaagacagtgacttctgccctctggcaactcaccagatggccctgctgacctagataatctaggctttggtttccttttttttttttcctttttaagaaagaaaatggtcttgatctgtcatgcaggctgagtgcagtggcacaatctatgttcactgcagcctcaaactcctgggctcaagcaatcctcccacctcagcctgccacgtaactgggaccacaaatgcgtgctaccatgcccagttaattcttgttttttttgagacagagttttgctcttgttgcccaggctggagggcaatggcatgatcttgatctcggctcactgcaacctccgcctcccaggttcaagtgattctcctgcctcagtctcccaagtagctgggattacaggcatgtgccaccatgcccagctaatttttgtatttttacattttgtgtaaaattacaaattttgtgttttcaaacccgtctctacaaaacaacccatgttgcccaggctggtctcaaactcccaggcccaagtgattcaccagcctggccctcccaaagtgctgggattgcaggcttgagccactgcgcctgccctgggctttgttttcttatcagagaatgaactggtaggaattgggaaaggcatgaaagactcggggtccttccccacttgtcagaccctcttttctctccggaacacccagggatccttctcaaccaggctggatcccatccctggtactccaggggtatttacccaacgtcccaatccccacagtataggactcttcatcagatcctcctcttaggcaagctaggtccttccaggaccctagcgctgaaggtccatgggacggacaccctggattcccatggacacactacaccggctaggaaaacccggcccccttaggaaaagcacttctgctcctaccggcattaagaggcattccgtcttggaattccggcattaagaggcattccgtcttcatagcccgtgagacgccagtgtcacctttagcccaaccagtgccctgagggtggcattttcctaccttcctgtaacgacccccgggattgcccagggctacagcctctctcccgtgagcctccagaccgcgccctggccccgcc

SEQ ID NO: 1045 - DNA, 3830 bp, Homo sapiens
ctgggcacggtggctcatgcctgtaatcccagcactttgggaggctgaggtgggcggatcacgaggtcaggagatcaagaccatcctggctaacatggtgaaaccccgtctctactaaaaatacaaaaaattagctgggcgtgtggcgggcgcctgtagtcccagctacttgggaggctgaggcaggagactggcgtgaacccgggaggtggagcttgtagtgagccgaaatcacaccactacactccagcctgggcgacagagcaagactccgtctcaaaaaaaaaaaaaaaaaaaaaaaagctctctgattttagctgttaggtgggagatgggttggaggataccaaagccagcttgcaggctatggggataaagaaaacacctggatttcggacctactttataggtagaggttggcagacatgctgagaaggatggatgtggggtgtgagaaaaggggagacagcaagctgcgctcctcatttttaatttttatttatctatttttgagacggagtttcgctctgttgcccaggctggagtgcagtggcaccatctcagctcactgcaacctccacctcccgggttcaagtgattctcctgcctcagcctcctgagtagctgggattatgggtgtgcgccaccacacccggctaatttttgtattttttagtagagacggggtttcgccatgttgtccaggctggtctctaactcctaacctcaggtgatctgccctccttggcatcccaaagtgctgggattacaggtgtgagccaccgcgcccagccccaatccctatttttcagtctagtggatgagtggagggtggggccgtttgctgagatgcagaaagatcagggataggtggagagggagctgagggggcaactttgaggtccaagcgaggatgtcaaggaggatgtctgtctcctccaacaaggtaggctcattccagcctcacggcttttgctgttctgtcttcccatgtgcaggaaatggcctctctgcatcttcacatacggggattttctcagccttctggctttggctcaaatctcacctccttggcgtccttcacccatccctccaactaaaatcccgaactcctccacctaaagactcaaattatcctgtttaaatcctgattgcgctgggcgcggtggctcacacctgtaatcccagcactttgggaggccgaggcaggcagatcacctgaggtcaggagttcgagactagcctgaccaacatagtgaaaccccatctctactaaaaatacaagaattagccgggcgtgatggctcatgcctgtaatcccagctactcgggaggctgaggcaggagaattgcttgaaactgggaggcagaggttgcgatgagtggagatcgcgccattgcactccagcctgggcaacaagagcgaaactctgtctccaaaaaaaacaaaaaacaaaaaaggcctgatagcactcaccactattgttaactttctatcttcccaatcagattgtgggctccagtagggcagggtccacatcttggtcttgttcaccactaaatccttagtgcctagcacggagcccaccatagagaatagactacatgaattgtagagtgagtgaataatcctgttggccgtatgcactgttaggagggtgtgtttgagatacagatgacacccagggtctcacattcttgcaggagggaaagagacgtcagccctgggtcccagaagaggccactgacccagtgggagttcagggaaggcttcccagaggaggtggaggtgacagctgcagctataagggaaggaagaacagagcgttatgcagcatgtgaaggctttggagacttgtgagggcacgaaccgggctcactatcccattagacaaaagtggctgaggaaggatgaaactgtgtctaactctgcctggtgaccgaaatcttgtccatgggtgacgcttaagaagtgaccctcggccgggcgcagtggctcacgcctgtaatcctggcactttgggaggccaaggcgggcgggtcacgagttcaggagatcgagaccatcctggctaacacggtgaaaccccatctctactaaaaacagaaaaaattagccgggtgtggtggcgggcacctgtagtcccagttactcgggaggctgaggcaggagaatggcatgaacctgggaggcagagcttgcagtgagccgagattgcgccactgcactccagcctgggcgacagagcgagactctgtctcaaaaaaaaaaaaaaaaaaaaaagtgaccctcataaaaaaattagctgggcacgatggtgcacactagtcggaatgctggggtgggaggatgacctgagtccgggagtcagaggttgcagtgggccgagatcgcgtcacagcactccagcctggcgacagagtgagaccctatcaaaaaatagcagcaggccaggcgcggtggctcatgcctgtaatcccagcactttgggaggctgaggcgggcggatcacgaggtcaggagatcgagactaccctggctaacacggtgaaaccccgtctctactaaaaatacaaaatattagccgggcgtggtggccggcgcctgtagtcccagttactggggaggctgaggcagaagaatggcgtgaacctgggaggcggaggttgcagtgagccgagatcgtgccactgcactccagcctgggagacagcgcaagactctagctcaaacaaacaaacaaacaaaacagcaacaacaacaacaaaaccatcctcccctcccgaggggacagaacagaaacgaatgggcgagtgccgggccaagcagtgggtctccagcaggtggcattaaaataggaattttggctggggacggtggctcacacctgtaatctcagcactttggaaagcccaggcgggcggtcacctgagggcagaaccagcctcgccaacatggtgaaatgccatctctactaaaaataaaaaattagccaggcctggtggtgggtgtctgtaatcccagcaactcgggaggctgaggcaggagaatcgcttgaaccaggggggcagaggttgcaatgagtcaagattgcaccaccgcactccagcctgcgtaacaagagcgtgtaactcttgtctcaaaaataaattaaataaataaataataaaaataaaaaagaatcttcattcatgggaagtcgagaacacatgaaaacaagtaaaggccgaagcgcagtggctcacgcctgtaatcccagcactttgggaggctgaggcgggcggataacctgaggtcggaagttcgagaccagcctgaccaacagggagaaaccccgcctctactaaaaatacaaaattagccgggcatggcggtgcatgccagtagtcccagctactcgggaggctgaggcaggagaatcgcttgaacccggaatgtggaggttgtggtgagctgagatcgggcaattgcactccagcctgggcaacaagagcgaaaccctgtatcaaaaaaaaaaaaaagaaaaaaaaaggaagaaaaggcctaaaggcgccgggcgcggtgggtcacgcctgtaatcccagcactttgggaggccgaggcgggcgaatcacgaggtcaggagatcgagaccaggtgaaaccccgtctctactaaaaatacaaaaaaattagccgggcgtggtggtgggcgcctgtagtcccagctactcgggaggctgaggcaggagaacagcgtgaacccggaaagcggagctggcagtgagctgagatcgcgccactgcactccagcctgggtgacagagcgagactccgtctcaaaaaaaaaa

SEQ ID NO: 1046 - DNA, 20245 bp, Homo sapiens
gcctttccagggccggggaaccccaggaggaagctgctgagccatgggcgcctacgcgcgggcttcgggggtctgcgctcgcggctgcctggactcagcaggcccctggaccatgtcccgcgccctgcggccaccgctcccgcctctctgctttttccttttgttgctggcggctgccggtgctcgggccgggggatacgaggtgagtggggcctccgagctgaaacgtacaggaggcagagtgaaacccagaatacagtctagaggtgtgggtgggtctgtcctgtgggtgtctagtgaatggctgatgatatgacagtgtggtctgagtgcgtgctttgtgtcattgcgaggtctggctgtgcgcatctgagtataggactgtgtctgattgtacctgcctccgtgtctccgggatgcttgcctagactttgtctgcacttaactgtgggattggaggggcaggaggtggcagggggtgagcagtgtatgtgtggggggaggtgctggctgagagctgggactctggagtctgcctgaaattccagcctagctcttacacttcctgagtgtgtgacgttgggcaagtcacctatcctctctaagcctcagtgccttcatctggaaactggggataacatcaccccacctcccacggtggccgtctgctgtcggcaaatgctgaacaaacatcagctacttctattattattttcccggagtgtgaatgagagctgccctgtggggttgtgcaaagtggagttgtatctatgagcacaactatgtatgtgtgtgtcctgcctgggagggcctggcctcctctgcacataggcgagatcaggcctctctgagtcactcacctctagatcaagacttactctgcagcccccgacctcgggggttattgacaaggtatgtgtgtttggggtccctgtgcagacatgccccacagtgcagccgaacatgctgaacgtgcacctgctgcctcacacacatgatgacgtgggctggctcaaaaccgtggaccagtacttttatggaagtgagtagaggatggggactggtccctgggatccccatggtccctgtaatccctctgggtcctggacattagggtggggccagtgctaccctaatatccagggtttgggctcctctgtctaggaataacccccttggctctgctgttccctgagagccttatccctgttatccacagtcaagaatgacatccagcacgccggtgtgcagtacatcctggactcggtcatctctgccttgctggcagatcccacccgtcgcttcatttacgtggagattgccttcttctcccgttggtggcaccagcagacaaatgccacacaggaagtcgtgcgagaccttgtgcgccagggtgagcctaccccaaggaagtgaaaagaggaagcccagcccagcttctgcttctgcatctctggtttctgagatttgtcatgccacgtgcaagctgtataacatgcgtgtcgctccgcctgcctggactctccatttggagacctcctatacatcccacaaagccccacctgctgtgcatcctctgggaagcctgccatgcagggggcctctttcccatatctgggaactatggcctgggagcgacccctcttgtccttccgccagaaatgtgtacacaggcaggctttcacattcccagtatcacccaccctactcccactcctggctctgaccgctgaccctgaccttgcctgtcctggcacagggcgcctggagttcgccaatggtggctgggtgatgaacgatgaggcagccacccactacggtgccatcgtggaccagatgacacttgggctgcgctttctggaggacacatttggcaatgatgggcgaccccgtgtggcctggcacattgaccccttcggccactctcgggagcaggcctcgctgtttgcgcaggtgcgacccgggacctctcttgggcccacttcttcactcactctggctcctccctcgcccagtcaaaccccgccctctccctgcaatctcacaaggaccaggcccaggcctaggcctgttgaagccctgccccttgagtgagccgtaaagccagtggcttttgagctctggcctcagccggctatgcccagcccaggctgacccagctccggctggctccgccctctcccctaataggcccctcttggtgttctggccccacccactagctcgggtcctggctcctccctaaaccgggtggcaagtggatgcctaggctgccttaaaaacaggttcattacctgtgctcagaccccatccatcctcaggctgtggaagggggaacctcattcctggagtcaggcctgctctgcgctttgacagtgctggggaggtgaacctgggttctgatgttggacccgccctctccctgctagcccaaggtggtgagttctgaaacttccccaagcttggaaataagctggaggcctctctgtttcagccctacgtgtttttgtttttgttttttgagacagggtcttgctgtcatccaggctggagtgcagtggtgcaatcctaactcactatagcctcaatctcccggattcaagcgattctcctgtctcagcccccctagtagatgagactacaagagcgcaccactacgcctggctaatttttaaattttttgtagacagtctgcccgtgttgtgcaggctggtctcaaaaactcctgggtttaagtgatcctcctgttttggcctcccagaaggctgggatcataggcaagagccaccacatcgacctagcactgctttttaacctgtgctctgacctgcccctcccaagcagaggggagtttggtggtgagagggctgggcactaattcacactgccttttcctccctcatccccagatgggcttcgacggcttcttctttgggcgccttgattatcaagataagtgggtacggatgcagaagctggagatggagcaggtgtggcgggccagcaccagcctgaagcccccgaccgcggacctcttcactggtagggggcttggtgagggcagggccagccatggtgccacacactcagaagggccctgggcttgatatctgctctgttgtcactgtcctggaattcctatagtctgggaacaaaggccctgcatttccttttgcattgggacacaaattctgaagcccatcctgggtgggacatggccggctttgaaaccagggaaggtctgggtgatgggccaccccttgaacttggtgtgacctgcaggtgtgcttcccaatggttacaacccgccaaggaatctgtgctgggatgtgctgtgtgtcgatcagccgctggtggaggaccctcgcagccccgagtacaacgccaaggagctggtcgattacttcctaaatgtggccactgcccaggtaaccctggtgtccagaaccttcgagtccggtatatacaatacaatgagctctttccatggtacaggcatcccctaacacgttctccttatttttaatttttttgagacagtcttactctgtcacccaggctggagtgcagtggtgcgatctcggctcactgcaacctctgcctcctgggttcaaacaagcacatccagctaatttttgtatttttgcactggggtctcatcatgttgtccaggctggtctcaaactcctgagctcaagtgatctgcttgcctcggcctcccaaagtgccgggattacaggcatgagccaccgcacctggcctctatttttaacatttttatttatttattattatttttttttttttgagacagagtcttgctctgtcacccaggctggagtgcagtggcatgatctcagctcactgcaacctccgcctcccgggttcaagcgattctcctgcctcagcctcctaagaagctgggattagaggcacctgccaccacacccagctaatttttgtatttttagtagacagggtttcgtcatgttgaccaggctggtcttgacctcaggtgatctgcccgcctcaacctcccaaagtgctgggattacaggtgtgggccactgtgcctagtctatttttaacatttttattgagaattccttttttattttttttagactcactctgtcgcccaggctggagtgcagtggcacgatctcggctcactgcaacctccacctactgggtccaagcgattcttctgcctcagcctcccgagtagctgggattacaggtgcccaccaccatgctcggctaagttttatgtctttttagtagaaagggggtttcaccatattggccaggctggtctcgaactcctaaccttttgacccacagccttggcctctcaaagtgctgggattacaggcgtgagccaccgcgtccagcctttaacatttttataattaaaaaacattattttttcacagagataaggtctcaccatgtggcccaggctggtctcaaactcctgaactcaagtgatcctcctgccttggcctcccaaagtgctaggatataggtgtgagccaccatgcctggcataacacgttctccttaaaaaaatttttttttcctttctttaaaaattgatggctgggcatggtggctcacgcctataatcccagcattttgagaggccgagatgggcagatcatctgaagtcaggagttcaagaccagcatagccaaaatgacgaaaccctgtctctactaaaaatacaaaaattagtcgggtgtggtggcgcacgcctgtaatcccagctacttgggaggctaaggcaagagagtcgcttgaacctggcaggtggaggttgcagtgagccgagatcacgtcacttcactctagcttgggcagcagagtgaaactctgtctcaaaaaaaaaattgttttagattaattttttttttttttcttgagacagggtcttgctgtgtggcccaggttggtcttaaactcctagactcaagcgatcctcctgcctcagtctcctgagtagctgggattacaggtgtgagcccctgtaatcatgttctcatgccccctggaggaagatgctattctattcaccatcacaatgtccccctcctggatttatgtgcattcctcattagaagagatagcataggctgggcaagagatagcatggcatggtgactggatgccctcttctaggtagtgggtccaagagaactgctcaacaactggtggctacttttatctgtgtccccacgctcccaagtgccatacccccacccatgcctgtgcacccaacatccttgaccccatatacatcaaaacacagctatacacagggatggcccaggatcctctggcttcaggactcccctcttgcctgcagggccggtattaccgcaccaaccacactgtgatgaccatgggctcggacttccaatatgagaatgccaacatgtggttcaagaaccttgacaagctcatccggctggtaaatgcgcaggtcagtgcgcctaccctgtggtacccttgtgcacatgtgcgcttgcatccgggggccttgggttatgtgcatagctctcagtgctgtctttgttttctattgttctattgtggtcattctataacaaatgaccacacacttagcagctcaaaacaacagaaatacattgtcttacagttctgtaggtaagaagtccagcatgaggccgggcgcaatggctcatgcctgtaatcccagcatgttgggaggctgagccgggcagatcacgaggtcaggaattcgagaccagcctgaccaacatggtgaaacgctgtctctactaaaaatacagaaattagctgggtgtgatggtgcgtgcctgtaatcccagctactcgggagcctgaggcaggggaatctcttgaatccgggaggcggaggttgcagtgagcggagattgtaccactgcactccagcctgggccacagagaaagactctgtctcaaaaaaaaaaaaaaaaaaaaaaaatccagcctgagtctcaccaggctataatcaaggtgttggcaaggctgtgttccttctgcagtctctaggagagaatataatttccttgctttttccaacatctagaagttacccacattcaaaatctattcttggctccatcttcaaagccagccacatagcatctttctgaccctgtttctgtaatcacatccctttctctcattctcacctcttctgcctctctcttccacattttatttatttacttagagacggagtctcgctctgtcgcccaggctggagtgcagtggcgtgctctcggctcactgcaacctccgcctcctgggttcaagtgattcttctgtctcagcctcccaagtagctgggactacagtcgcgtgccaccacgcccagctaatttttgtatttttagtagacagggtttcaccatgttggccaggatggtctcgatttcttgacctcgtgatccaccccgctcggcctcccaaggtgctgggattacagatgtgagccactgtgtggcctaatttccctactttaagtttggctgatgaacaacctcaattccatctgcaaccttaattccccttttgccatgtaatctaatgtggtaataggttctggggatcaggacatggacacttttgggcagttatcattttacccaacacagatgtgttagtgttttgcactaagtggcctgtggctgtggctgtgtgcacagtcagtcactctcatcagcacagaaacttgtctcccctctcccatctcagacaccccttcccatcaatcttgtcctcactacggtgcaatctccattcccaccttccactcgctcccagcactgctatttcaccaaaacagctcttttatgtcatttatttttatttattttttctttttaaaattttatttatttatttatttattgagacaagagtcttgctttgtcacccaggctggagtgcagtggcatgatcttgcctcatggcaacctctgcctcctgggttctagtgattctcctgcctcagcctcccaagtagctgggactacaggcatgtgccaccaaccctggctaatttttgtatttttagtagaggcagggtttcactatgttggccaggctggtctcaaaactcctgacctcaggtgatccgtccgccttggcctcccaaagtgttgggattgtaatctgaggtgggcggatcacttgaagacaggagttggagaccagcctggccaacatggtgaaaccttgtctctactaaaaatactacaaattaggtgggcgtgatggcactcatctgtaagaccagctactcggcaggctgaggcaggagaatcgctggaacctgggaggcggagtttgcagccagctgagatcgtgccactgcactccagcttgggcgacagagtcagactcagtctcaaaaaaaaaaaaaaaaaaaaaagtttattgagcacctactgtgtacattgggggacacagctcgtgcaaaacaaacatccttttcctcacataggtcactttcttgttcctccaccttgctcaggtgaaagtgcacctccattcattataaaaattgtgtctaggccgggcacggtggctcatgcctgtaatcccagcactttgggaggctgaggcgggcggatcatgaggtcaggagatcgagaccatcctggctaacacggtgaaactccgtctctactaaaaaatgcaaaaaattagccgggtgtggtggcgggcacctgtagtcccaggtactcatgaggctgaggctggagaatggcgtgaacccaagaggtggagcttgcagtgagctgagattgagccactgcactacagcctgggcaacaaagtaagactccgtcccaaaaaaaaaaagttgtgttttttggtaacaatctgacagtcctgcaaaacgattattcctgccctataatgtcacacttagtttttccacaaaagtttttaataataaagttggaattattgtaaaagtttagtaaaatttcaggtttattcttgcatctctgaaatccttttaaaaaaggctagtggtcatgtttgacttcagccaaaattcattttcacacccaaccattggcttgcacgccaaatatgtatttagagaaactgaacctatgggatgcatgaatgtgcacacatgtgtggaagtgtgggcccccaggaaggtgcggactcccgagggctcactccgtcgcctcccccagcagcaggcaaaaggaagcagtgtccatgttctctactccacccccgcttgttacctctgggagctgaacaaggccaacctcacctggtatttggggaaactggggagcttgggggggttggcatgccccgtgggtcatgaccctgccctcaatgcccctgccgctgtaggtcagtgaaacatgacgacttcttcccttacgcggatggcccccaccagttctggaccggttacttttccagtcggccggccctcaaacgctacgagcgcctcagctacaacttcctgcaggtgggtaggagccgggctagagggggcatgcagccccgaggcccgacaggctgggcgccccaacatacccctctgcctccaggtgtgcaaccagctggaggcgctggtgggcctggcggccaacgtgggaccctatggctccggagacagtgcacccctcagtaagtgtcgggcccaagaggggaagaggtttgcggctgaagttggaaaccacccctaggccgcccccctcgagtttcttctttttttttttttttttttttttttttgagacggagtctcgatttgtctcccaggctggagtgcagtggtgcgatctcggctcactgcaagctccacctcccgtgttcacgccattctcctgactcagcctcccgagtagctgggactacaggcgcccaccaccacgcccggctaattttttgtatttttagtagagacggggtttcaccatgttagccaggatggtctcgatctgacctcgtgatccgcccgcctcggtctctcaaagtgctgggattacaggcgtgagccaccgcccccagccgtcctcgagttccttcttaaagcctctaagaatcctgcccgccagcaccggacctttcgcttccccttggggtctcagctgagtcccacagaacctcaccggactcattgtctatgagcagatgaggcgatggctgtgctccagcatcacgacgccgtcagcggcacctcccgccagcacgtggccaacgactacgcgcgccagcttgcggcaggctgggggccttgcgaggtgcgcggggcgagacttgggagacacgggggtggagacaggaaggggcggggccagggcctgggaaaggggacagagacaggtgtgaggcgtagccgagagccctgtggcggggctacaagggctcgtgggggcggggcttgtaggaggcggggaaagatacaggaacggggcggggctttggaggggggaaggaggcggggcgtgggcaagaggaggcggagacagctatggggtatagtcaagggcagcagggtggggctagaaggggttttggggcgactcttgagggaggcgggacagagaccggaacggggcggggcctgaggagaggggaggagtcaggcctggcgtcctgaacccaccggtccctttgcgctcttccgcaggttcttctgagcaacgcgctggcgcggctcagaggcttcaaagatcacttcaccttttgccaacagctaaacatcagcatctgcccgctcagccagacggcggcgcgcgtgagccgggacgggaggggtggatctagggcagatgggctttagagggggtagttggaaaatgtttttggaggactatacaggagtgaaattacgtgggctgcgaagctgggtcagcagagagaacaacgcatctcgagggggcttggccttaagtgccgtgaccacactaggaccagccaggggtgtttctgtgcaaagtgggtgggtttggagaaggcctgctgtgacccatgccctctctgacccccgcctccccagttccaggtcatcgtttataatcccctggggcggaaggtgaattggatggtacggctgccggtcagcgaaggcgttttcgttgtgaaggaccccaatggcaggacagtgcccagcgatgtgagcccaaacaacgaatattcccccgctgggactcctcccccagtgggcatttcctcatcgcccccatggatatcgcctgcttccatgaatacctcccactcatgcatatctcttcccccctcttgtatcttctccctctgccccttaatatcagtctccccttgggaacatatgcctcctgtgagtggtcctcccttttttttttttttttgagacggagtctcgctctgtcacccaggctggagtgcagtggcgcgatcttggctcacttcaaactccgcctgctggattataggcatgagccaccgtgcctggctggtcctccattttaataccccgcttccccaggaaaatttattgctgtttatggacatctccttcattccagaaaacgtcctcccccaaacctcttcctcccccgagaacctgcctcaagggtttcttcccctacttcctccttcactcccccgactccatggtctctccaccctcccggtgggtttttttttccacctggtgaatcttctctgcaatcatttccttggaatctgactgtccccccaccacacacacctccatttcctttccccatctcaggactcttttccttccttgagttttttgtctccatgcatgtatagctttccatgggtactcttgactcagtttccctcctcctttatccgaggtggtaatatttcccagctcagacagccaggcgcaccctccggagctgctgttctcagcctcactgcccgccctgggcttcagcacctattcagtagcccaggtgcctcgctggaagccccaggcccgcgcaccacagcccatccccagaagatcctggtcccctgctttaaccatcgaaaatgaggtgagaccccatttcaatcccctttcctgctcctgtgacaaatttgaagtgtcatggtgagctgtgtggactctgggtcagcaggtccctaggcttatgacctcctgtcacaactcccctcattgtgtgtccttgagcaagtgacctttgtctgagcctcagtgtcctttcctgggactgttatgaggacccagtgtgatcatgggtgacacttgacagacatgtcagagttggtggcaggtggtggttcgcaattttggcagggacgtttcagggaaggtgttcccgataaaggtgacatttaagatatgacctgagggagggagccgtgtggctatttgaaggaagagagatccaggtggggagagaataacaggcataaaagccttcgagcaggagagtgtgcagaattccaggagccacaaggagctcagtgtggctgaagcagggtgaacgggtgacaggtcagaccttgagggccttgaggaccaacaggaagactttggcttttgccagtcattgttgctcatgtgtctactcctagctctttgggaggctgaagcgggaggatcacttgagcccaggagttgtcccagctaattgggaggcccagatgggaggtttgtttgagctggggagttcgaggttgcagtgagtaatgattgtcccactgtactccatcctggcaacagagtgaaaccctgtctgaaaagaataataataaaataggccaggcatcgtggattatacctgtaattctagcaccacgggaggctgaggtgggtggatctactgagctcaggagtttgagaccagcttgggcaacatggtgaaacccagtctctacaaaaaattagctgggggtggtggtacacgtctgtaatcccagctacttgggggctgaggaaggaggattgcttgagcccaggtggcagaggttgcagtgagccgagatcatgccactgcactccagcctgggtgacaaagtgagaccctgtctcaataaaataaaataaaagaagttctgcagtaggactgttcatgttaggaagaaaacatctttttcatatttttattaaaataaaataaaagaagttaaaacgttcccacaggcccctaaaagtcttgtgagttctggcattgtggttcacacatcagatgcccaagttggccctggtccgcagcagaggagggctttgatgggacttagggtatcacaggtgtgctctggctgttgtggggaacagactgtaggcagccagtgtggaagtgcagggacctggaaggggttgactgcactggccctggaaggccctggtaagaggtggtgaggttgaaaataaggttgggggggccgggcgcggtggctcacacctgtaatcccagcactttgggaggccgaggcaggcagatcacgaggtcaggagatggagaccatcctggctaacacggtgaaaccctgactctacaaaaatacaaaaaatttagccaggcgtggtggcgagcatctgtagtcccagttactcgggaggctgaggcaggagaatggcgtgaacccggaaggcggagcttgcagtgacctgagatggcgccactgcattccagcctgggcaacagagtgagactccgtctcaaaaaaaaaaaaaagaaaaaaaaagaaaaaaagaaaaggctggggtgggcacgttggctcatgcctgtaatcccaggactttgggaggctgaggctggcaggtcacctgaggtcaggagtttgagaccagcctggccaacacagtgaaacctcgtctgtaccaaaaatacaaaaattaactgggcgtggtggtacacacttgtagtcctagctactcgggagggagaggcaggagaatcacttgaacccaggaggtggaggttgcagtgagccgagatcatgccactgcactccagcctgggggacagagcaagactctgtctcaaaagcaaacaaaaaaaaaatcaggttgaatggctgggtgtggtggactgcttgagcccaggagttggacactagccccaggcaacatagtgggacccccatctctagaaaacaaatttaaatttttttttttttaatttagtagagatggagtttcactatgttggccaggctggtatcaaactcctcacctcaggttatccacccaacttggtctcccaaagttctgggattacaggtgtgagccaccacgctcggccctaaaaaaattttaaattgagaaaaaaaggggccaggcgtgttggctcatgcctgtaatcccagcactttgggaggctgaggggggggtggatcatgaggtcaggagttcgagaccagcatggccaatattgtgaaaccctgtctctaataaaaatacaaaaattagccaggtgtggtggcatgtgcctgtagtcccagctattcaggaggctgagtcaggagaattgcttgaacccgggaggcggaggttgcagtgagccaagatcacgccactttctgcactccagcctgggcgatagagcgagactcagtctcaaaaaaaaaaaaaaaacaaaaaacccaggccaggtgcagtggctcacgcctgtaatcccagccctttgggaggccaaggcgggtggattacctgaggtcaggagttggagaccagcctgaccaacatggcgaaaccccgtctctactaaaaatacaaaaattagccaggcatggtggcatgtgcctgtaatcccagctacccaggaggctgaggcaggagaattgctggaacccaggggcagaggctgtagtgagcagagattgcgcccctgcactccagcctgggcgacacagcaagtttctgtctcaaaaaaaaaaaataaaaatccggctgggcacagtggcttatgtctgtaatcctagtactttgggaggccaaggtgagcagatcacttgagttcaggggtttgagaccagcctggccaacatggtgaaaccctgtctctactaaaaatatgaaaattagccaggcggggtggtgggcacctgtaatcccagctacttggatagctgaggcacgagaatcacttgaacccgggaggtggggggtgcagtgagccaagattgcaccactgtactctagcctgggctacagagtgagactcagtctcaaaaaaaaaaaaagaaaaaagaaaaattaaaaaaagaaaacacacacacatacacacacaaacccatctgtggacccttttctgcccagcacatccgggcaacgtttgatcctgacacagggctgttgatggagattatgaacatgaatcagcaactcctgctgcctgttcgccagaccttcttctggtaagggaagatcaccaggcctgagggtggggtggtggtgctcggcatggagctagggccccttacctgactctcacctgccccaactccaggtacaacgccagtataggtgacaacgaaagtgaccaggcctcaggtgcctacatcttcagacccaaccaacagaaaccgctgcctgtgagccgctgggctcagatccacctggtgaaggtcagggactaggaatgatgagtgggcagttgggaatggggaagttatggagcccaagagggtggtgggccatgtgtagagtgagggtaggggaggatttacttttccttcagatcagtgggctaagacccacagatcagcgggggaaatatttgagggtccttccatagaattgatattcatagctggtcgtatgagagtctccccataggacacatcatacaaagccattcacatctgctgtggacgtttacatacttagttttggaaattgggggtggggcattcccacttggcccatgaatcaggagagccaaatatcactgcttgaagaattcaccaaagtctgtagtaagaggagcttctatctggagtgaatatttgagagtccacccttggattgattgggtttgggtgagtctcagggtgaatgcctatgggtgcatctggctaggaacagtggtttcccagggcctctcattgatgtttgactttcatagatgacaaaactcacatttgtccacattcaagagcctcgcgtttcatgtgagtccctttgagatgaatgtctgcatatctgtatatagttttgcctgttctaacagagttacccaaattaactgtgactagaataagatagaagattattttcttctaacaaaaagtctggctgttagtccagagaaagtggggtggttccataatcacccaggacctcctcttctatcttgttgctctgccttccccaatattcagtttccacctcatggtccaagatagctgctgaagctccagccgccacatttgtgtttgagtcagtagcagagggacaggggcaaggaacattgttgacaccacttggatcactttctatggggcaaactggtcactcagctactgatagcctcagggaagactggacaatatagtctttatcccaggtagccatgtgccaagctagaatcctattctatggggcaatggtgaacaggaggcgtttatgccacgctcaagagtgatgtggtaagccagatgcagtggctcatgcctgtaatcacagcactttgggagactgaagcaggaggatcgctgagcataggagttcaagaccaggtgggagcatttgctgattaggtgcctacatagtgatgccctgtctcaaaaaaaaaaaaaaaaaaagaggccgggtgcagtggctcacgcctgtaatcccagcactttgcgaggcagaggcaggcagatcatctgaggtcaggagttcaagacaagtctggccaacatggatagaaaccccgtctctactaaaaatacaaaaattagccaggggtggtggcaggtacctgcaatccctctactcgggaggctgaggcaggagaattgcttgaacccaggaggcggaggttgcagtgaggcaagattgtgccactgcactccatcctgggcaacaagagcaaaactctgtctcaaaaaaaaaaaaagaaaaaagaattatgtgggccaggcgcggtggctcacgcctgtaatcccagcactttgggaggccgaggcgggctgatcacgaggtcaggagatcgagaccatccttgctaacacggtgaaaccccatctctactaaaaatacaaaaaattagccgggtgtggtggcgggtgcctgtagtcccagctactcgggaggctgaggcaggagaatggtgtgaacccgggaggcggagcttgcagtgagccgagatcgcgccactgcactcccgcctgggcaaaagagcgagactccgtctcaaaaaaaaaaaaaaaaaaagaattatgtggcggtgactgaaggttgaccttgatgtaggccttaatggggtttatggccagggttgggggacatttgtaggactcacctctgctcaggtacagactgacatccacctcacccgtgtgcccgcagacacccttggtgcaggaggtgcaccagaacttctcagcttggtgttcccaggtggttcgcctgtacccaggacagcggcacctggagctagagtggtcggtggggccgatacctgtggggtgagtggcacaggctgggagaggggtgtggaagcaagggcagaggggtttatccaaggctcacaaccttgccatcccattgggtacagcgacacctgggggaaggaggtcatcagccgttttgacacaccgctggagacaaagggacgcttctacacagacagcaatggccgggagatcctggagaggaggtggggggtgactgagagcactgagggggtggtctgtggtgtgttggggcccaggggtggtgagggaaatttgctgattacatgagtgtgggagacagaggacgaagggagagtgaagggcgggggagccaggcagggtgcagtggctcacgcctgtaatcccagcactttgggaagccgaggcgggcagatcacaaggtcaggagatcgagactatcctggctaacatggtgaaaccccgtctctactaaaaatacaaaaaaatcagccgggtgtggtggcgggcacctgtagtcccagctactcgggaggctgaggcaggagaatggcgtgaagccgggaggcggagcttgcagtgagccgagatcgcgccactgcactccagcctgggtgacagagcgagactccatctcaaaaaaaaaaaaaaaaaaaaaagagttggggagccagatcccaagcctgatcagctcacccccaaccccaggcgggattatcgacccacctggaaactgaaccagacggagcccgtggcaggaaactactatccagtcaacacccggatttacatcacggtagctctcccccatcctgcacctccccacctcgatagaaagggaatcaccccttatctgcagcatctcaaagctgcctggggttggggttgactgccctctactttcacccttcaactcccaggatggaaacatgcagctgactgtgctgactgaccgctcccaggggggcagcagcctgagagatggctcgctggagctcatggtgagtgggtcagagccccatccgagccagggtcctcccaacctggacccctgctggaccttgaaggctgtttctggcccagttctctgctttcaggccccactaagctgaggactccgtttctttcttttcttctctttgagacggagttttgctcttgttgtccaagctggagtgcaatagtactatctcagctcactgcaacctctgcctcctgggttcaagtgattgtcctgcctcagccttccgagtagctgggcttacaggcacacaccatcacgcccggctaattttggtatttttagtagagatggggtttcaccatgttggccaggctggtctcgaactccttacctcaggtgatccactcacctcggcctcccaaagtgctgggattacaggcgtgaaccaccgctcccggccaaggactccatttctgtgtgtggcttttcctctccgtttttctccatctcctgcccaggctccctccacgctctggcgtgccatatccaggcccccctgttaggcatttacctccttccggcctggttcccatgcctacttggatcctgcctctgctggggttgccctaccagaccctcaccttcatcctcatccgttcctcccaccctttaatttcttttgacattcccacacgcccttacccagtttctggcccaaggacacccacaaacccacgactctcaccccctcctggccactctccccccaggtgcaccgaaggctgctgaaggacgatggacgcggagtatcggagccactaatggagaacgggtcgggggcgtgggtgcgagggcgccacctggtgctgctggacacagcccaggctgcagccgccggacaccggctcctggcggagcaggaggtcctggcccctcaggtggtgctggccccgggtggcggcgccgcctacaatctcggggctcctccgcgcacgcaggtgaggggcagcggggtaggcagagaggaccggattgaagtctaccagggagccgggtttgggtgcggagtttcctaggctcagcggggatccatttggccataattagccccaaaccctcgggccaaccccatcccctgggcagtccccgcccagtgccagcccagtcccaacccccctggactgtgtagaggcacagccctagctcatgcccctaaaccaccaactcacctccggccccgcccatttcactttagccccgccctctcaccgcccccaggctctgtcctgcctcacccagccccgcggcttcagccccgccgtaactcccaaagtctcaggtcacatcagttctgctccatcgggactcgaaccctaagcttgggaccgacccatctccccattggctcagtcctccctgtcacggccctggccgctcctctcggctgagccttgcccctctccggcgaaaccccgcccctacaacctagccctgcctcctgacctggctcggccccgcccttctccatccaggccccgcccctctccaactcagccccgccctctctcccgcagttctcagggctgcgcagggacctgccgccctcggtgcacctgctcacgctggccagctggggccccgaaatggtgctgctgcgcttggagcaccagtttgccgtaggagaggattccggacgtaacctgagcgcccccgttaccttgaacttgagggtgagaagggcaaaattgagaaggagatcggagagaggcaagagagagggagagaagagaaacctggctttgccccaactcatctgggcccatccccttccccgcaggacctgttctccaccttcaccatcacccgcctgcaggagaccacgctggtggccaaccagctccgcgaggcagcctccaggctcaagtggacaacaaacacaggtggggccctggtcaggggtagggaaggggtggagtcttacctggggccggcaggtgggggcaatgtgtgaggcatgggatgttggccaggacccaaaaaggtcatgagggtatggggcagagtccagacccaggttaggggcttaaaggatctgaaatgggtgcggcaaaccaggaatgggtcttgaggtttgtgggtgctgtttagtcccaagaacaagatttgaaaatccccatccatgtctagttctgggagggtgttcatcacccctggggtcagattgagggtacgaggacagtggccagattgagggtatgaggacattggacctgggggtggtattcggggccggggaagcaggttaagagtctgggattgaggccctggagacagattcggggatatgcagctgtgtctagacccaggggaggaagcatcgtggggtgagtcagaggaagtctgcacctcctcactcctccttccccctgcacctctccaggccccacaccccaccaaactccgtaccagctggacccggccaacatcacgctggaacccatggaaatccgcactttcctggcctcagttcaatggaaggaggtggatggttaggtctgctgggatgggccctccaagcccaagcctcctgctccgggggcagaccagactctgactctcctcttggggctgctgccattaaaacgctactactaagactcaggtcgctctgtg

SEQ ID NO: 1047 - DNA, 9796 bp, Homo sapiens
gcctttccagggccggggaaccccaggaggaagctgctgagccatgggcgcctacgcgcgggcttcgggggtctgcgctcgcggctgcctggactcagcaggcccctggaccatgtcccgcgccctgcggccaccgctcccgcctctctgctttttccttttgttgctggcggctgccggtgctcgggccgggggatacgaggtgagtggggcctccgagctgaaacgtacaggaggcagagtgaaacccagaatacagtctagaggtgtgggtgggtctgtcctgtgggtgtctagtgaatggctgatgatatgacagtgtggtctgagtgcgtgctttgtgtcattgcgaggtctggctgtgcgcatctgagtataggactgtgtctgattgtacctgcctccgtgtctccgggatgcttgcctagactttgtctgcacttaactgtgggattggaggggcaggaggtggcagggggtgagcagtgtatgtgtggggggaggtgctggctgagagctgggactctggagtctgcctgaaattccagcctagctcttacacttcctgagtgtgtgacgttgggcaagtcacctatcctctctaagcctcagtgccttcatctggaaactggggataacatcaccccacctcccacggtggccgtctgctgtcggcaaatgctgaacaaacatcagctacttctattattattttcccggagtgtgaatgagagctgccctgtggggttgtgcaaagtggagttgtatctatgagcacaactatgtatgtgtgtgtcctgcctgggagggcctggcctcctctgcacataggcgagatcaggcctctctgagtcactcacctctagatcaagacttactctgcagcccccgacctcgggggttattgacaaggtatgtgtgtttggggtccctgtgcagacatgccccacagtgcagccgaacatgctgaacgtgcacctgctgcctcacacacatgatgacgtgggctggctcaaaaccgtggaccagtacttttatggaagtgagtagaggatggggactggtccctgggatccccatggtccctgtaatccctctgggtcctggacattagggtggggccagtgctaccctaatatccagggtttgggctcctctgtctaggaataacccccttggctctgctgttccctgagagccttatccctgttatccacagtcaagaatgacatccagcacgccggtgtgcagtacatcctggactcggtcatctctgccttgctggcagatcccacccgtcgcttcatttacgtggagattgccttcttctcccgttggtggcaccagcagacaaatgccacacaggaagtcgtgcgagaccttgtgcgccagggtgagcctaccccaaggaagtgaaaagaggaagcccagcccagcttctgcttctgcatctctggtttctgagatttgtcatgccacgtgcaagctgtataacatgcgtgtcgctccgcctgcctggactctccatttggagacctcctatacatcccacaaagccccacctgctgtgcatcctctgggaagcctgccatgcagggggcctctttcccatatctgggaactatggcctgggagcgacccctcttgtccttccgccagaaatgtgtacacaggcaggctttcacattcccagtatcacccaccctactcccactcctggctctgaccgctgaccctgaccttgcctgtcctggcacagggcgcctggagttcgccaatggtggctgggtgatgaacgatgaggcagccacccactacggtgccatcgtggaccagatgacacttgggctgcgctttctggaggacacatttggcaatgatgggcgaccccgtgtggcctggcacattgaccccttcggccactctcgggagcaggcctcgctgtttgcgcaggtgcgacccgggacctctcttgggcccacttcttcactcactctggctcctccctcgcccagtcaaaccccgccctctccctgcaatctcacaaggaccaggcccaggcctaggcctgttgaagccctgccccttgagtgagccgtaaagccagtggcttttgagctctggcctcagccggctatgcccagcccaggctgacccagctccggctggctccgccctctcccctaataggcccctcttggtgttctggccccacccactagctcgggtcctggctcctccctaaaccgggtggcaagtggatgcctaggctgccttaaaaacaggttcattacctgtgctcagaccccatccatcctcaggctgtggaagggggaacctcattcctggagtcaggcctgctctgcgctttgacagtgctggggaggtgaacctgggttctgatgttggacccgccctctccctgctagcccaaggtggtgagttctgaaacttccccaagcttggaaataagctggaggcctctctgtttcagccctacgtgtttttgtttttgttttttgagacagggtcttgctgtcatccaggctggagtgcagtggtgcaatcctaactcactatagcctcaatctcccggattcaagcgattctcctgtctcagcccccctagtagatgagactacaagagcgcaccactacgcctggctaatttttaaattttttgtagacagtctgcccgtgttgtgcaggctggtctcaaaaactcctgggtttaagtgatcctcctgttttggcctcccagaaggctgggatcataggcaagagccaccacatcgacctagcactgctttttaacctgtgctctgacctgcccctcccaagcagaggggagtttggtggtgagagggctgggcactaattcacactgccttttcctccctcatccccagatgggcttcgacggcttcttctttgggcgccttgattatcaagataagtgggtacggatgcagaagctggagatggagcaggtgtggcgggccagcaccagcctgaagcccccgaccgcggacctcttcactggtagggggcttggtgagggcagggccagccatggtgccacacactcagaagggccctgggcttgatatctgctctgttgtcactgtcctggaattcctatagtctgggaacaaaggccctgcatttccttttgcattgggacacaaattctgaagcccatcctgggtgggacatggccggctttgaaaccagggaaggtctgggtgatgggccaccccttgaacttggtgtgacctgcaggtgtgcttcccaatggttacaacccgccaaggaatctgtgctgggatgtgctgtgtgtcgatcagccgctggtggaggaccctcgcagccccgagtacaacgccaaggagctggtcgattacttcctaaatgtggccactgcccaggtaaccctggtgtccagaaccttcgagtccggtatatacaatacaatgagctctttccatggtacaggcatcccctaacacgttctccttatttttaatttttttgagacagtcttactctgtcacccaggctggagtgcagtggtgcgatctcggctcactgcaacctctgcctcctgggttcaaacaagcacatccagctaatttttgtatttttgcactggggtctcatcatgttgtccaggctggtctcaaactcctgagctcaagtgatctgcttgcctcggcctcccaaagtgccgggattacaggcatgagccaccgcacctggcctctatttttaacatttttatttatttattattatttttttttttttgagacagagtcttgctctgtcacccaggctggagtgcagtggcatgatctcagctcactgcaacctccgcctcccgggttcaagcgattctcctgcctcagcctcctaagaagctgggattagaggcacctgccaccacacccagctaatttttgtatttttagtagacagggtttcgtcatgttgaccaggctggtcttgacctcaggtgatctgcccgcctcaacctcccaaagtgctgggattacaggtgtgggccactgtgcctagtctatttttaacatttttattgagaattccttttttattttttttagactcactctgtcgcccaggctggagtgcagtggcacgatctcggctcactgcaacctccacctactgggtccaagcgattcttctgcctcagcctcccgagtagctgggattacaggtgcccaccaccatgctcggctaagttttatgtctttttagtagaaagggggtttcaccatattggccaggctggtctcgaactcctaaccttttgacccacagccttggcctctcaaagtgctgggattacaggcgtgagccaccgcgtccagcctttaacatttttataattaaaaaacattattttttcacagagataaggtctcaccatgtggcccaggctggtctcaaactcctgaactcaagtgatcctcctgccttggcctcccaaagtgctaggatataggtgtgagccaccatgcctggcataacacgttctccttaaaaaaatttttttttcctttctttaaaaattgatggctgggcatggtggctcacgcctataatcccagcattttgagaggccgagatgggcagatcatctgaagtcaggagttcaagaccagcatagccaaaatgacgaaaccctgtctctactaaaaatacaaaaattagtcgggtgtggtggcgcacgcctgtaatcccagctacttgggaggctaaggcaagagagtcgcttgaacctggcaggtggaggttgcagtgagccgagatcacgtcacttcactctagcttgggcagcagagtgaaactctgtctcaaaaaaaaaattgttttagattaattttttttttttttcttgagacagggtcttgctgtgtggcccaggttggtcttaaactcctagactcaagcgatcctcctgcctcagtctcctgagtagctgggattacaggtgtgagcccctgtaatcatgttctcatgccccctggaggaagatgctattctattcaccatcacaatgtccccctcctggatttatgtgcattcctcattagaagagatagcataggctgggcaagagatagcatggcatggtgactggatgccctcttctaggtagtgggtccaagagaactgctcaacaactggtggctacttttatctgtgtccccacgctcccaagtgccatacccccacccatgcctgtgcacccaacatccttgaccccatatacatcaaaacacagctatacacagggatggcccaggatcctctggcttcaggactcccctcttgcctgcagggccggtattaccgcaccaaccacactgtgatgaccatgggctcggacttccaatatgagaatgccaacatgtggttcaagaaccttgacaagctcatccggctggtaaatgcgcaggtcagtgcgcctaccctgtggtacccttgtgcacatgtgcgcttgcatccgggggccttgggttatgtgcatagctctcagtgctgtctttgttttctattgttctattgtggtcattctataacaaatgaccacacacttagcagctcaaaacaacagaaatacattgtcttacagttctgtaggtaagaagtccagcatgaggccgggcgcaatggctcatgcctgtaatcccagcatgttgggaggctgagccgggcagatcacgaggtcaggaattcgagaccagcctgaccaacatggtgaaacgctgtctctactaaaaatacagaaattagctgggtgtgatggtgcgtgcctgtaatcccagctactcgggagcctgaggcaggggaatctcttgaatccgggaggcggaggttgcagtgagcggagattgtaccactgcactccagcctgggccacagagaaagactctgtctcaaaaaaaaaaaaaaaaaaaaaaaatccagcctgagtctcaccaggctataatcaaggtgttggcaaggctgtgttccttctgcagtctctaggagagaatataatttccttgctttttccaacatctagaagttacccacattcaaaatctattcttggctccatcttcaaagccagccacatagcatctttctgaccctgtttctgtaatcacatccctttctctcattctcacctcttctgcctctctcttccacattttatttatttacttagagacggagtctcgctctgtcgcccaggctggagtgcagtggcgtgctctcggctcactgcaacctccgcctcctgggttcaagtgattcttctgtctcagcctcccaagtagctgggactacagtcgcgtgccaccacgcccagctaatttttgtatttttagtagacagggtttcaccatgttggccaggatggtctcgatttcttgacctcgtgatccaccccgctcggcctcccaaggtgctgggattacagatgtgagccactgtgtggcctaatttccctactttaagtttggctgatgaacaacctcaattccatctgcaaccttaattccccttttgccatgtaatctaatgtggtaataggttctggggatcaggacatggacacttttgggcagttatcattttacccaacacagatgtgttagtgttttgcactaagtggcctgtggctgtggctgtgtgcacagtcagtcactctcatcagcacagaaacttgtctcccctctcccatctcagacaccccttcccatcaatcttgtcctcactacggtgcaatctccattcccaccttccactcgctcccagcactgctatttcaccaaaacagctcttttatgtcatttatttttatttattttttctttttaaaattttatttatttatttatttattgagacaagagtcttgctttgtcacccaggctggagtgcagtggcatgatcttgcctcatggcaacctctgcctcctgggttctagtgattctcctgcctcagcctcccaagtagctgggactacaggcatgtgccaccaaccctggctaatttttgtatttttagtagaggcagggtttcactatgttggccaggctggtctcaaaactcctgacctcaggtgatccgtccgccttggcctcccaaagtgttgggattgtaatctgaggtgggcggatcacttgaagacaggagttggagaccagcctggccaacatggtgaaaccttgtctctactaaaaatactacaaattaggtgggcgtgatggcactcatctgtaagaccagctactcggcaggctgaggcaggagaatcgctggaacctgggaggcggagtttgcagccagctgagatcgtgccactgcactccagcttgggcgacagagtcagactcagtctcaaaaaaaaaaaaaaaaaaaaaagtttattgagcacctactgtgtacattgggggacacagctcgtgcaaaacaaacatccttttcctcacataggtcactttcttgttcctccaccttgctcaggtgaaagtgcacctccattcattataaaaattgtgtctaggccgggcacggtggctcatgcctgtaatcccagcactttgggaggctgaggcgggcggatcatgaggtcaggagatcgagaccatcctggctaacacggtgaaactccgtctctactaaaaaatgcaaaaaattagccgggtgtggtggcgggcacctgtagtcccaggtactcatgaggctgaggctggagaatggcgtgaacccaagaggtggagcttgcagtgagctgagattgagccactgcactacagcctgggcaacaaagtaagactccgtcccaaaaaaaaaaagttgtgttttttggtaacaatctgacagtcctgcaaaacgattattcctgccctataatgtcacacttagtttttccacaaaagtttttaataataaagttggaattattgtaaaagtttagtaaaatttcaggtttattcttgcatctctgaaatccttttaaaaaaggctagtggtcatgtttgacttcagccaaaattcattttcacacccaaccattggcttgcacgccaaatatgtatttagagaaactgaacctatgggatgcatgaatgtgcacacatgtgtggaagtgtgggcccccaggaaggtgcggactcccgagggctcactccgtcgcctcccccagcagcaggcaaaaggaagcagtgtccatgttctctactccacccccgcttgttacctctgggagctgaacaaggccaacctcacctggtatttggggaaactggggagcttgggggggttggcatgccccgtgggtcatgaccctgccctcaatgcccctgccgctgtaggtcagtgaaacatgacgacttcttcccttacgcggatggcccccaccagttctggaccggttacttttccagtcggccggccctcaaacgctacgagcgcctcagctacaacttcctgcaggtgggtaggagccgggctagagggggcatgcagccccgaggcccgacaggctgggcgccccaacatacccctctgcctccaggtgtgcaaccagctggaggcgctggtgggcctggcggccaacgtgggaccctatggctccggagacagtgcacccctcagtaagtgtcgggcccaagaggggaagaggtttgcggctgaagttggaaaccacccctaggccgcccccctcgagtttcttctttttttttttttttttttttttttttgagacggagtctcgatttgtctcccaggctggagtgcagtggtgcgatctcggctcactgcaagctccacctcccgtgttcacgccattctcctgactcagcctcccgagtagctgggactacaggcgcccaccaccacgcccggctaattttttgtatttttagtagagacggggtttcaccatgttagccaggatggtctcgatctgacctcgtgatccgcccgcctcggtctctcaaagtgctgggattacaggcgtgagccaccgcccccagccgtcctcgagttccttcttaaagcctctaagaatcctgcccgccagcaccggacctttcgcttccccttggggtctcagctgagtcccacagaacctcaccggactcattgtctatgagcagatgaggcgatggctgtgctccagcatcacgacgccgtcagcggcacctcccgccagcacgtggccaacgactacgcgcgccagcttgcggcaggctgggggccttgcgaggtgcgcggggcgagacttgggagacacgggggtggagacaggaaggggcggggccagggcctgggaaaggggacagagacaggtgtgaggcgtagccgagagccctgtggcggggctacaagggctcgtgggggcggggcttgtaggaggcggggaaagatacaggaacggggcggggctttggaggggggaaggaggcggggcgtgggcaagaggaggcggagacagctatggggtatagtcaagggcagcagggtggggctagaaggggttttggggcgactcttgagggaggcgggacagagaccggaacggggcggggcctgaggagaggggaggagtcaggcctggcgtcctgaacccaccggtccctttgcgctcttccgcaggttcttctgagcaacgcgctggcgcggctcagaggcttcaaagatcacttcaccttttgccaacagctaaacatcagcatctgcccgctcagccagacggcggcgcgc

SEQ ID NO: 1048 - DNA, 3844 bp, Homo sapiens
tcatgcctgtaatcccagcattttgggaggccgaggcgggcagatcacaaggtcaggagatcaagaccatcctggctaacacggtgaaaccctgtctctatcttagtaatactttattaattagtctgggcgtgtggcgggcgcctgtagtcccagctacttgggaggctgaggcaggagactggcgtgaacccgggaggtggagcttgtagtgagccgaaatcacaccactacactccagcctgggcgacagagcaagactccgtctcaaaaaaaaaaaaaaaaaaaaaaaagctctctgattttagctgttaggtgggagatgggttggaggataccaaagccagcttgcaggctatggggataaagaaaacacctggatttcggacctactttataggtagaggttggcagacatgctgagaaggatggatgtggggtgtgagaaaaggggagacagcaagctgcgctcctcatttttaatttttatttatctatttttgagacggagtttcgctctgttgcccaggctggagtgcagtggcaccatctcagctcactgcaacctccacctcccgggttcaagtgattctcctgcctcagcctcctgagtagctgggattatgggtgtgcgccaccacacccggctaatttttgtattttttagtagagacggggtttcgccatgttgtccaggctggtctctaactcctaacctcaggtgatctgccctccttggcatcccaaagtgctgggattacaggtgtgagccaccgcgcccagccccaatccctatttttcagtctagtggatgagtggagggtggggccgtttgctgagatgcagaaagatcagggataggtggagagggagctgagggggcaactttgaggtccaagcgaggatgtcaaggaggatgtctgtctcctccaacaaggtaggctcattccagcctcacggcttttgctgttctgtcttcccatgtgcagaaatggcctctctgcatcttcacatacggggattttctcagccttctggctttggctcaaatctcacctccttggcgtccttcacccatccctccaactaaaatcccgaactcctccacctaaagactcaaattatcctgtttaaatcctgattgcgctgggcgcggtggctcacacctgtaatcccagcactttgggaggccgaggcaggcagatcacctgaggtcaggagttcgagactagcctgaccaacatagtgaaaccccatctctactaaaaatacaagaattagccgggcgtgatggctcatgcctgtaatcccagctactcgggaggctgaggcaggagaattgcttgaaactgggaggcagaggttgcgatgagtggagatcgcgccattgcactccagcctgggcaacaagagcgaaactctgtctccaaaaaaaacaaaaaacaaaaaaggcctgatagcactcaccactattgttaactttctatcttcccaatcagattgtgggctccagtagggcagggtccacatcttggtcttgttcaccactaaatccttagtgcctagcacggagcccaccatagagaatagactacatgaattgtagagtgagtgaataatcctgttggccgtatgcactgttaggagggtgtgtttgagatacagatgacacccagggtctcacattcttgcaggagggaaagagacgtcagccctgggtcccagaagaggccactgacccagtgggagttcagggaaggcttcccagaggaggtggaggtgacagctgcagctataagggaaggaagaacagagcgttatgcagcatgtgaaggctttggagacttgtgagggcacgaaccgggctcactatcccattagacaaaagtggctgaggaaggatgaaactgtgtctaactctgcctggtgaccgaaatcttgtccatgggtgacgcttaagaagtgaccctcggccgggcgcagtggctcacgcctgtaatcctggcactttgggaggccaaggcgggcgggtcacgagttcaggagatcgagaccatcctggctaacacggtgaaaccccatctctactaaaaacagaaaaaattagccgggtgtggtggcgggcacctgtagtcccagttactcgggaggctgaggcaggagaatggcatgaacctgggaggcagagcttgcagtgagccgagattgcgccactgcactccagcctgggcgacagagcgagactctgtctcaaaaaaaaaaaaaaaaaaaaaagtgaccctcataaaaaaattagctgggcacgatggtgcacactagtcggaatgctggggtgggaggatgacctgagtccgggagtcagaggttgcagtgggccgagatcgcgtcacagcactccagcctggcgacagagtgagaccctatcaaaaaatagcagcaggccaggcgcggtggctcatgcctgtaatcccagcactttgggaggctgaggcgggcggatcacgaggtcaggagatcgagactaccctggctaacacggtgaaaccccgtctctactaaaaatacaaaatattagccgggcgtggtggccggcgcctgtagtcccagttactggggaggctgaggcagaagaatggcgtgaacctgggaggcggaggttgcagtgagccgagatcgtgccactgcactccagcctgggagacagcgcaagactctagctcaaacaaacaaacaaacaaaacagcaacaacaacaacaaaaccatcctcccctcccgaggggacagaacagaaacgaatgggcgagtgccgggccaagcagtgggtctccagcaggtggcattaaaataggaattttggctggggacggtggctcacacctgtaatctcagcactttggaaagcccaggcgggcggtcacctgagggcagaaccagcctcgccaacatggtgaaatgccatctctactaaaaataaaaaattagccaggcctggtggtgggtgtctgtaatcccagcaactcgggaggctgaggcaggagaatcgcttgaaccaggggggcagaggttgcaatgagtcaagattgcaccaccgcactccagcctgcgtaacaagagcgtgtaactcttgtctcaaaaataaattaaataaataaataataaaaataaaaaagaatcttcattcatgggaagtcgagaacacatgaaaacaagtaaaggccgaagcgcagtggctcacgcctgtaatcccagcactttgggaggctgaggcgggcggataacctgaggtcggaagttcgagaccagcctgaccaacagggagaaaccccgcctctactaaaaatacaaaattagccgggcatggcggtgcatgccagtagtcccagctactcgggaggctgaggcaggagaatcgcttgaacccggaatgtggaggttgtggtgagctgagatcgggcaattgcactccagcctgggcaacaagagcgaaaccctgtatcaaaaaaaaaaaaaagaaaaaaaaaggaagaaaaggcctaaaggcgccgggcgcggtgggtcacgcctgtaatcccagcactttgggaggccgaggcgggcgaatcacgaggtcaggagatcgagaccaggtgaaaccccgtctctactaaaaatacaaaaaaattagccgggcgtggtggtgggcgcctgtagtcccagctactcgggaggctgaggcaggagaacagcgtgaacccggaaagcggagctggcagtgagctgagatcgcgccactgcactccagcctgggtgacagagcgagactccgtctcaaaaaaaaaaaaaaaaaaaaaaagaaagaaaggg

SEQ ID NO: 1049 - DNA, 4126 bp, Homo sapiens
tgcagtgcagagttcctttatttgggggcagtgcccaggccagttggtggaaagaggcaggcatacaacccactgtcaggctggggggcccagcaggggcgatggaggagacgaggtggttgagggattttctcagctgcaggttccaggcccaggacaggaggagatgtcaggcatcagacactgagcctgcttggtgcccgcaggagccaaaaactggcggccagagtttttcccgcccccgccccccgcttacccacaagggtgcccagaggccaccctctgcatcctcctttcccctcaggatggagtccaggcccaaaggggtcagattctgcagaggccaaagaggacactcaggaaggtgacactgcctcagccagccaaggaccccctgcctcgagaggaggcagcagaggaagagcaaacactttaacacaggctgtggcgacccgccccacagcacacacggcacacagagggcctcaggcacagctccccttctcagagcaaaacccaactagacacaaggcccagctcctgcccacagccacagaaacgcgggccacaggcttgcctgggctggcacctactggttctcttccctgctggcagcatgaagggaaaagacacaggagggctcagctgggctcctagactggcccaggctgagtcctggtcccagccaacatctgacaaaggaaacaccccaactggaggagacaaaaggggtgtggctcacatggagcacgctgtcaccgtcctgagggcttgcccatggagaagacagcaccctgggtactgaaggggaacggtggggcaggaaccaggaggtgagctgggactcaggtacttgctgctggccaggtactcacagcgtctggtaggtgctgtccttggccttgaggaagtgcagcacaaagaaagccaccgcctgtaggctcaacaccagcacgacacctccgataaagctggccccgtcaaatccagggctgtgggcctcagggactggggggctccctgcaggggtgaggcagggcaggggtcatagcagtcactgtgaaccaggatcccagtcctaccctcataactggcacaagtaacctggaggccccggtcctcaatatggggtgcttaaaccctgggctccgtttagtccagatcccgcaggcagttgggaagcgcctggtgggaggaacagtggcaggggagggtggggtgctgtccagccctggctctgctcctggcttgctctgtggcttttatgccacccacattctctctgggcctcatgatcacatggtccaattggtggcttggaccagtgactgggctcccaccctccctgggcctcaccagcccaatagggtgaagacagagccagaactcagaccctcccctgctcacaattcctttcagccttggacctcagggttcagagccaagatgcagacgatatagtcccttttcaggactcctaagccctaagacctcagtgtcacccaatgtcagagccctcagagagggaaggagcagggggagaagtggaggccccaactgtcaccctgctaagtgggtaagcgaggactggacagtgtgtgtcagggggaacatggctgagggacaggcttggccaaagtcacctcacaggacatagccagactcacacagggtcccctgaccatctcctctgccccttagaaggtagggctttagggccatggttgccaggctatgcctgggtggctcccagctgtgccacggtacctgtccactcctagcagggatttgatttcaggccctgggctgggtgcccagaacagggcagggctggtggatggaagatcattctgggacagtggaaaggggcccagcctgaactgggtctccctcccagaaggtgtaaggggtggaaggagtctgacaatatgaagggcaaacagtggtcccagctcccgctcagggagccccagagaaggaagctgggggatgaggagcagaagaggggagaaatgagccacatgaggctgatccggggctccagctgagggagctgagccatcaataattcagcttctgagatcggtttctggctttaattaaccaagggcctcttcagccatccctgccaagtctggtgacctccagcccctgagagggagtgggaagcaaagggtggcattcttgcctctactccgccaggaacccgccttgtgaccctctctgggcctggagggtgcagtaggcaggcactgaggatgtctcctgagcaactcgagccacacaccctcacctccaaggacaagtcccgaggagtgaccttgagttcccagaactggcaatggggaggagggatgggaactgtcatttcttgattgccttcagtgagtcagacactgaagtgggcactgtacagcttctcataaaacctgcagagcaactctatgagaaaggcatcatccaacccatttcacagatgcggagacaggctccgagggagaaggcgcagggccgaggtcacagagcatgtcagtgcctgagcccagagctgtcttcccctgcacctctgctcctcccactgccccgtctccagggagtactcacctgttgtgactgtcttcggttcataggtggggtggtggtgagcagctgaggagacaggtgatccatagcaaagcagccttcccaccccctgactcccatcaagaccccagcccccactcaccgctaaacttccgattcagatgcagccctgtccctactctagacatccaacatacttgcaagccccacacagttccctccaccagatgtgctctctctccatctctaccttccaggctcattactgatgccacctcctccaggaagcactccctctcattccctctgaacttccaaagtccttgctatgccttaaactagaagaagagctaacactcccatcccctccacacacctgtactaattttcagatgaggaaataggcagagagaggaggggacttctcagtgagctaaaggcagaactgataccgggcccaggtatgggtgagcaaaatccaccgcctgagagaggctgtttcctcctggggggcaggctatggctggggagacccatgcaacttggcttaggtgcaagaacccccttacctggacatgcctctgagcggttgtagatggagcaaccttccttgaccacctcagattgggccacacagtgtcctggtgagagaaggtgcaggggggaggtttggggagaggggccagggccttggggttcagagctgggggcactcaatctggggagggctcagctccatacctggctcctctggccggcactgctcccacatgcagctggagagattgcgcgctctgtctccctccacgcagtgctcacagacctccagctgtttgcaggccccttggaccgccggccagatattcaggcggatcagggctcccctcccaaagcctcgagctcctttacctggtagtgcggtggagtgggaagggagaattcctcgaagccaagctgtggcacccgcccaccctcccacccaacactccggtggccctcgcccctctgcacacatctgggctctcacactcacccctggatccccaagccccagcgcacacctggagcttccacagcagaggtctacacacacctagagcctccccacattcacccagagcccctccctttgcatacacccggggttcccagattcagttggagccacctcccccagaccacctgaagctccctaggcccccacacctggggcctatatttacacacagggctccacacagagctggagccccctctcccacccctggaggcctgcacttggccggaaagccccctcccctcaagcccaggctgctcctggggagacggctggctgaggtgcaagctccatccgtccccgtcgagcccctagccagaccctgccgcgagttaccagccacagccagctgggcacataggaggaggcagcaacagccgccacagagcgcagtccgcaaggcgcggggtcccggagcctccatgggctcgcggggtgggggtggccgggggcggtggccgggatcggtggacagctgccgggcgc

SEQ ID NO: 1050 - DNA, 341 bp, Homo sapiens
tttagtagagatagggtttcactatgttggtctggctggtctcaaactcctgacctcaagtgatccacccgccttggcctcccaaagtgctgggattacaggtgtgagccactttgccccgcctaaatttttattttttgtagagatgggttctcactatactgcccaggctggtctcaaactcctggcttcaaacaatcatcccgcctcagtctcccaaagtgctggaattacaggtgtgagccactatacctcctggccagttttttattttttaatatatacagggtctcactctgtcacccaggctggagtgcagtggcatgatcttggctcactgc

SEQ ID NO: 1051 - DNA, 142 bp, Homo sapiens
agggaggagggatagcattaggagatatacctaacgtaaatgatgagttaatgggtgcagcacaccaacatggcacatgtatacatatgtaacaaacctgcacattgtgcacatatactctagaacttagagtataataaaa

SEQ ID NO: 1052 - DNA, 5889 bp, Homo sapiens
ggttgctgtcttcctcgtccctccggcccttcttcctactcagcgtctcacttttggcctattttctgctggatctctggcagcctcgctttctccctgacgtttcaggtgagtgtttcttcattcagtaagcacccattgggtacttgcttggtgcctgattccgctgggtggggttaagtggcgaggggaacgtacagcaggccacctgcctcccaggcatggcccacttcctttttgtacggaattccctaaaatgagaattgcccctttcccaaactaatactactgtaggtgcagtggttaagatggtgaagtctgcagccatattacctgggttccattctctgttctgccatttaccattgctgtgaccttgtaaaagtagctcaatttctgtttgtctcaatttccttatctgtaaaacacagatgatagaacttacttcatagagaggtgaggagaggattaatgagttaatacacatgctatacttatgatagtgtttcacatataagccttataaatagaacgtcagtgtgtgtttttcttgttatccatataatttacttagtaggtgacaggctgtatgtgagttgcttgggagataagcatgagtaaaatctagttcttatgttggagaagggtaatgtctaaaggagacagacgcaaacaaaaacatgtaacagctcccccattggcatctgaagaaggtgctctggggctgcagaggagggacaactatttctgccttggggagtgtctccagggcccctaccactcaataatttgcccccctcctctctctctagcatcatccccagagagccacactctgacaggtgagtacaggccacctcttgaagacaaatgcccacatcctgtcctgcttgctggtgccagtgtcaccatggagcagggcagtgccccagcattgtgaatgaactggtaacaagccatgggtttttcatggtcctaggctcctgtgtaggtgtttgcgtgcctgctccttttggggcagagggttgggtcctcctggctttgcttctaagaccaggacagcctccttttgagaggtggggtcatttgcttttttagactaaagatatctttggcattctcagagggatttaagtgtctaggaagctggtatctgaggcctccaggggtcatgtcatgtctccccagtgagggtgcggggtcaggcgcccggccgcacctgctgagtgtgcccgagttgtgcagatacctggctgagagctggctcaccttccagattcacctgcaggagctgctgcagtacaagaggcagaatccagctcaggtaacctcccctacatcatacaacagttcactacactgaaggggaatagaggtggcgggggatgggagtggagtgatataaactccccgcttggagaccctgaaagaagaggcctgggcgccttcttgaggcaacattcacagctaatccctggtgcaggaggcagtctcacctcaggaaataagcttttgatagcctgacactttctcctgccaaggcagaccagtgtgaattacaggtggtgggcattatgtattgccagcttcctgaattggtggtcttgagcatcctcttaaccaaactggaccaccccattccttgagtacatacccatccttctaccagctgagcagtagtttcttacccagccgagcggggcgcatatctcagcgtgatgttcttagacttttgctcttctctgcagttctgcgttcgagtctgctctggctgtgctgtgttggctgtgttgggacactatgttccagggattatgatttcctacattgtctgtgagtagggtctgtccctgccctatttaaagccctctcctttcttctttccttggactgacccagagggaagactatgctctctctgctcagtttctgatttgtggagatctccagggatgctttagtattagtaactgtggaagacttacctggggaggagggcagtggatgtggcaagaagaggttggcacagccttgggaaaggaccttgcctaccttcagcacttcagtttagggaccagttgaatgggggctcttaggaaattggcgtagggagctcttagttcacgttcttaacccatagtgttgagtatcctgctgtggcccctggtggtttatcatgagctgatccagaggatgtacactcgcctggagcccctgctcatgcagctggactacagcatgaaggcagaagccaatgccctgcatcacaaacacgacaagaggagtaaggggctgccctaagccaggagggtgaaagagcgggagggccttggcttggggttcatgagatgccctggaattgagatcttctccagttctttagctgtgtttgtctcccctcccatcattcatgcttggtcattgctctactactcttgcttttctagagcgtcaggggaagaatgcacccccaggaggtgatgagccactggcagagacagagagtgaaagcgaggcagagctggctggcttctccccagtggtgaggtccagggaaagcgggggtgtcaaatagaaagccagaggaaaaatctttctgctttggagctgccacctccaaaggaggtggaagccagaggttttgggagaggggatgctcctgataaattggttctcttatcccctcacatgtcgtgttcatcctggttctcctgccaggtggatgtgaagaaaacagcattggccttggccattacagactcagagctgtcagatgaggaggcttctatcttggagagtggtggcttctccgtatcccgggccacaactccgcagctgactgatgtctccgagggtatggggagccctttgctgccctgctccccgccacaatctttgtgttccctaccatgggtacttactgtgctctctggcccactcactctctaattctctcagctcctaaaagaccttaacacctaaggcttggcccagctttccatgtcttgagttctcatccttgaactcattgtctgttgtggctaatcagaccagcagcaggcccattcttaattctttgttctctgcacagatttggaccagcagagcctgccaagtgaaccagaggagaccctaagccgggacctaggggagggagaggagggagagctggcccctcccgaagacctactaggccgtcctcaagctctgtcaaggcaagccctggactcggaggaagaggaagaggatgtggcagctaaggaaaccttgttgcggctctcatcccccctccactttgtgaacacgcacttcaatggggcagggtccccccagatggagtgaaatgctcccctggaggaccagtggagacactgagccccgagacagtgagtggtggcctcactgctctgcccggcaccctgtcacctccactttgccttgttggaagtgacccagccccctccccttccattctcccacctgttccccaggactcaccccagcccctgcctgcccctgaggaagaagaggcactcaccactgaggactttgagttgctggatcagggggagctggagcagctgaatgcagagctgggcttggagccagagacaccgccaaaaccccctgatgctccacccctggggcccgacatccattctctggtacagtcagaccaagaagctcaggccgtggcagagccatgagccagccgttgaggaaggagctgcaggcacagtagggcttcctggctaggagtgttgctgtttcctcctttgcctaccactctggggtggggcagtgtgtggggaagctggctgtcggatggtagctattccaccctctgcctgcctgcctgcctgctgtcctgggcatggtgcagtacctgtgcctaggattggttttaaatttgtaaataattttccatttgggttagtggatgtgaacagggctagggaagtccttcccacagcctgcgcttgcctccctgcctcatctctattctcattccactatgccccaagccctggtggtctggccctttctttttcctcctatcctcagggacctgtgctgctctgccctcatgtcccacttggttgtttagttgaggcactttataatttttctcttgtcttgtgttcctttctgctttatttccctgctgtgtcctgtccttagcagctcaaccccatcctttgccagctcctcctatcccgtgggcactggccaagctttagggaggctcctggtctgggaagtaaagagtaaacctggggcagtgggtcaggccagtagttacactcttaggtcactgtagtctgtgtaaccttcactgcatccttgccccattcagcccggcctttcatgatgcaggagagcagggatcccgcagtacatggcgccagcactggagttggtgagcatgtgctctctcttgagattaggagcttccttactgctcctctgggtgatccaagtgtagtgggaccccctactagggtcaggaagtggacactaacatctgtgcaggtgttgacttgaaaaataaagtgttgattggctagaactgctgcctccctgactgtgagctgccttccacaccctgcactgcactgtgttctctcctcacccttaacctgcttcactccagtctgttctggctgtttattaccttgttgcaaaacagggccgaagcaaggattaccttgacaaccctagcttctccttagccatcttccttgacagtgtgatctgtttagtgagatttagcatgtgtgaataaagtatatgcaggaggaaattgctttgtcttcccaatcggtagaaattcgggaccataaaaattgtgttttaccatgtggcctacaaccttaacactgctttcttaagaagtcttcacccatctacatgctaacaactcactcagcctggatttatctttactggggaagccaaacaagcaatagaggacctttacctgtgttagaaatgagttggagccaaggaacactgaagaaatagtatcttaacagttactgagtccattgtatgtgcttggctctgctctgagtgatttatatgtattaagatttttcctcacaggtcagatatatactgttactaacttcattttatagacaggttaagcttcctgaaggccacaggtcccagtaaattgtggagccagaacccaaacccaagaagttttggcttcagcaaatgcatcagacagcccctgtccattaatagggcacaggtaggaagatgcacaaggatgtgggaactatagagaaccaatctgatgccttggcttaacaaagagtggacatggcaagccttcctctttggggaagaaaagcccagaactgagcagatggcctcctttatgagttcatgtcctccgccttcagctggaggtaccatatggcgatgctacctgtctttctgctggaggtaccatatggtaatgctgcctggctgtctgctggaggtaccatatggtaatgctgcctgtctttctgaggttgacttttatgccatgtctttcctaagtgtgtaagaatttttctgtttgcttcacatttgactgagaatcattctagggtttgattgagcccctgtcctgtgccactaaaggaactcgaacttttcatcacttagagatttcagaggggaatggaaaaacagttctaatcaataagcaagcaattcaagaaaaatagaattaatcaggcaatgactgcaacatgtcctatctttaatctattttcttattaagcttggacattgacaatagaaccagaagcttgtagctggatcaaaatattctccataggcctggagtttcatgagggtctattcttttgttgttgttgttttggtttt

SEQ ID NO: 1053 - DNA, 191 bp, Homo sapiens
gggccggggatggcgctgagcctgggcctgggtctgggtctgagcctaggcatgagtgaggccaccagtgaggcagaggaggagaggccacggccgagcggtgggacgcctggccacgacgctgtggctgcgctccgcggctgggaggcggtgctggcggcggcgcagcggttgctggtgtgggagaagcc

SEQ ID NO: 1054 - DNA, 686 bp, Homo sapiens
gggtttttttttttttttttttgagacggagtcttgttctgttgcccaggctggagtgcaatggtgcagtcttggttcactgcaacctctgcctcccaggttcaaacaattctcctgcctcagccgtccaagtagctgggattacaggtgcatgccacgatgcctggctattttttgtatttttagtagaggtggggtttcaccatgttggccaggctggtctcgaactcctgacctcaggtgattcacccacctcggcctcccaaagtgctgggattacaggtgtgagccacggcgcccagcctcatgagggtctattctttacattcaccatggtctgatggttgctacatgtttgtctatgattttttttttctattatcaggtgtcttggccggttcatgccccacgatgaaagggccagaggttttcatatgagtaaaagaaaaaagcagaaatgtgaaacctacaattaggctaaacaaaaatcaactggaaaagtacaggctgaggggagaagagttggctacatgtttatgttaggggaggagggagtacattttagctatgtattcaaacagctaatagtttaatgttgctgcttataaacttaattttaggctgcattaataaaagtgtagtctccaaaacaagaaatgtgataattctagtgtcctgtgcacgaa

SEQ ID NO: 1055 - DNA, 26166 bp, Homo sapiens
gccacgtctgcaagtcagcgtttattgctcaagcgtattaaacaaaaatgtagactgaaagagacagttcttttaaaccccatttttccggattttttaagcgctctaaaataagaaaataagaaagtgcaagccagcaaaaacgctccaagtgcctaattctgactctgaaacttgagctctctggtctgcccccaagaagacatcagcccgccccgggtcgtccctgtggctcccaccccattcccaggagcagaccccgccagcctcaaagctgcagggaggtgggggtggcctgcagacagggtggggtctgcatccggtaccagtgacagcagcctctcctctcccacggtggcgcttgtttggggctgtggccaaagtgtttgcccggcccctgactgtgtccttccggagctgccgaggactgcagagagggcctggcttgtcccctctaggagcagctgggaaggtgtcttgcctgcatcccccttcaatggttgaaaataatgattccacttgtcatgaacaccatgaaggtatcttggcagccagagtcactcctgttccgcagtgggaaacctgggagggtcctcaaaccccctggcagggtctgcaggccgccccatccagctgcatctcccaggcctcctggttctttgatcttgatggccccaggccacagatgcatctccgggcctttccagcagcccatgggggaccagtcaatacaccccacggcggtgaagagaaaacgttcatgtcttctcagatcagaaggaaagaaacaaaaccattgtgaaggaaaacacctgctggaaagtaattatcaaagtaacagcattccagtttcacagtcgccccaactcactgtggatttactgccgtcagctgggaggacccaggcgccctcgggacgaggagacgcagggaaacccactcctggccatggcactacccaaagccagtgttattctcacacccaactgtccctgcagcctggcaggtgggcagtgaccgcctgggctgtaccctaagaccccaaaacagcggagatggagaagaccgctgccctggggccttctcagtgaggatcaagacaaagtacttgctaggaggtagagggcgctgggtgaacctgtgagaattcctgggctctgacctgatctgtcctgcattttgagtaatgggagcaaacacaggagggaggggctcagcttcccccggtcactggggccagggagacgtggtccagccggtttacaaagccttggatgcagccccacccccaagaacactgcctgtcacagcagcggccacgtggcactccaagctgggcatgacagtgcccgggacgtgggcagcggccatgtggcactccaagctgggcatgacagtgcccgggacgtgggcagcggccacgtggcactccaagctgggcatgacagcacccaggacgtgggccggccagtgtggcggtggatccctctagaatgactgggtctaagtagggagacagggcaggcgacccggcgtggactggtgtggatttcacctgggagagcagcggcagcctgtgtcgcttgcgcccaggctctggaggaggggcccctgcggctcccgggccaggacagaggcgcccagccctgctctcactgtccaggaagagccgctgggcagcctgagcctggggcaggtgcaccttgcagggaagtgggtaagatcccactgggctgactgagtacccgggacagaccctaagcgtggagggaggaagcccggtcagagtgggcaggagacgcagggacccacagtctggtcaggtccagagagcccactccagcccaagccatgagagaggcaggaagaggagctggggccagttcaggggtggggctctcaagaggccgagccgggggcccttcctcggcctgggaagttgcggccatgctcctgctgttacgacacgggagccactcggagctgactgatctcactgaggcacagactagccaacattggcctattttaaaattaaactaccctaggaagtgaaaaccccacctgcagcctggtttgccctcacacaagggaaaagaggtgttagaagcagtagctcagggcgattaggggttgtgcgtttccatgcttggggccaggctgggcgctgccacccggtttccgcgtctgggggtcactgggccatttgcaccacgacggctctccaggctttctccttgtcgaactccttcagggggctcctggccacctgcaaccgagacaggaaaggtgttacttcaccagggccacctgtgcggcgggaaggtggacacgccactcggccacaggcagcgagcagccagcgttcagaagttttcttcgaatgtgaaggaagtggggaaactaacccctgggcctctgtggaaagagataaaagccttcacttcctcagtgtcccagaaacgcctgcatccccccccgcacacacggtttctaccgagcctgggatggagcagcccttcactcggccccttgccctggctctggggcggggagcggggggaggccgcccaaggttgggcatgtgcctgacggctgaggaagaaaacacttaaggcagaggtaaccagatgcctccaggcaaaagggaggacagcgccagccccagctgtccaccctgagccccagttgtccaccctgagccccagctgtccaccctgagccccagttgtccaccctgagccccagccacccaccctgagcccctgggccccagccgtccaccctaagccccagccatccaccctgagccccagccgtccaccctgagccccagccgcccaccctgagccccaaccgcccaccctgagcccaagccacccaccttgagccccagccgtccatcctgagccccagccgcccaccctgagccccagccgcccaccctgagcccctgggaccagcagttctgggatctggggagaacacctcatgcgtctgactctgggccttgctggtcacaacagaaacccaggcgggtctcatttcaggcccagggactgccgtcctagcagggagactgaccacagccaggaaaaatggcagcaaagcaactgaggaggcaggttaagggaacagcagtagggagggtggagggtgggggcgacggggtcagctgagaaacgagccaagggcaagagagcgtcctccgggacttagcgggcactggaggctctgcaccaaggttctgaggccggtggtgtgctgaacacaggagggcagggtgtgcagggcaagagcagcggccggtccgcccaggatggcctagaggtggggcaggactcagagccccgctgagtggctgcccaggtgtttgggcatcaaggtgacagtcctagtggtcactgcacctgagggtcagcgggcaggtttgcccaggggagcaccaccaggacccgtagctcggtggggggaagacgctgagcctctgcctttcagatgtgggggcagcaagacagtaggcagggcccgggggaacattgttcaggcagtgacagccagaagttgttgacaccccagctttacggagccccatgtgccaggctgggtgggcattgccttccctgcagaaccgcgtccccaccagagaccagggaaggaaacttcaggacctgtgggagtcctcacaaagccctcttctgtgtctctaagagcaaatctgaaagcattaagtccagaatatttcccagggatgggtctgggtttacccaggctttgtgtttgtatttttaaaagacattttacggctgggcgcggtggctcacgcctgtaattccagcactttgggaggccaaggcaggcggatcatgaggtcaggagttcgagaccagtctaaccaacatagtgaaaccccatctctactaaaaatagaaaaattagctgggcttggtggcgggtgcctgtagtcccagctactcgggaggctgaggcaggagaattgcttgaacccaggaggcggaggttgtggtgagccgtgatcgcgccactgcactccagtctgggtgacagactgagactccttctcaaaaaaaaaaaaaaaaaagaaaagaaagacattttacttcttcggggtttttctggggtgtttttaaaaatacaaagtggcacaatgaatcttcgagggccacgtcgtgtggccctcggaggccctcaccaggacaggagcccccaccgcaggcctctcacctccccagcgggtgctcctgtgggccactcacctccccagcacccctgaaacccacaggcctctcacctccctggctgagcacccctgtgggccactcacctccccagtgcccccaccccacaggcttctcacctccctggctgggccccccatgggccactcacctccccagcacctgcaccgcaggccactcacctccccggctgggcacccctgtgggctactcacctccccagcaccccctccccctgcaggccactcacctccccggctgggcacccctgtgggccactcacctccccagcttccccccaccccacaggcttctcacctccctggctgggcacccccgtgggccactcacctccccagtgccccctccccctgcaggccactcacctccccagccaggcgctcctgcgggccgttctgggtgtcccaggatgcaccctgcagccttgcactgaccttgaagcgcacgcactggatggcggtgcccgtgttgaggccggcctgcagcaggagcactagcagcagcagcagcagcagcacatcgtaggatggctgcaggcggaaggaggtgtgagcagagtggcccagccgccctccagcccaggagaccaaagctccctcgtgcccacggccttcacaaagagcaggtgccagggctcgagtcggagccccagtaacccaaacgcattgctatttcaacaacctgatgataatcattctagctcaattaatgaggtcaattctgctttaaattccatcagcttgtgttcaacatacaggaataaaagtgaccgagccactgccaggccccgtggacagtgctggctgctagtggtcaagtcgctccacccctcctgctccaacacgcgcaaggctcagtcccagagccagagagaatgtccgcgggaggcagaagcgctgaccgttccgtgtcagcaggatcctgagcggaggagacagggggcagccgtcctggggggatggggtgcacagacccccaacagcttcacccctgagcaccagctgctaggaaggaaggggcaggaggcagcgcggtgagctcggcagggaagaggatggagggagcggccgaggatgcagggggccagagagtgaccacggagcacccaaaaccctctgtgcccatggatagctttcccgtgttggctcaagaaaaacaaagcaactaaatgttaacacacaaaagagccaaacatctatccaatgtcactgctacaaaaagtaagagaagaaacagaacgaacagctcttctcaagttaacataaaacttttttttgcgacagtctccctctgtcacccaggctggcgtgcagtggcgcgatctcggctcgctgcaacctctacatcccaggttcaagcgattctcctgcctcaacctcgccagtagctgggattacaggtacccgccaccacgcccagctaattttcgtagttttagtagagacggggtttcaccatgttagccaggctggtctcctaacctcaggtgatctgcctgcttcggcctcccaaactgctgggattacaggcatgtgccactacgcccggcctggattttaagtaattattagaaagtctggtacttgtgttcccagctggagtttaccctggaggatggtaaaggcatgggccccatgtggtctttgctcttcggttgttgagacaccatttattgcaaagcctatgctttcctcagtctcaaaaaaaaaaaatccagagccattaaagaaaatattaatcaacttaactatttaaaaaaatagctttcacataacaaaaatcacaacaagcagaacaagaaatagccgccaggctgagaccaccatttgtatcctccatcacagatggagctggtctcccccggcaccagggttagcggaaaatggtcaggagacatgagcagagtccactgaaaaagcaatgcagacgtcctcatgctttgtaagaggtcctcgtcctcacccacattgagacggaggtgctcccacccgtgtcaccgaactccagcgtgacaccctctgtggggggctgtggagaagtgagcaccttcacgccattggcaggagggaaggtggacggcccccattgaggaggtcgccgagatttatcagcatgacagctgcacctaccctctacccagcagtctctctcctagctggatatcctaaagatgcgctgaggattcaaaaggaagatgcgtgcaggttgttcacggaggagttatttatagtagcagacggttggaaataactcagtttccatcactagggactggctgggttgaccgggcagtcaggagcgatgaaggaattcagaagagctctgatccccttgggtatcgagaaaacaccaggataaattattaagtttaaaaaaacaagcaaggggctgggcacggtggcagaagcctcctcatcccagcactttgggaggccaaggtgggcggatcgcttgagcccaggagctcatgaccagctcaggcgacagagtgagaccctgtctctgaaaaataaaataagtaaatacataattaaaaagcgaggtacatggctgggcacagtggctcacgtctgtaatcccagcacttcgggaggccaaggtgggcggatcgcttcagcccaggagctcatgaccagcccgggcaacagagtgagaccctgtctctgaaaaataaaataaataaatacataactaaaaagcgaggtatatggctgggcacggtggctcacgtctgtaatcctagcactttgggaggccgagacaggcagatcacttaaggtcaggagttcaagaccagcctggccaacatagtgaaaccctgtctctgctaaaagtacaaaaattagccgggtgtgttggcatatgcctgtaatcccagatgctccggaggctgaggcaggagaatcacttgaacccaggaggcagaggttgcagtgagccaagactgtgccactgcactccagcctgggagacagagtgagactctatcttaaaaaaaaaaaaatggcaaggtacagaatagtgattctagtatacaagctattttgtaagaaagaaaaaaaaattatcatctggttgcccataagaggagcaggtcagtcaggcatgagaccacagcttttctgagctcgtcttttatagtttggcttttgaaccacataaatattttatatattcaaaaaataccattttaaaaagaaaaaaagcaccaagccctaaaatggaatacaaccagaggccattaaacttaatggggtatcgaacccagaggataaccccacacagaaaggggccgacttcgatggcgtgtggccgtcccctgctagcagaatgcatgctgaagataaaagggaagcctcaggctcactcaggagatggcccctgggtggtaatattgtctcttgtaatcgtgaacaattatatgcatattgtaagacaacatgaagtaggagatatattaaatgtcacaggaaacaaaataattggagtaggagtgggtgaagcaaacacaagagaagtgaagaaaaaaccctgggccgggtgttgtagctcactcctgtaatcccagcacctgtgggaggccgaggacgctatcccccttcagacagtgactccatgcccccatcagacagtgactccatcccccatcagacagtgactccattaccccattagacagtgactccatcccccgtcagacagtgactccatcccccgtcagacagtgactccatcccccgtcaggcagtgactctatcccctgtcaggcagtgactccatcccccgtcaggcagtgactccatccccccatcaggcagtgactctatcccctgtcaggcagtgactccatccccctgtcaggcagtgactccatccccccatcaggcagtgactccatccccccgtcaggcagtgactccatcccccgtcaggcagtgactccatcccccatcagtgactccatcccccatcagacagtgactccatcccccatcagacagtgactccatcccccatcaggcagtgaccccatcctccatcagacagtgactccatccatccatcagacagtgactccatccatccatcagacagtgactccatcccccatcagacagtgactccatcccccatcagacagtgactccatcccccatcagacagtgactccatccccccatcaggcagtgactccattccccatcagcacacgcatgttgacctggagcaaacagcttaatacaggtcttctaatgatttgggtgcaaaaccacttatactggaaaaaaaaaaacaaaaaaacaaaaaaacactaggtatctaagaaatacatctagctacacgtgcctgagcctcagaagtcgtgttggagataagctcctactgggtcagctcaaagtaacaggactttgaattctccttaaattcacctgttaaactcaatgcagttctgatgcaaatccgaaaagcatgtctcataaacccaggacagattctaaaatgggctcagggacagagtgggtcccaggtccctgtgaagcaggtggtggccccagatacagggcggaatcgaggccccgaggccctggggccaggctggcattggggagcacggtcaccgctgcccaggaacagcggaggaggtgcctcctggagctgtccctggagccagcgcccccagagtcccaggcaaagccagcaagggccaggccaacacgcagagcaccacatgtctggggggctctgaaataaaatacaactcacttttatggctggcgggtaatccttaaacatctccacgattctcatgatgctgaatgacagatatccagaggctgtgaacagcagcggagacgtgaggctgcttatggcaatcaggacctccacctggaaaaaaagcgcgggttgcaggaccacggccggagcctgggagcccaggacagcgggcgtggccagggctgggggggcgggcatggccgggcactcatgggcatagtcccaagctggttccctgcatgactcctgctgaaacctctgccttttcttttttctttttctttttttttttttttttttttgagacaagtctcgctgtgtcgccaggctggaatgcagtggcatgatcttggctcactgtaacctccgcctcccgggttcaagtgattctcctgcctcagcctcccgagtagctgggattacaggcgcccgccaccacacccagctaatttttgtatttttagtagagaccgtgttttgccacgttggtcaggctggtcttgaactcctgacctcaggtgatccacccacctcggcctcccaaagtgctgtgattacaggcatgagccaccgcgcccggcctgcctttctttcttttttgagaggcagcctagctgtgtagcccaggcaggagtgcggtggcacaatctctgatcactgcaacctctgcctcctgggttcaagcaattctcccgcctcggcctcttgagtagctgggattacagacatgcgccaccacacctggctaattgttttgtatttttagtagagacagggtttcaccatattgtcaggctggtcttcaactcctgaccttgtgatccacccaccttggcctcccaaagtgctgagattacaggcatgagcagcctgccttttcattcacagcacagtgccacaagttttgaaatacttaccatctaggcaaggtggctcacatctgtaatccaagcactttgggaggccgaggagggcggatcacctgaggtcacgagttcgagaccagcctggccaacatggtgaaacccccatctctactaaagatacaaaaactaagcgggtgtggtggcgcatgcctgtagtcccagctacttgggaggctgaggcaggagaatcgcttgaacccgggaggcagaggttacaatgagctgagatcgtaccactgcactccagcctgggtgacagagcaagactctgtctcaaacaaacaaaaccaagaaacaaaaaacatttacctgcaattctccactcttgaaaaaatagcccttccgcatgggtcacctccttcactgctctgaagtctgtccttttaacccaccccaaatcttcctgtttgacccatcaagtctcagagacagccttcactcatgccaagcatgggcagtcaccttgcaaagcactcagggtccacattttggcagcagtcattaacgatcgaccagttcaattgtttgcggtcagtttgtggcagtttcggccgggcgtggtggctcacaccggtaatcccagcactttgggaggttgaggtgagtggatcacctgaggtcaggagttcgagaccagcctggccaacatggtgaaaccccgtctctactaaaaatacaaaaattagccgggcatggtggcaggcgcctataatcccagctactcaggaggctgaggcaagagaatcacttgaacccgggaggcggaggttgcagtgagccaagatcgtgccattgcactccagcctgggggacaagagcgagactgcatctcaaaaaagaaaaaaaaacaatcgaccagccttaggaggtgcagatgatgctcagacactggtctccttccaagggttaggcacagagagcgcttccagtgtctacaccaccttgttcaggtctgcctgtccctgagaacagtccctgctgagcgggccagcctccacctcccacaaccccaccttcctcattgtgcaggccctgcagcccagtcactgcgctctcttgggctggagcctggtcacatggcaccaagggagggctaggccaggccctggccccgctcggtgggtccctggcacccagggctgaggggttcacccaccagacacttgctgggacactctgctgccacatgactggcaatggcacttggaaagcactaagagaaaagaaaaaggaaagattttagaggaaatagtcgaagaagtcgaattccaaacatgtgccctcccaccagtgacccctccatgcaggctgcctggctggcttgctgtggggggcaggggggatggtgcagtgcccaaaggcgcagctggggcagggacgggtccgcagggaagcaggggtagcctctcagaggttttgtgtgctctctgttcctcaaccattggtttaaaattttaagcctgtagaaaagctgcaagagcagtggagggggcatctgaggccccaaaatcaccagagtccttgacattcatatctgtgctctctccagctctcccagatagcctgatgcctgaacacctgagagtgctggctgagcccagggcacactcttgcacacacccaaagcaggaccacgctcgagagactccacgtggggccgatgtggtccatgcccagattcttccagttgtcctcatcatgttctttctttttaattttttaataatttttctttcttcttctcctttttttttttaagatggagtcttgctctgtcacccaggctggagtacggtggcgcgatcttgactcactgcaacctccacctcccaggttcaagcctcctgagtagctgggattataggcacccaccactacaccaggctaatgtttgtatttttagtagagacggggtttcgccttgttggccaggctggtctcgaactcctgacctcaggtgatccgcccgcctcggcctcccaaagtgctgggattacaggcatgagccaccgcacctggccctggtcatgttatttctagagctgtttgtttgtttgctcctgatccggattcggtctgccattgagctcgtagtctccttgtgggtccctgttaatcggggagtccctcagcctctgtcacctccgttacctggtcgcttctggggggtgcagcccatcagctgcagtcgggcctccgtgtgggacaggatttcctcatgatgagccttggggagcctcggaggagactctgcagtgccccagggtgtggactgccccttcctgatgacgctgacttgactcactgggttagggggatctgtaggttcctctgttggatgggcacctcttcctttttataaccaagaaatgcccttttcccacttattgtgaggagcctgccttagttccgcacaatgtaggcagagggaggatgcatgctcttcatcctcttcatctccccgaaggtgtccaggtgccagcaccccagcccggcctgctggggagggggctgcatcagccaggggctgtggtgagagggtgggcaggacagagatgggctccgagcaggggagcctgggcagcagggagaagactggggagctgaggggctgccagtgcaaaggccccaagccagctgctgaggtgggtgtggccctggccagggaggctgaggtgtcaatacaggggtctctcctgggcttggtgcttctgaaagggccttctagctgtaagcagcagtgagggcacaggaagggatggtggcttcagggtggcctattcagggccccagtgagccatgggagggcgggagtttccccgttcacccagcatggccactccggcccctgccctagagggccaggaagctcagccataggggctggggcagctcaatcaagggccctgccctggaagggtccaggcctgcagcccagcccccaactccagccccgagcacctgcctccagcccatggtgcagggcctgggcccctctgccgcacccaggccagactcaggcaggtggagctgggtccctcaccacgcatgcctcagcgctctcctctcctcctggggtctcctgccctgaagagagggttgggagtgtgggtggatttaggggcgcccagggggcagcacctgatgggcagggggtgctctccgggaagatggagagagcagagccacccccgaggcaggaggggtctgcgggatgggaggggcctctgtgatgagggctgactgcagggacagggaagggggtagggcaagtgcctttcattctcaactttttggaggtatgtggtctctgtcctccctcagcttcgggatgtaatccctgcgtttcagaccccagggtcagttgtacacacctgcaggcgtcattctctctgtcacagacccgcttgggtgggcacccatgtgagttctctgtctcagtagctgggcctggtcctaccccttccgggggtgtggctctatcccagctcggtcctgcctgggtctctttccctctctgagcgcctcagcagcccactaggtcgggcactggtgccctgggggcattgctctgtgcctactcgcccccacagggagctgaaacacagctgctgccaatgggatgtgtccacctggcaggcgtgggccccttctcggcagtccacccggccacaccgttcccgggcaggcgtgggccccttctccgcagtccacccggccataccattcccgggcaggcgtgggccccttctcggcagtccacctggccatactgctcccaggcaggcatgggcctcggcagcttcaggaagagccccactgctgcccaggaggagcctgtagctgatgctgggtgctcaccattcctgctcatgtacataagagagcaggggcaaaatctaaaagtccacacagcatgagacaaaccaggggctggccgtcaacaccggtgtgcaggccactacgcggcaaggtgctgagaacctcgtggggtctgcgtccggaggcaggtgggtggtggctctgggtgggctacaggctgtgaggggatctggggtgtggaggggttgctctagactcactgttctgagggaacacacctgtaatcccagcacttttgggggccgaggcaggcagatcacttgaggtcaggagttcaagaccagcctggccaacatggcaaaacccggtctctactaaaaatacaaaaaaattagctgggcatggtggtccacgcctgtaatcccagctacttgggaggctgaggtgggcaaattacttgaacccggggaggggcagaggttgtagtgaggtgatattgagccactgcactccagcctgggtggcagagtgagactccatctcaaaaaaataaataaataaaataaataaaacaatgcccatgtattgagcatgtggcatgtgtcaggtgctgtgtgacacatctgctgcagtaacatttaatgtaaagtaataacagaaatatgctgcattgtatgaaacacatagtgtaatataaatgcattatatattagaaaattatatagaataataaacatctacagcctgacattcatatgttaaaaagattagaataataaaaataattggtatttttttcaggaaaaataatataaaataatcacacaaactaatataaaagcagttaatactttgactcatttaatccttaactccccagttcttctgaagttgggggccagcgaggaccctctgtggtgactctctgtctgaatgcaccaagactgagctcggggcccagccacgcaggatctgagcagtgtggcccagagcggcggcgggcgggccagaggggttactcacggccactaggatccaaaagaacgtcactgagaggtgtgggcctgaaactgagtcatccacgttcagggcaatgatccccccgaggacggcagagatgcctgcgattacctcgacgacctggaggggacaggacagcatcggctcataaggaagtggagacacccccagattcccagaatgcactgtgcagacatggacccccaggagcagggtccagtgggctggccccagatctaaccgtggaggagcccacctggatggacccccagcctcacctggcccagaccccctctgccctcagctgcggcttttcacgtccctcctggagtaaaatagccaaagaggtgtttcccccactgctgcttttgtccacagaaactgagggtattgacctgacagtggtgagggcagaaaaccaagaccctcagactcccttccctgtctcacagtgtggcaggcggcggtgctcagaccctggaccccatcgaagggactcgggaaaacaggcctggggcagaagtagcttcccataggacacacccacccgtgccatgtgggtttgccattgccacggcaacactggacgtcaccacccctttccgtggcaatgatccaaccacctggacgttagcaccccttttctagaaatttctgcataatctgccccttaattagcatatacttaaaagtgggtataaataggaggcagagctgtctctgagctgctgctcgaggcacctgccggttggagagccctgctatactgccactgcaaacaaagctgctgtctgtcacctccagctcgcccttgaattctttcctggacaaagccaagaaccctgctggcctaagccctggttgtggactcatctgcccggcaccatcagggccgcaaccagcaccgccagactcagggaggggccgcaaccagcaccgccagactcagggaggggccgcaaccagcaccgccagactcagggaggggccgcaaccagcaccgccagactcagggagggctggggaagaaacacacgcccgaaaacctgctcccgtgaaggatctctgtgagtcgcaaacacagagctgtggccagcaggaaagccaggcataaggagtgggccagcaagggcttgggggccggaagggacctgggcagccaggccttgcgtccagaaggcacaaaactccagatgcacaaataaagctgaattcccagccaggcacggcggctcatgcctgtaatcctagcactttgggaggccgaggcagacggatcgtgaggtcaggagtttgagtacagcctggccaacatggtaaaccccgtctctactaaaaataacaaaaattagctgggcgtggtggcgggcacctgtaatcccagctactcgggaggctgaggcgggagaatcgcttcaactcaggaggcagaggttgcagtgaaccaagatcacaccactgcactctagcctgggcaacagcaggactccatctcaaaaaaaaaggaaaaaaaaaaaagaagcagaacggaaatggaacctaagagaggactgaaatgctaaataaggggaagtgaaggcactgggaaacacacacagacacagtcaagcacacaggaggctgtcccattgttggagtaaaaaggcaaaatgtcactaaatgtcacaagctagacaacaaggccaaggcggagggaagggggacagaccccgcatggtctgtttatcaaggagcgtattagaatatgaagggcaacccccaaaagaatactgaaaaatttcccatccaaaattagagggaaaaggaaggacggagcctctgccaattcaaaagaaggcagggaaggagggaaaaaggcaaaatcagggaaaatggaaaactcaaaagatggtaaaaataagtagaaatttatcagtaataactctcagaggaaatgggctacattcaaaaagctagggagagagaatgacaagataaagaacaaaatacagttacgtgctgcttataacaattataccaaagtacaaggcaagaaaagttgaaagtaagaaggagaaagaggccaggtgcggtggctcacacctgtaatcccagcactttggaaggcctgggtgggtggatcacttgaggtcaggagttcgagaccagcctggccaacatgccgaaaccctgcctctactaaaaataaaataattagccgggcgtggtggcatgtgcctgtagtcccagctcctcaggaggctgaggcaggagaattacttgaacctgggaggcagaggtggcggtgagctgagatagcaccactgcaccccagcctggctgatggagtgagactccgtctcaaaaaaaaaaaaaaaattcctcggggacaacagtgtcaactcacctacggcagtaacaaactccccctaaaaattacaggacaccagcagcacctttcgcgataaggaaggttattaccaatgataccaataacagactagagtctccacagatgaggcgcacgccgccatgcggtgtagacagccaactcttcgccaactcggaatcgaaacgtgacgtttaatccagcctcagtcacccccgacagagtatgagagaaaagagaaagaagggaagttttcttactgagtaagatttcaggacccgagcaggaaatggcacttcgtccagaatgttggcgctgtcagacatggagccctacgaagaaacagaactgtcaccccgggtgcacgggcacagggactcagcactgccgctggcatccggccgccgtgggcagtgggtcaggtcagcctgccgtgtagatgcgagaccgccttggaggcgcccgtggatctttgggcttgaggaaatgttcacacacattgtccttgcatatgaaaattagcagatgtggtgtctcctggtgatcccctggggacgagcactggactgagtcaggcttagggggaggggagggtacagcatctgtcttcacctccctgtagccagcggccgccaacccctcacccagctccagagcccctcctggccggggtttctgagacccaggagagaggggtctcatgggaatgccctggagcagcccagatcggccctccgagggtgacgctgagacccacctcgctcaccctggggtgatgcctctgcaccccctgccctgcggggtcagaagctgcacccaccttctttttcttgcagtcctcctcgctggaccgtgcagcgatgatcaccgtggccgccatgagcagctccagcaggagcagcaggatgaggttgaagttgatctgccaaggggcacacacgcttcagcaccgggcccgcctttctcacgccaccgcgcttcagcgtccaccggaccacctcacgggcaggctgcgcaggactctcagccacggtccccacttttcccatccagggccagctgtgaggcactgtgggctgcacactctcctgcctcacatgggcctttggggtcttttagtttttaaaaccattcttagtgcaaaggctgtacaaacacaggccagggctggatttggccttgggctctggtctaccgaccccattctgaacgctccttgttcccacaaaagccttcacggaatgtttagagtagcttcatgcatgattgtcaagcactgagaacataaggttttttggagggtaatgaaacgactgcaggccctgaccgtattggcagtgacatgaatttatatgtgtgttaatattcatagaagcatacattttaaaaagtcagtgtagctgtctgacaattttttttttttttttgagacggaggttcgctcttgttgcccaggctggagagcaaatggcgcaatctcggctcaccgcaacctctgcctcctgggttcaaatgattgtcctgcctcagcctcccgagtaagctggggttacaggcacctaccagcacgcccggctaattttgtatttttagtagagaggggtttctccatgttggtcaggctggtctcgaactcctgacctcaggtgttccgcccacctcggcctcccaaagtgctgagattacaggcgtgagccaccgcgcccggcctgacaatttttaaaatacatttaaaaaagaaagagtgcagaaccacattcaactaaaaacagagcctcgaaatatatgatgtcataacagagccacaggaagatgtagatatatcagtagaggtggggaaggacttgaaacacttttcttagaaactgacagatcaggcagagggaggcggctcacgcctgtgatcccagcactttgggggaccgaggcggttggatcacctgaggtcaggagttccagaccagcctgaccaacatggtgaaaccccttgtctactaaaaatacaaaaatcagctgggtacggtggcgcacgcctgtaatcccagctactcgggaggctgagacaggagaattgcttgaacccgagaggcggaggttgccgtgagccgagatggagccactgcactccagtctgggcgacagagcgagactgtctcaaaaaaaaaaaaaaatgacagatcaaaaagacaaaagcataaggagaactctaaaattcagaaaagtgtgacattaaccttgtcttttattttctgtatttctggtgctttgacctctggctccttcctgatcctgaagagacagctcctcccagggccagccgacagctacagtgagtaacttgcctctgagcagttcagatacaagccactgacccagggaccacaccccatctgctctccgtcttaataaagaagcgtcacaggccgggcgcggtggctcatacctgtaatcccagcactatgggaggccgaggtggatggatcacctgaggtcaggagtacaaggccagcctggccaacatggtgaaaccttgtctgtactaaaaatacaaaaattagccgagtgtggtggcacacgcctgtaatcccagctactccagaggctgaggcaggagaattgcttgaacccgggaggtagaggttgcagtgagccgagatggcgccactacactccagcctgggcgacagagcgagattccttctcaaaaacaaaacaaaacaaaacaaaaaggcagtgtgggtgttcccactgggtcctcctgtgtctgctcatttttcctgcccaacgagagtggccaggacatactcaagcctcctccagctttccccaatcatcaagtgcattccacatgtcacacaaagcaggaggccctccttgcagtatctcggatgaggtcctggtttcctttgggatttttgtctttttttttttttttttttttttgagacggagtcttgctctgtcttccaggctggagtgcagtggcgccatctcggctcccacaacctctgccccctacaatttcacatttttgtttagaggtgcattgaacaactgtcttacacagattggatgaaacatagtattatgtcactgttaatttttaaggactgttggaaaagacattgtttaccaataaatctgtcccgcagaatcacgagacttcaataaagacaattattttctttggatgcataaatctctcaactttagtcaaactcacgagctgtgaataacatttaccacctatttccagctcaacaaacatttgctgacaccattcgtgggagtggggctgtgggtgtcaggcgtctgcgcgaagctcgtgtgaactcacgtttattgctgatgggttcaggactagtttgcatccaaaccaaattaaacacgtagtggtcacagcaaacgtggaaacaaacaatatctgaaagttgggaatctgaaaaacaaggcaggaggggttttccttctttgaataataaaagaaaaaaggtaacagataaaccacacttcaggccattcactaaaaattatcctgattaggacataatggtggggagtcctgcgtgctcagcccgctctcccctctgtgcggcaaaggctgggctgggcaggagctttactgtctggggggcaacctcgggggcccctctcggtgccacaacgtctgtgcgtgggcacacacacaagcacacatgggcacactgtctgtcagcccctccggctttctccctggcagaggctgcctgcaagctagactcaccacattggcgttcctcctggagacggtgaagctcacaattgccgaggggatgcactggaatgaaaccggaatcccatgagcctgccgctcacctgagcaactgagactctgaaatactctaacatttgcgcttccagaaggatctgaatcatattcacaaaacagtgttgccagtccatgcaacacagtgggttggcttgactagaaggcccccaggtacttctcagttttaattttttcttgagatggggtctcactctgttgcccaagctgatcttaactttgggctcaaatgatctgttcacctcagcttcccaaagccctgcgattacaggcatgagccgctgcgcccaacccccaggtacttcaaaataatttattctgaaagaagtttttatttttctgatgtgctaaaaagatatttgttaatgaaggctcttctagctggataagctttgaagcctagaatgtaactcacgcaggcacaagacctggtctttgctgaaaattacccaaaaaaggaaaaagtatcagccgggtgcagtggctcacacctctagtcccaactactccggaggctgagctgggaggatctcttgagcccaggagttcgaggctgcagtgagctgtgaatactcggtgatagagtgagaccttgtctcaaaaaaagaaagaaagaaagaaagaaagaaagaaagaaagaaagaaagaaagaggaggtctggtgcagtggctcacacctgtaatcccagtactttgggaggctgaggcgggtggatcagagtcaggagtttgagaccagcctggccaacatagtgaaaccccatctctactaaaaatacaaaaaaaattagctgggcgtggtggcgggtgcctgtagtcccagctactcaggaggctgaggcaggagaattgcttgaacccaggaggtggaggttgcagtgagcagagacggcgccattgcactccagcctgtgtgacagagcaagactccgtcaaagaaagaaagaaagaaaaaaagaaagaaagaaagaggaaggaaggagcaaaggaagtagcaagactctgcatgtgagggaggcagaaaggagtcccacagccttcttgtcctcagccttcttgtccccacagggccacaccaaggctaggagtccagggccagggagggaggttgggacgtcagggacagggaggtggatggagtcgggccagcccaggcctgtggcccttgccgtgcagggccttgctcctgcagccatgggaccccgggccctgagtcgggggtgcaggccctgaggggctgagcacagcagtgctgggtgaggaggcagaagaagccccgtcggggcctgagcgaggggcagagctagggccaggacagccaggctcagctcagcacccactcaggtgccacgagggcccagggtagagaagaaaggccgggggcagggccgagtggggccaaggctgggcgggggtgggcacttgcccatatccggcagccgctgaggctgaaggggcacagctcacagctccactgggacaagggcggctcccatggtgaggataaaggccacggagaagcttccagagagggcagcagagtgggacgggtcacctgccccaaagggctttgttctaagggagcagagacccaggacagcacggggcggggcatccactttgtttttaagacatttcgggggcgctgctggggacagtcaccaacagtgtccctagagaaagggcaggggccagagacccagcaggcatgtggaagcgagaggaggggagagctcgggaccagctgaagcaggaggggcgtggggtccgcggcttgcgggccagaggggcatggggtccgcggcttgcgggccagaggggcatggggtgcgcggcttgcgggccagaggggcatggggtccatggcttgcgggccagagcccaggggtcagccagcatggtgctctagctgccgggacgctggggaggcagtggccggggttcacagaggaccaggggacagcggttgtctgtcctcccttgctctgaggatcagtgggtgcctccaccggccttggcactgtgtaagtttctaaaaacacaacatgaagctttgggaggatgtggggcacaggtcccagtcccctgagggcagatgctgccagctctggcaggacgcagccgcaggctcagaatcaacacgcaattccctgcacaggcgtctgcagagcaaggttcaggcctgcttcatcagtaattctcaaaggtgatgaactctacgtgaaactaaagtcatatgaagagttttttgtttttttcttgttgttgttgttttgagacgaagtttcactctcattgcccaggctggagtgcagtggcacaatctgggctcactgcaacctccgcctcccaggttcaagcgattctcctgcctcagcctcctgagtagctgggagtacaggcacccaccaccgcgcccagctaatttttgtatttttagtagagatggggtttgtccatgttggtcagactggtctcaaacacctgacctcaggtgatccacccacctccacccctcaaagtgctggcatgacagccatgagccactgtgcccggcccatatgaagaggtttgaatgaggtacaggtgacagaaacctgcacatctcagaacaaagaaaccagagcacgtgccggcgagcttgggcactggcagaggcgtggaggaagctgcttacagagcctgcagcacagcgcaagtaatccatctcagccgggaacacgttccccaggtacagcgaaaaccccgaggtcaccaggaggcagctctgcaagacagcgacagaatcccaggttacaacgcgccccgtccccaggctggaccctgacccttcaacttctgcttcactgtctgtgtattggtgactcacccacgtcccccagcatcaaccacacccgcacctgggacccgcccatcctggactcctcctgtaggacagacgcagccccgccgcagcccaggacatggaccagcctcccccagccatgtcggagcatggaccccccacgctgttatctggaggagagaagaaaggggatctgccaatatttagagcaaggaatggcacctctccccacaaaatactcctgccccaacatgttgtgcgtgcagtcttccagatcccacacccaggtccagacacgagactggaaaacaactgcccatccccctccgtctgcagaacctaatttccagatctggaagaagatccctccaggcaggggctccaggcccaggggctcctgagcagggaagaccctagcaggaggcagggagggtgctctctctcacgcacagcactgcaggggtgcggtggggagggggctctctctcacgcacagcacccccggggtgagtctgaggggagtcagtatcaaaggtcactgggacccagggtcctggcagaggaagcgaggtctggggcagaggggatctggcctgggcgggggaggggctgcgaccaagtccagggcaccaggtggaggagggcagagcccggagatggccaccaccacccgggagccgcctctgtccccagctccgaggcagacgcctgtcttggtggggcatgctcaggccacgggaggtgggcaggaccactgtgggtgctgcaggggctgccggcggaggccagggcacagggaggggagaaatcacagcctggatctcattctcagcccaagctacacggaaccgggggtccctgcatagaggcctgtcctgcagcatggctctgagcagctgcacacactcaggcccaagtggctcctccaatcatctctgtgcccacgactgtgcagggaatggccaggaccccagggaaatccctcggacatctggcgctgcccgtccaccccagacctgttcctttgttccccagctccctcccagccggcccctgaggccctccctaggaggaggaggtccctgaggttctctctgtgagggccgacctgaaggcctgagacgcctcctcccacctttgcaggtgacccctcagaggaccctgggcccccagagccgagggtcatggagactcctggggcccattcatggccctgggactgtccctaccctggtgggactaagccacaacctggagcagctcaaggctggcacaacagacacccataaattaataaaaataattgtgaaaacacaagcaaaacaagctcgtcggcatccaagagttctgcagcagcagggttagtctgagagttgctctctctgtcccacctggggctccagggcgctgcagtccgtcaccagagggaccagatgctcgtggccctccaagggcttagtgtggagctactcacccccatcagcacagagaagacccacgtcttgtggctgaagcaggggggcagtctcttcgacagctgcaggtcgctcggcttcgcgtctggggcatagctggcggggtcttgccggccccgctccagcgtgggcatccggtcataggccagctcctctctgaatggctcctgggtcatggcacttggggacaccacagctgtgctgaatgtacagccacgtgtcaccagttctttatctggaataaaattatcatcggctttggccactctgaggaaacttcaataagttgtttccaagaaatattttttaacaaaagaaatattgttcatactgaagtgctctaaatttgaagaagaaaatgagcacttgaatctaaaagtgaaaaagaaataactttcctagaaaaacggacctgaatagtctgggttcagggtgagattctacactttaaatgcctcattgatccatctgggccctccaggtgcaacacctgacaacatccatcggcaacttcgtccatgaacacatcacgccggggactcaagcacgttaaactgctccaattggtagctaaacgagagattgcaaaacatgcctctactcaacggcttaatgtctgagcacttacctcccccgctgctctgccgttgggagcactggtctctgggtgagggacttccagcaagaagtattcacaaatgaaacaaaagctcagcaaacttgagctgaaggcaggggaaggagagctgcttcctgaatatcaatgaggggaggaatcgggtggatcgtagaaatgtttcgtgttggttgtgtaaaccactgcctcgg

SEQ ID NO: 1056 - DNA, 7029 bp, Homo sapiens
ccaccaccggccacctgagtgtccgtgagcgggccgaggcgctcatcaggtccagcctgggctcctccaccagctccaccctgagcttcctcttcggcaagaggagcttttccagcgcgctcgtcatttccggactctctgctgcggaggggggcaataccagtgacacccagtcatccagcagcgtcaacatcgtgatgggcccctcagccagggctgccagccaggccactcgggtaaggggctgggcagggctcaccaggacaggctgggatggtggcacgggctcctggcctgagcgtggcacctgccttgcgttcccacccttctgcctgcagaaccccatccccttctctatggggctcccagagtgacaaaggacagtgattagacacgaagtggcttagctgctcttgaaagcagacaagatacagagcagatatcctgtaaacgataatgcccaggcaggcactgaaaggagtcaccggatacagaggttctgcagaactgtggccatctgccctacaccggggcatgacggagaatgccctccacccattcacacagcaggactcttctcacatgattctggcctgagggagaggaaaggacacctgtcaatgctggagttagagcttcactgcttctcagccaatcgatttgactttaaagctgctgagatggcccactgcttttaggtatttaaatactagacaaggagagttctaaggacttcacccaaataagctgttacttgtccagaatcccaaaccagctgagatgaaatgaatacttgagcttcttcagtgagaaaaaagtaaataaatacccagcagtgctcctatgtgacctggtagacagggaaaatcgatggtgtcaaggcaaaaatgggtcaggtttggagagttcccccactccttttgagtgttcaggttttccttaccatggctcatgctttccatcaagcaccagagttgcagtggcttggcctctggttctgggtgaggttatttgcaggtggagacggggggctgcacctgaacatttctagtgtcaccctccctctccttcatgggaaacagctctccagggaagtaccttcctgccaggggaagccaaggctgggccggccgccctacaaggagccacaggattgcagccatgggtgccacctttcatggaaggggagatttatgggctttcctggaacccccaggctgtcctggccaagaggaaagaggtggttacttcaggagtttgaccttagttagataactaaaagaatacatttcccctcccttttctttatttcctcaataaaaatgtacaaagtatcacccttctccatgccccaatctgtgttaaagtcacaatctatgggtgtagttctgggattctgtcaaattctccttcctgctctccaaaatggacaattgtcgtagggaccacatgcccccagaatacaatggcctctgtgttctactggggtcaagcctgctagaactcagcattcatgacaggggctaagtgtgcatgaagtgacactgactacagctagaaagccaggcgcacaaatgccccttccccccagggccgctctttccagcgcagtcatccagaaaggcccacgtgcagagcccctgtgtctcagatgctgcttcagttgcccgtcctgtcctcagaggccactgtgctggccctctatcatttgacctgactttagaacctgacctcaaggatatggcagcgctagcctttagctcccacagcacggatgggggtgatgccagttagaagtgggtagtgaacgtttgctgagctgttcactgtttctctcttctctttggaagcacctctccgagccatgtgagccccctgatgccaccgagcaggggcagcttcatgaccgatgtctggctgaggctgtggcggacactctcggggttgtctgcaggagagcaagccaggaggacatgggcctggacgacacggcctcgcagcaaagtgtgtcagacgagcagtgacgggcgtgcggccgggcggggaggctggctcccccacacctcccacctgcattgctctccctcgtgctccccaaatcaccacaaccaaccaataccgcgatccatgagggactcctcctgtggaaaaggagagctgttccagaacacagaactgatctcaggtttttgaaaaaaaaaaaaaaaaaaaaaaaaaaatcaaacaacaacaacaaaaaaacctcacatgatggggaaacaaaaaaaagcaacaaagaagccacaccacacctccctggccaggcacagcgctgcccagagcggcacaccgcggacagcaccacacatgttccagaatctgaaatctcaaaagccattcactaacttaaaacaactcaacagagccatgaaacaaatgccctgatgaaaataagacaactgcatgttacatcatcggcactttatacattactgttaccatgaaaaagaaatgaacagcagcacgtctgataccatcagctgggcagatgcattaaggttaaatctaagtgtcaagaaaaccctatttctttataatatttatgcagctgttaagcgtaacatggtggcagcttcacaacaagaaccgtgatcatgcatgcagtcatgtctccagtattctgtgaaaagccaggatacgttaggatgtgagtttagaaactgagtccattcggtgcatggaaatccaccgcggagtcacacaatgctcctcactgtagtccaggcgattggtgggccgccagcaccctgcgggcttcacagggacgcgtgcttgttctccaagccccgcaacccttactgtgcacacaacatcgcacacacctttgtttttgaaattaaaatgtttatagttattgctgcgtccagtgttttgagttatactgaagcttctcatttctacaagtatatcttttatggtgagaacgacatttgggtaaattctgagacaacttttcccatcttcaagaccccaggaacctgtatccttgctggggtagaggtcccaaaatgcagtccatagagtatcactggcctggtgaaccatcccttttcaaaagacaatagttagaaggaaatactcaattttaaacagtcacacaaatttcttcaaagtatttaggatttggaaatttgaggagagggttgggggaagggtattgtagagaatctcttgccccttggaaagtaaatggtaatgcttttctaatttttttttttgtaaactaagaatcagcaattaataaaagcaagtgtactctataatcacagacagaaggttcttattttcaggtcagcactccctagaggtgcaaactttatttaatttaaatgcagttgtttgtctaatgggaagctgatagggccttgctgcagttctctaaggtggccaaattaaacttggctggcagctcctgtaatcctcttgggcaactttacagccaagccccaagggctaaatggcaggcctggagctgtgagtgtggcctccccacggagggtgactccttgagttcagtgaggaaaaccacggtgcctggcagtggtcagccaggagtatgactggccactccttaggcatccagaagtaggaaacacagaaagcattccacaaaacggggaatctccccaaagagctagaaacccaggctggaaggaaatggcagcgcaggcaagagagcaagagcaccctgggtgctcctccatcccgtttctctggggaggttcatgaggtgcttcttcaacagttattctgttcattgcttatcacagttcacgagttctcgtggcatcttttgtggggaggagggaggatgaaagtgacacagtgtatctacaacactaaggtcacattaatcagataggaatgcagtgacgctctgcaccgtctatgagagcgggcatctcgagtgtgcataccgaggcacagatgtgcacacacatccgcaggcaactgcacccacagagaaaaggtggcagtattggagtcaccccaggattcttgggggctgtttgaccagccatcaacagtgcagccatacttctttttcttttttatcgtggtacacaacttttatatttacaactcatgaacttgttaatctggtccttcatctagtcagctatgtatcagaaaggacttcctgcaaaatgttatattctaagcccccatttagaggaggcatccctaaactgacatttcttgctagagttgttcaaatattctgccagtatatagctaaagagttattttccagttcaagagttatttgggggctgggcacggtggctcacgcctgtaatcccagcacttttgtaggctgaggcaggcaaatcatgaggtcaggagttcgagaccagcttggccaacatggtgaaaccccgtctctactaaaaatacaaaaaattagctgggcgtggtggcgggtgcctgtaatcccagctactcaggaggttgaggcaggagaatcgcttgaacccaggaggcggaggttacagtgagccgagatagcaccactgcactccagctcaagcgacagagtgagactctgtctcaaaaaaaaaaaaaaaaaaaagagttatttggacacagatcaaaatggtttctcctctaaagataatattaaaaccatagcacttggttttatataaatcatgtggccaatttggcattattgattctaaattttgcagtgtgttgaaatcatctggcaagtaatttgttaaaatcatgcgatgcttcaacttctttgcccacaaaatgtgcaatgcaatgcctgtttacttagcccacccgtctccagcctcatctaccatgctgttttgtcccaagtcactatgctacacaagcatccgccatcagcacacacacaggtgtgatccacagacacaaccttctatgaatacggtaattggcaggaaaagaagaggagcaggtctgttccacattttccagcccaccagcgttcccacccccttgataactggagggctgggaactgagtgcctgaatttgcagctttactaggatctctccctgtcaaggctgatcatcagagatgacactatccatttaaaagactcacccatctccctgcatgtgcttaccctcactgagaggtaagaagaaacaatttattaaactattacgtgttaagcagctggcggtatgatctgctaaggaggaaaaggaaagaatgatttagtaaatcgtgcttcaaatcagtcctgattcctcccatccgaccttgttattctagctgagattcttcatataagcaatacatgttaattctgtgcttttcaaattgaattcctccctgagactcatatccaaccatctgttagatattttgctttgtttgaataggaggcattccaaactcaggtataagagaatccctgacttcaatctgccctgctgcccccaccccaccatccggcaagagctcctcacctcagccgtggcaccgacagggaggtggcgctcagctctgctcctctcatcctggctgcgtgcagggaggggacggtcacgtggagttctgccacggcacctcttcttcctttaaatctcagcatgacactgttgctacaggctgtgtgcgtttggccctgagttctagttatctgtgaattcatcttatccttcattaaatgtcattgccttacaatacagggattgcatctgacatctccatacatgctccatgatcattctgtttgactaatacaacaatcatttcaggacctcaccacaagagacactaaacgttctttggatttacagcagtttatcactgctaaatgtcaactctgaggtctgggggcacaaaacacactaaaaatgctaaagcctcaagaaggacgcagcagggagtgatgaaagagtgaactttggagccacgcagacgtgggttcaaatctcctttgtcaccgctatcactgtgctcctgaacgaaccacttaaacactccaagcttgtctctttaccgttaaagggaaagtgtgcagaagctcccgcagccccaagtgctaggggccaccctgaatctgttccacacaagtgcatactttcaagtaggcagtgacactcccaccccacataagcacaactggcttcagtgataagcccctcagactagctatttaactttgaaataaccttcaccagctttctttctcatttaagacaaaatcaaagtctacaaaacagacacggctgaaacaccaagctcaaaaggacaagcaccagaaggaacatggcccttggtgtttcagatgcatgaagggcggaaacgcaaaacggcctcccggaggtgccaggaaaggctccatcttgatggggtcccactccagctggggctgaccagctccaccacgcctgggtgcacattgatgacatttccccagcctgcctccctatctcttggttctcctgagggctgtggtactttcagatttacggccaggatcaggttcccaggcctttgtgggaagcctctacccaactcagaggccgtgcctctcctggcccactgaggcatgcagcccacaccggtgtcctggtgatggtggctggaagtcacagccagcctgccagacatcctgagctcggaactcagtctccctgaacagccccgccaggcagggactgtggaaggagatgcccacttcctcctcctgggcaggtagcccttttgagggcttagttcataatctattaggcctccctgttgtggtccctccaaggctaggcaagtccaagtcaagcttcacaaagttacctcggaagaaaagcgctgaggaaagagacactgatggaggaaccagacctgggctgcgtgccattttggttttgatgtgagcccctcccgccccattcactgtgccccagtgcccagcccagggctcctcacccgccacatgcccgacttgtccacagttagagagaaggcacactgctgcttataccagtgggtttgtagccaat

SEQ ID NO: 1057 - DNA, 28215 bp, Homo sapiens
tcctgtctgtaaccatcagatttatttttatatttattaagcagtaagcaaacagagttgggggagatgacctaaaatggttttcttttggaataatattttttaaaaaatcaaataactgttatcactttaagttgcatgaggctgaagctgcacctggagaggaatttaattttcatgacatgcaaaactgattaggcagtgaactctttcctcccgcttcccctgaacacatttataaacttcaacgggggtgaattccatctaatactctgaaaaccatttctcatctcacagtttacccaaatcatgtgcatgactgcaagaggaaataaacaagaaatctttaagcatagataagccacaatggatagttaatcttgtacagacaatccagcattaaggctaatttgatcttttaaacattttatgggaaacagctgttgagttttctctagaaaagcccacaaggttccataaccccataggcatacagcctcgacaggcagggctccatcaggctcctcttgaactgggcactccttcacggaaggcaggaatgcacgtgtcttcacttcctgctgctctgcacgcacgtcacgatatctggcagaaggtggtttctgttttccttggtgacctgtgggaagaagtgagagaacaggcttcagagctcctttcctcttcttcaatcttgtgctaggtaactctctaaaagaaacgcctggaaggctgggagagggtgaggtatgttttgttacccaggcaggaggcccagctcttcaggagcactcagaaacaggacaggaatcaccgagtcccagcatcagtttctgccaagtgacagctcaaaaagtcaaagtgggtttggagcccagacagatttcagccaaccatggggagagctgtgaagtgagtccgacgaggcacaccgggacggatgatgggcacacaggacccctgagcacgacctgtcctgaatggaaggaactcaactgttggagtgaagcgaggaggagagcctgggagccagcggggcccaggagggcacccagcagagcagcagtgaagcgcccaggattctgggatgctcagtcatctacccgcctctccacaaacatcaagtgctcatttgaaacatggagaagtgggagagccagagacgtgagggtgcctccgtacagactgttactcaggcctcctgactgcagtgtgttctccaacacttacaccattacaaaatcaaacaaaagcaacaaagagttcaccagagctttacccgatgatctgtttatttttctttcactaccacaccatcccgagtgccccagggtaaaggaagggccatctctgctcccatcacagtgccttcctacttggcccatataatatccatccactcaacacacgctgatggggtggaagggcaaacaggagccaggcacagagatgcgcatagagaagcaccacaggtaaggaccctgacctcatggagctcgcagaccaggacaggacaggcatgaacaaggacaatgaaggagtctggggggcaggcaggaacaggggcatgtgtggggtcaggggcaggaaaggcttccaggggtgcttaagcctggatgtaatttcgacaggtgaaccatggaaaaggggctgagccaaggttcccggtaagagcagggagtgcatgtggaagccttctgaggttcagggtggttgtatctgaagagggggcctggcatacaataggtgccaatacatgtctgaagaggagatgcagagcggacctcgtcaattctggttcctggcacctgctcacccttcttggaagagtgctctggttgtctttaggagactgtacggtctaggaaacttgcccccagccaacaagtgggcaagccaggccctggcaacttctctgagatctgtaccccaagaggagtgactgagatctgcaccccaagaggagtgagctcacgcagcaagtgccagaagctgatcccatttctactggtcctggctgcgtcaatcccgtgatcccatttctactggtcctggctgcgtcagtcccgtgatcccatttctaccggtcctggctgcgtcaatcctgtgatcccatttctactggtcctggctgcgtcaatcctgggcggctgtggctccacttgaaatgaggacagtcagcttttcctttggcttcatgggacagctccaaagcctataaggctttttgatgctgttttcacttaagttagccaaagtccattcctgttgtttgcattcaaggaatccacctgaggtagaaaggaggcgacacagaggtgggcaccacaggggcccttttcttccactctgagttcagcagtgattgcagtagcttctgcctccagccaggctctgtgagagtggactgtgatacacagctggagaatttgctctggtcttctatgacacagtacggtgactacagagtaaataacaaggtagtgtatatttcaagatagctagaagagaagattttgaatgtcatcaccacaaaaatgataatttaaagtgacagatatggaaattaccctgatttgatcattatacaatgtatacatgcactgaaacatcacactgtaccccataaatatgtacattatatcaattacaaattaaaaattaatttgaaaattgagcagaatgcaaacactccaatattaatattttgatactccctttgatttccctaagattatttctgaaaattatgcaataaaatgttgatgtgcaactctctgcagtattcacttatgatattccctgttgagaaaagcacactcccaaatgcaagaacaaggatcacagcatctgccaacctcaggagtctttgccttatgtgaaattctagtctactttttattcaacagccagaattttggttgcagaaagcctttcctgagaagctaattagaagagggaactgggagctgggagcaggaaaaggaaataaagaagactgcagaaagaagaaagtaatcccaaccattctttttttctgcactggagccttaagagaaagaaaggaagctgagtgaacctgaacccttgcacctgcccagtggctgtaggggggcccttggtaagaatttatcctgggcacagtgaagataagactgtgagcaccatggggtcagaggccacatctcattcatcctgtgacctccagatccaatcccttgcttattaggaatgttgggggcccttcccacagtttcaaggaaatgcatgtggttttgttttgctttcttgcacatagttgtatactaagaggcatttcttcccctgcctgctccatccatgttttcaggtctggggttgttaaagtcagaacataagcaggacccagtatctggtactgcatctgtgcccagcagatgagtcaagtactgtctctcgccgtacctaggccaaccagatgagaagacaaatttgtgatatcaccacctcaacttcttatttaaacaatcaagaagcgggaaggggagactgagcagggcatacagacactgatcatattaaacaagttagaaggcagtgaggtagcatgcaagcagcctggaagatcagataatatccactcactgctgccaagaacatgtgcaccccaaggtctaaacaagaggcttagtcatactatgaagctgccagcttgaaaaagaactaaagttgttgataacattttcaatgttatgacattaactagaaggcagcaaaatcaatcaatgacacactcattgggatacaatgggataaaactcaatgggatacaatggtaataacctcttagagttctgaaaaacaaattattgaagaacccataagtcacctgctatgatttgactgtgtcccccacatttcatgtgttggaaacttaacccccatgcaaatagaggtgggacctttaagaggtgattaggtcatgggggcagccctcatgaatggattaatgccattatagtgggagggagtgagttatggcaggactgggttactgataaaatgatgtctggttctccctctctattgttcactgctaaaactccagtggatagaacagtacctgacatacagtgcgtgctcaatatttaccaaatagatgaataaaaatactccatcaccaatttcttctactgatgctttactaggtaataggaggtgccaaagattgtatcagtgagattttattttccttctcaggtactgttctttcttttcttttttcagctattttttttaacacatcagagaatgttatcgttttgcctcaactgtcaaacataattcttcaaaagtcaacagaggaagaaaagcccactacactcactcagagttttactcttcccattgttctttcttccttcctgatgttccaggtctccttttaccatttcctttctgataagagaacttcctttggccattcttttagagcagttctattatgacaaattctcttagttttccttcatctgtgaatgtcttatagaattatgagtcgacagttgtttcaacacttggaaaatgtaccacctccttctggccttcatggtttctcctgagaaatctgctgtcactcatattgtttttaccctataggtaaggtgctgctttcctttcactgctttcaagactttaattttcataagtttgactatggtatgtcttggcatgaatttgagtttatcctcttggggttcactgaaaatgtaggtttatgtcttttgccaaatatgacaaaaatgcagccattacttcttcaaacactttttcaaccccacactcatctcctgttactacaatgatgtgaatgtcacatcttttgttatagtcccacaggtcccagaaactctgttcattttgttcattactttttcttttaagtctgctctttgtcaggtaatttctattgttctaccttcaagttcactgattctttctcctgtcatctctattctgctgatgagcccattcagtgacttttttattggctattgtatagttctaaaattttcatttgattcttctatcttctaggtttttgctgaaactttccagttcttgctgagactatttttcatttgtttcatgtgtatctgtaattttatgaagcatttttatgatagctgttttcaaatccttgccctataattccactatctgagtcaccttgctgttgagatctgctgatggcctttcctcactcaggtttaggtattcctgattcttggcatgacaaatgattttcagttgtgtctgttgtgttgttccttaggtccttaggttcctagccagtctgtctttttctcttcacttttcaggtcttcttatgcttgtattataaataacatccttagcaggaaaaataaacacaagtgtgtctactctatcttgtctaaaactggaagagttctcgggtgtttttggaaagtactctgttcacccaacgttatgaagaataagtcaagataatattactaatttgtgtggtatatttcccccatatcatgagctcagtctcatcttcacactatgcatattcattggaaagtactctgttcacccaacattgtgaagaataagtctagataatattactaattcgtgtggtacatttcccccatatcacgggctcagtctcatcttcacactacgcatgttcagctggtagcaaggggacgctgactctgaccccttttcatagctcattttcttacctggaatgttctcccttctttttcccatttcctccttcaagagccaactcaagaaccccttcctttggacacctctccactaccactgctcacatagatctctcccttccctgcccctagattttgattgccccatggtctgtttttcttgagggcagagatcatgcctcacaggtgcctaaacgatggactaagtactgaatgtgaagggcactctcaaaaatggattcggatactttattgcatgtgagcaatggaaagaacccaaaaatatatctaatccaacacctaagtttgcagataaagaaaatgaggttcttggccaggcacagtggctcatgcctataattccaacactttgagaggctgaggcaggcagattgtttcagctcttcaattcgagatcaaccccgggcaacatggtgaaaccccatctctacaaaaaatgcacaaatgagtcaggtgtggtggcacatgcctgtagtcccagctttttgggaggctgaggtggaggatggcttcagcctaggaggcagaggatgcagtgagccaagagcatgccactgcactccagcatgggccacagagactaaccttgtctcagaaaaaaagaaaatgaggttcttgatttataaaactggaaaaggccaggcacagtggctcacacctgtaatcccagcacagattactctgggcaacagagcaagactctgtccctccccctcaaaaaaataagttaaataaaaaataaaataaaactgaaacagaaggaccacacaaaccccaaagcaacaacaacaaaaaaaaacagggtatgtcagcccctatctcttacttaattaactcaaagctaattgttttatttacagatcattagaagcaatgattatcttgcctggagaataattttgagtctcagagagcggaagaaatgtggtatgatcctaagacacaaagtctgtttctgggcatcacagtcagctcctttcaatccttccttaggactgttagattagattagtttgtggaactagccaatccctggagtctaacactagcaatttcccggtcttccagcctagaagctatctgacctcaaaactaattttctttcatgatctttcactattcattgccttgatttccatggaaactctataatcacaaccaaaaatgtaaaataagagaagacgacatgaaactctgaagaaccccacagacttttcagggctctcaaatgtcacctccttgaagagaccttccctgatcgcccttgctactcctgcccccaactaccacattgcctggtttctttatttttgcctttatcagtatctgaaattgcttaacttatctgttcacatttttggtattcagctcctccattagaatgtaagctccatgaaagcagcgccttggtcagtctcgttcaccacagtatcccaagacttagaatgacacctagcatacagtaggtgctcaatcactattgaccaaatgaaggaataaataaatcaataaagaagcgcatacatttttccaagtctggctggtctaaccctaatggctgtttaccaccacactccaggattcttggtggcaacatgtggatactccaggattctttggtggcaacatgtggatactgccagtgggccaaggtgacatttcactcagtgattaaaatgatcatgaggaaggtgctcacgggtactcactctccactccccctgataggagtggccctgcctgcctgacttgttcacttggcacttgcagggccagggagcttttaaactgggggtggggagtgaggtgtgtgagcagagctcagccaagagcacagctaccactgactcaaagaaactaagggtaggggttggggagaagcaatatctgactgagaggaaaacagagggacaacagggaaagaaaggcaagaatttagacaaagtgccagcaatgccatgagtcccttccgactggctcagacgctgccactggtcaacaagccctagcccctcatctctcacatgtggtctacagcagtgcttctcaaagtgcgggggacctaaaaaccacatgagaacttgccagaacagatcatggggccatcccccagagtttgactccttggaccagggcaaggcccactcccaggtgatgcccatgctgccattctgcaagcctcacactgagtggcacatcctacagatgcactagtgaatgtagcagccacacgagaccacagagcacctcagatgtggccagtgtgactgagaatccaaatgtttaattcaatttaaatttgattatttatgtgattaaataaataattcaatttaaatatgattaaatttattaaacataaatagcgagatgtggctagtcgctactgttctgagcaatgcagagagcacatttccctcactactgggaagttcaactggacggtgctgctcttcagcacctggaagctgtgtctcccaacacatccacagcctcttctccccacaagcacaagtgggtcagctttaaaagggaaatctttaaaacaaaacaaaaaatatttgcctctgtatcccaacctggcgcctttcaatctgagaagagataagcttagaacaagcaccttagctcaggcaattctgatgccagagaggtcctagtgtctggtgaggagatggaagaaaaaagcagccagaacaactgggaccgtcaggaggcccccccataagcgagtttgttttttcatcaagtagaggtataatttaagttctatacatttctagaaaattagactcacctacatttcagcatggaagggaaaaaatgttaactcaaaaccaaagagatattttagagccatctgctattttagatcatctgctccatttccactgattatggaggactggctgtactcacattaaacaccttcacatcctttctgtttctgatttcttctacaagagccagtggctttcctttaggaactgggattgtgccaaggattatagtccctggggtagacagcgtctgacgaacagcttgaatgaaaagctgactgaagagctccatcttcccaatctcatcgatgacgcacactctttgccctgggccactgctgcagtcggcctgagaatgacaaagactttcactgggacatcagagtcacattaatcaaagggcccatgggtcccactccccaatcactcaccaatgaggtaaaaaagacagaaacctttttactggatttcaaaaagtgacagcatcccacagaccaccgctggtactgtgtgggaggggactgcacaagggtgagtcccaggagctgggaatcattaggactcttggaagctggcagctatgcctgtcaccagtgggatgttcaaggaagtaacggacataaattggaataaagtcatgagaaagagaatctgagatctaaaggatgcaattgtacttacttttttttcccctttagccaagacttgtttccttttaattttcacttttttccaacaacgcttatggaccagatcatgaaatacacaaacatctacctagagcagttatctcccccccagcacgtagggaatctcatatggctcaaaatggaaaaaagaggccattattatcaacaaaggctcccatgcttgctgtctcactttttttaagcctgaggtatttgggtgccacttattttctggttgtatataaatataaagcttgatctctgtcttggatcccctctctcgaatcactcactctgggggaagagaagtgctatgctgtgaggatactcaggcagctgacggtgaggtccacgtggtgaggcactgaggcctcatgccaacagccaagaggaaatgaacctgccagcaaccacatgagcaagcttagaggcagggccctcccaggcaagcctcagatgaccacagccccagccaacagcttgactgcaacctcagaaccccagctaagctgtacctggattcctgatcctcagatactgtgtacaataatgtgtttgttgttttaagctgctaaattttgagataacttgttccatagcaacatataactaacacacatgtcctctatagaaagccttcctggggaaggctgacaggactttggttgattcttccctgggagggacaaaacagaacatgtaataaacacttcaatgaatggtgaatgacaaatacaccttatatatgtttgtatacatgattattttgaaaactgtatgtaaagctgatttacaaagtattcttcactacagttctgattccttaaatgatgacagcaatatagtcctagagggcatgtctgagttaagctagattttgttcaaattccaaaagccaaagcagcatatggtacagtgtggctggtggtagggatcagtggcaaccaggggcagccagtgacagacggggctgcgggcccagatcctaaaggccttcgaaggcacacacagaggtgggaatcttctcccacagccgaaagagtctaatccagggaggatcacaagttgtgctagaaagactgctggctgtggagtcagaaacaaatgttagactccttttggaatagacaagataagatagtgggtgtctaaaccccagttgtgattgcacggaagcagtacagcagtgtttttcagacttttaagtaaacagtactctattttcctactgcatattgtacacttatgaaatatttttccattcattttattagctaaaagatcaataaggagtccactgtaatcacccaagagaggtctgaacaatctccgcacttctgtgtttctgacatgcttcatttttgcctctctattaagtttatctgtacacacgcctggtctccccacttagggcaggtacatggttgtcctcgtccgcatccttcctggggaactcaccgatgtcccagagctgagaagtggggagctgaaggagcaatgtcaccctccactggtggggtcggggagaagggcagagcatctatgaagtaagtcactacttattccaagtttttcctccaaaacgaaagccatatttgggagaaataaaacagctatcaaccacctgtctatgataataaaaacagacaactgtacaagaaggtttctgtcttcctgggggcatgccactccaactgacccgactgttcccaagtgctgtggacattttgctgcccccagagacgaagagtaattgtggatgccattcctctggaggctgtcatctaaaagccaaaataaaacttattctggcacctcaaaatgagttttggaaggtgccaaatcagacaagaagtgatatgaaagaatgtgtgtacacatgcacatgtatttatttgactatatacatgagggtagtaaaatgcacgtggccatgtgtaaatacacacgtacaggtagaaagtgtgtggctcttcaacaaccagccttcctgcaatcctctagaacattcaccagtgaaagctcatcaacatttatttaagtttcagcacaaaagaatttggacacacatgtatacattactttctaccaattggaaatcctcattttaaaaccttagcttacataaaatcctcaatctgtccagaattggggaattttataatccaagaacttcaggaatctcaaaaataaatctgtgatttttaattaaaaatgcaagttattcatattcagttgagagaaagatgtcagctgctgagccactctgaagcatgtagacactcagcctgcttttctaaatagtacaagatcatacactcaaggtcttaaaaaaagaaccactataacgtgtaacatggttttatttctatataaattcaagcaactttagagggaaacaaagaaataagtaagtaaacaaacattcaccccctttacattgttctaaattgatagagacacagacttagaacaataggggcccaggtttgaagatggtcaggaacccctccccaacccccagtgtgaggagagtcctaatgagctcccagagaaactccacctacagctgctggagtaaggagtgtgtaaaaactgtaggtggctctcagccacgtggtcagaatcacgatgtacacaccatctggggtgtacacaccaactggggagcaccctttcctcccctcacagcctctcctcagagaacaacccaggcagcattgcttcctagtgccacacctcagtcctatgtaacacactagccttcctggccacacccctcacaggcttccacttcagctgattataaatgttcagccatgaagcgcacttttagtttccctgttccgggagagaagatatttccttagatagagtcctaaaattgaccagccagggataagagaagctacgaataattttataactttggttacactcacctagtttgctttccagaaagattagaacaacaaatatcttcgtaccagttatatcagagacctgaaaatagtgtgatttttttgggtcctttatttttatatgtacttttaaaaatacaaagaacatataaatataaaataatttcatttaaccaaaatatcaaactgagagcaagctaatccaagtggtctttgccttattctgaattatttgcataataaatgtttccagtggtattaatgttaattttaggaggactgtttggattgttttattttaatatcagacacacagactagctcctgagcttacccacctgggacagcaagtatggaaagtcatgaaagtgaataaggagtgtctctcagaagttaggcagcaaaactgcagcccttcgccaaacagcagcaagttctagggaagcagaaaggcaaatggtgctaacagcagccatctctgagccagcccacaattcctcacccactgaagttattagctaaaaatgcagggctccggtcatattttatgtgtgtttattccaagccttcaagtctcataatccctttgctgtctggtggcatatggactgtgagtctccagggcatagccaggacaaggtgtctagactgcccgatggcgcctggtaacccggcccttccccagtcaagaatactccgggcagaagctgctcccccggacatgccagagatcctcaccccggcacacagacagactagctctgaggctcttcctggatgtcctaaatggcctctcgggactcacaggggctcacccacatggtcacccgactgaagagcgcttgaatggtagccatggggttttccaagctatcttgggactgaaacaacacctcctggctgacagtcagtccagtgagacggagagcccagtactcctcgtcctcctcatgctctgagcacttgggactggcctgcacatttgggctcctgggactccatgacagattactatcccactccggaccccagctccctggcaaacacaaaccaaattgtgaagggaggctcctctcaaggtactgccatccaccacctcaattaacttctcaagaaaataatcactgctattgctctgctgagcacctcctaggagccaggggccaaggcactttacaagcattacattcagtcctcccagcaacttcacatagcaggtaacagcatctgtttcacagatgaggaaaggaaattaggcattaagggatttactcaaaactcactgagagcacagtgacagagctggagtcaaaccagagatcacctgacttcaaagctctcttccacaccctgtgtgcaatacgcctccacactttgattctgaaataaagaatagcatctaggaaactgacctaaccacgaagaaactgctttcctctccaataagaacgaatagcactctggtgtttagggatctatggaggcataggcacaaaacctcaatttatttggagtaatcatattgctctaaattactcgaaaataactcatattttgggtctgagaataatatcaccaaaattatttcatcaagtatggatagcgaatggcccactgcagtaggcagatatgataaagtaaaaggacttctctcctctaccaggagcacaccccgagaagacggtggaagagttatgaccaggtatcctgatatgtccaccttcctgccagtgtttacaaaaaccaaattaaaaaaaatttcacttgcttagtaaaaattttcatcaatatttaagcttttggtaaatgtttagtatctctgatacctgataccgttttcattagaaactgcctgaggagaaagaactgattgtttttcctataataaaatggtgatggcttttctaatggggaggtaaccggatacaaatagagagaagcacagcttagagtggaaaaaagcttaaccattatggcattttttttagtgcagcttcaatgtatagtaattttatgtttgttaattactgctcaccttgctagagaaacaatttcaaaagagagtagttaaatctgcttgccaattaaggcctcaagagaaaattatttttatcttaagatgatctaataaagtttagataaaattagaattggctaggggaaatctgatgaggaggatgtgcatggtctcacactatctccccactcactgctcattagtgtcaaagaaaaaaatagtaactatacagtggagaaataggacaagtccttgatcaggtaatcaaaattaatatcactaaacatcacacacctccagatgagatactcgagaaggatgcatcatcacttatgacttatggagtattccagctttatttggtcatgaggaaacatcagaaaaactccaaaagatgaacgttcttttaaattggaactatattctttacaaatgtcaatgtcctggaagacaaagaatgactgtggaaatgttccaaattaacggaggctatggagatgtgacaactaagtgtaacatctggaggaaaagaaatgttacaaagaatattgtcaactgatgaaactagaacactaacgatagattaaagtattttttcaatgtaagatttacagaggttgataactgtattgattatgtaaaagcatatccttatttttaggaaaaatatactgaacatttaggagtaaagtaccttgatgattgcaacgtattctcaaatagtcacccccttccagcttatatatttatacacacacacaaacacacacacacacacacacacacacacacacagagagagagaataagcaaacaaggcaaatgataaacataggtgactctggataatgagagtatacaggtgttcttgcactattcttacacttataactttctctaagagtaaaattttatccaaatgaagttaaaaaaattgtcaaaaaaagaaaacacacacgtatgtactttctcagtaccagactcaagaaaacaaccaactcaccccgtatgaacttcctcctaatggagtgtggttttagactgatacgcacgggaggcgagacagaaggaaatgctggaaatgggacaaagtgagagggaaaaagaaaaacggcaacagtttatacaaactcaaccccagtccagcttaagggacgtgtgacttaaggagcatgcaacttttctgtgtttcttgagagtggactgcaagaagaaagacatgaaggtgtcataacccagggcaaaagcctgcttagcatctaaatccacagaatctcgccaacaatcagaaataataaagtctcagtctctgctcaatagaaattatgaagatttgccatgacaaatcttgcaaaatgaactgcagagtcaacctcatgctgaattttcacctcattttcttatgctgattcactgcaggaatgtccttactgacagtttaaaaactgattttctgtttgcgccagatagcttttaatttccctggctgatcctgcattacatacttgtaatacatgaggtagagaaacagaagctgagagagaacaaagaatcaaatgccacatttgctaacagcaatgacagaaattctagcaatgctgaggagcttgtcaatctttcaagaatggatcctgactagaacttggtttttctacattctttctaaagccaagtggcctgagagtgacctaaggaacacttccaggtcgagtctaaaaaaacaaaaacaaaatacttttccctagacaggagtcctctcaccttcaaaggaagtttctaagattttccaaagcagagcctatttcagaaccaaaagtagatcctgctctcaaaaacaaatatactttaaagacttattttaatcaaaacaggaaaatacaaggttcaaactatgttggttttccctgggtgttctgattttagcttactcttcctttcacagatctttgtaaaaaatgacactgttcacctggaaaacagggctttgagtagatgtcctttgttctttaaaacattataatctattgtctccattttgtgtgagtaggagatatgttgaaaatcaataaaatgttacatcttacattgcatcaaattttaataaagcattgagggtagctatcaaaaaggccattatgaaaaaggccagcattatcttatcagccttgatcattagaaaacagaaaaaacaatcctaattccagtagcaccagaaaataggagagccctatgaataacctcaccaataaaaattttaaagaaacagatggagaaagagaaacatgttttgggctgtggagaattaagattatctgaaaaattaagacaccctttatgtcaaaataactatagtcccaatcactccatataagacattttttttaatggatagtaaagtcttgattctatagttcactccagctctaccacttacacaattagtgtgtccctgggcaagtaactttccattctatgcctcagtttcctcatctgtaaaataggaatagagtgatagtgttctgaggattaagtgagttcatgcctggcacgtagttcgcactcaataatagtttactattacaagtgccaccattactacagtttctgaacaaggccattttttgaagaagaaaaataaaaacgattaccatggtaattaaaatactatggtactgatgcaaggatcaaacagatcaatggaagagaacagataactctgaaacactatacatacaagcacacatagttttaatataattaattaagcataaaaaactaattagaaatgggttatttaacaaacagttttagtaaactggctaaatatctggaagaaaatcagctgagaatctcatagcatattacactcaacataatccaaatgaattgaaaacataaatgtttaaaaaaagcatgcagaagaagaaatatataggtaaaattttatataaatttggaatagggacagacttttctctaccttgaagggaaaataatcaccaaagtgaagtgctaaactgagaaaaacagaatcaataatataaaaaggctatctgctttataaaacatctatttaagcccaaagaaaataaatgggaagagcaatggatgaacaactaaaattaaggaaaacttaatgaacaactgaaaaacatttaaccccattagtaactgaaaaatgcaaatcaaaacaaagcagtgtgttgaaaataagtagagtgctcagggctggcacagcgcagcaagacaagcacactcacaccctggcagtgggacacaaagtcaacgcagcaccatcaagaccttgaaggttcacaccccaccatctcagacttcaccttttagaccctccccagggaaacaatcatggctagagaaaaagattcatgtataaagggtgctttgttgcaaggttacttacaatggtgatacggaacctgaatgctcaacactgagggagtaatagttaaatcaaagatgaaaactcataccatgaaataggatgaaaccactaaaatctcccagctttgaagattagcatgttgtgagaccattcccatgtccctcaatcatattaagggaaacacaccaagcctatgaaactatacataacattttccctgatcctgaatgactgaataaataaaccaggtatacaaaaggggcagaaacaaaataagctaacattggctaacttagtgataagattatgagttattcacattgtgttttttatttttattttacattttttataatttttttaaccatgaatatctagaacttgaatactcaggaaaataacaaatgttgacaaataaggaaagagttaactcatggaatgaaaaaaattaacagtcaaccctactagaggctttccaaaaaccttcctgagtctagaacacttaccacacacactctatttttctttatttctcacgagcgaccacgatgctcaggctccattcctgcctaaagaaacgtaaccaggctaggcacagtggttcacgcctgtaatcccagcactttgggaggccaaggtgggtggatcacgaggtcaggagttcgagaccagcctgaccatgatggtgaaaccccgtctctactaaaaatacaaaaattagccaggtgcggtggcaggcacctgtaatcccagctactcgggaggctgaggcacaagaatcgcttgaaccctggaggtggaagttgcagtgagctgagatggcgccactgcactctagcctggctgacagagcaagactctgtctcaaaaaaaaaaaaggaaaagaaaaagaaacaagaaacataaccagagcagttttgcaaggtgaacctgggttgtgcctggccctcctgagcctctcctggagctgctcttcagctcccggccactttttttttttttttttttttttttgagatggagtcttgctctgtcacccaggctggaatgcaatggtgccatcttagctcactgccacctctgcttcctgggttcaagcgattctcctgcttcagcctcctgagtacctgggacacgggcatgtgccaccatacccagctgatttttgtttttgtttttagtagatactgggtttcaccatattggccagcctggtctcaaactcctggcctgaagttatccactcacctcagactcccaaagagctggggttacagacatgagccgctgcaaccagtcccagccacatccttacttccccacctgcaaataggcatagccctgcttggcctaattagagaagtacttttttcttatttttttgtagtattaaaacacacacacacacatacatacaaccctcaaactatctttcactcatacatattgaaatttcttacacacaatggatatttcttattatcggaatttgtgttttcatagatcccagcactatgaactaatactgtgtccctttataaagggtttctaacacttccagtttacttggttgttttcattgccagtatcaaaaatggtgtgtttatactccccagttttgttgcctaattattttaattaatattcttttcatttttttctttagtataaagacaaaacactagttccttctcctttcttcattcccataaaatatgtatgatgggagaaaaatttctgctccagaaaagaaatccatgaccctgactgggtgagaatcctatattagtccattttcacactgctataactacctgagactggataatttataaacaaaagaggtgtaattgactcacagttccgcattgttggggaggcctcaggaaacttacaatcatggtggaaggcagaagggaagcaaggatattcttcacgtggcggcgggagagagagagtgcaggggaaactgccacttttgaaaccactggatctcatgagaactccctcactatcgggagaacagcatgggggaaaccacccccatgatccaatcacctcccttcaggtctctccctccacacatggggattacaattcaagatgagatttgggtggggacacagagccaaatcatatcaaatcccctgccaggaactttttctacatggaatgtacatgtctgcatttggcaatcagaatacaaaatgttgggagaagtctgtatttctttattttttaattaaaaaacagatttatgctctgatctggtcagcatatgatctcttatataatcttgcatctagacactaaacacctgtgcaaactctcctcccaggatttggtctactctgtctgagcagggtaagtaaaaaattctttgtattgacccagtcagttcctaaaaccagaatcttcacttggaatttcatttgaagtatttcacttgacttttgaacatttaagtagagaggaatgtatgtgacgggaaaacagctaaaaagaaaagtaccatgttctctgctcccgcaaaacacagtggccacgagagtccccagcacaggaactgagggtaagttccaagaggaaggaattggggaagaaggaggtgggaggaggaaacacagcgtaggaagaaaaggagaacttggtgggttccaagaagcacaaccccctgctgaaacagaccataagataccaccagccctctgagattagaggatatcctcagaggctatagctaaaatcttcagcagcctttgggcaaccaccactacatacttcagctgagctctgaatgtcaaggagcagagaggcaaagatctatgaagacagcgtgctcaccaaaaaaaatggcaagtgccaagggcctcagcctggcatatgtgggaagtctgattgaaccagtgtggctgaagaatggcaagatgaggtcagaggttagtaaggccagatatcacagggctacagggccttctaggccactggaaggactttggactttattcttggtgccatagaaaactctggatagtttatagttggtttttgagacaggtctgtatcatttaattttcacaaatcaaagtagtaagtctgtaatagattaaatgacactcacattccttaacatggtccacagagccctgcatctcatggccccccacctcaccaaacttaccttcttcacctgctcctgctccagggctctgaggtctgaatgtatctgttcctgccatttagaatattctccccagacctccccaccctgacacatacaaataccccaatactaactctctctccccaatgccctctcacctgttcctttctgtttaaatgtcatcttcccagaactctttcctggtcccttggtctaaagtcagttcttcctgtccctccctttcatagcaccctgttcttttctttcacagcattaatgaccatgacaagtataaatttacttagtgtctacctttcccactagactaacagttttgaaagagtagaaacatgtctgttttgttcatgactgtatatgcagtacttgataaatatctgataaatagatacataaaactacataatcaataaaacaaaagctggttctttgaaaagatcatctaaattgacaaacttttagactgaccaaggaaaaaagagaagatttaaataactaaaataaagaaagaagtgacaatatcaccaatcttacaaaataaaaagcattatgggtgaatctatgaacaactatatgccaataacttagatacttcagatgaaatggacaaattactaaaaggtacaaattaccacaactgattcaacaaaaaaatacaaaatcaacagacctataaggagagatttaattggtaatttaaaagcttctcaccaagaaaaacctagcccacatggcttctctagtgaattctatcaattattcaaagaaaaattaatacgaatcattcacaaactcttccaaaaattagaaaagaaggaaacacttcctaactctattagaccagtattaacctgataccaaaactaaacaacaatatcccaagaaaagaaagctacagaccatatcttttgtgaataaagatgcagaaatcctcaacaaaatacgcctgagtaaactctatacaaataagacacagttaacatcatacataatggtgaaagactaaatactttctttctaagattaggaataagataaggatgtctactctcaccacttttattcaatgttggactggaggttctagccagggtaattaggcaagcaaatgaaataaaaggcattcaaagtagaaagaaagaagccgtaagatgtcaataaagtttttttcttttttaaaaaaggtaatataataatataatacgttaactgcttacagtacttggtaggcattcaataacaactggctattatgttcatataatgacattttctcttcctaaatgtttgttgtgctgtgaaaccaggttaagacatgactgtgagaagacagaggaaagacttatctttgggaatgttggtacctgggcatcaagagcctttccaaaataaaatatttatatgtactgaatttataggaatttatctgtagctcagagtgatagcaaattatgttgtttatccttattaagactcaatcttttcaattgtaaaatgcaaaactggggcctttaagagcaaaaggcattctgtttccatggctagcaattcccacaatacactaagagcagatgggttcaaaaagcagaaatcacgtactcacattcctcaagacgggtagtgccaactgctcaaaagaagtcaggtcgaccacatactgcccaactcggcattcacgttttccaggtggaggctctaacctgaaggaaaagacattatgttctttgttgaaaaactcctgtattgatttctggtttttagctgctccactgagcctctggcattccacatatgctaaatcatccttaaaaatgaccaacacaaaatgcggtggtctgtaaagctgatcaggttttctctgctttgaacagagctaccctgttcaaagtgtccacacctccaacaatgggccttgcagttatggcagggctatctcttaaggtccaagcagctactgcatcaacagtctttgaaaagtggcaccagaaacaggactaagaattataaagtgagaggagtttatgacttggtgaacaagttttaagtaaaatatcactttcttatacttttttcatgtgatggtttcattctgttttctttctctgagaaatccctaaaggcctaagattcttgaggatagatgacaacatttggctcaaccctgtgcccagggagacactctcaacctaaagggaaagcagatgggcatccaaggacccaacagagtatctgcttttggtgaatttagctcttgttgaaaagctcccaaagcacagatggaaggggagcttagataatagaacaccacagaaatgaaatatcagtacccaactctcgataaaggcccccgggtgccggacaacgtgacgacatcgaatcctattcttctccctccctgtctgacttcttcggtataaaatccatcaacaggcacaccagaggattttaaaacctcactggctttatggatcaatgttgtttttccaactcctaaaataaaaaaaaaaaaaaaaaaagaagaaaagcccattaggaaacattcccttactagagcacacacagcacttgtggactctgaggcagcaattatggtgggtagagaaatgggctgtaaatggatttatgaatatgaacttcaatttaattttgattgctccaggtgctaaaaatgcttaatttcaagtagaaacaagcataataaaaacacgaatgatatcttgaggtttatttttaaattgtgaaacattgttaattttgtcacgtacacaatcccagaatcaactgagaggttcctgatgatattctcccatgccatttgcatcctgtgaaatggtttacagttcccatttttctgcccaggaagtaacactggtcacacttgagtcaggggctgggaatttaagatttcagctttcaagagattacaaacggacctacacttaacagtgggaaaatcactttgttcctcctttgacttacattgttgtaactcctgaaaatgtgtctcttaaatatcattagcatccctgttaatggtcactttcaaactttttcataacagcaagcctatcaggttagcaactccttccaacatcatcttctccagggtctctaagcatttcttcacctttatcccccacaccttccccagtttgaacctatgtacctctgccccctcagcctccccaccttgatccttcctgtccatccagcctggtcagctgactactctgatgaactcactggtttgtaagcaccaacaggtgctacctaatatagtaatactcatcactgacgtcatggagccagacactgttctagcacactttggaagcattttcttggttaagtcctcacaaccatcctctgaggcaattaccatccttatgcatattttacagatggagaaactgaggtacatggtggttaggtattttacccaaggctatacccctcataaggtccatacctttcaacaggggactttacctgtcaccatgactttttaaaatatgagccttgttcccaatatggatttaagtaagtggcatcatgactacccaacaatggaaagagagagaaaactcctagcatgtctgcaagtgagctattttgagatactacagagttgcaaatcatgctatttctaagactacccactcttttaagcctccttgacataaaatatgatccattattcttatttaatgtatctatcttcacacttcacattaaaataatggcacctggctttctggaacatgaacagcaacacaacaggattctggctacagtaagccacagtgagcatgcagctggtagaactgtgtagaacataaaatgatgacattctaatccagccctggccatcagtaacaactgctttaggaaagtcactaaagaatctgtttcatgcaagtaatggcattgccgaatgtgtaagctgctacttcttttctgaagggcaatttcaatgcgcctgccacagcaccctgtagttcatgactaggaattcatcctcaggaaacatcaacaatacaaatgtgtgaaagaggacattcactgcaacattctttataatagcaaaacactgaaaacaacctaaatgttgattgtaagggaatgttaactcatggcaccatgtatataatagcacataaatacacagaaataccatgcaaccattaaaaaatatactgcttatatgtatttattagcatggaaaatagaccacaatgtatgaaaataatatatggaaaaagcaggttaatagcagaaaccattccattatgttttttttaaagaatggtcaagtacgtgtctacagaaaaaaaaaatgtcaagaagaatacagaacaaagatttacaatgttgatttctgatgttcaaattccctgtgattgtcactttcttccttaaacttttcttgttttttttaattcttatactgaatgggtcttactcttatcctaacaaaaattgccgtttatattttgaaaaagataaaatggagcaacggtaactattcctgttcacaaagggtatactgtggggactgtatgttgtgtagaacatagtagagcaataaataggaagcatttgggcaaagtcccttttggcttcttcagctctaggaatcttctttcagttaattttttcttcattagttaagctgctaccccaatgctgtctggataagaaatgacctctgcttcaggagacctcgagatgatagctgtataccaggcacaaacagatcagaaagctctggaattattttggttctggttctcccctaagcagatcctcagataaagattcaagtgcaggtagtttaacctgggcagtgacaacatgatggactggcagggaagaaattcagaaagggaagggaaggacaccagcatgaggtgcactgtcaagcaagttccactgggggcagctggagcttcaaccccctggggaatcctaagggacaagtcagggcaagtggctcagttatcctgtctgaggagtgagaaagtagggaatttatcaactaactttcaccaatcacaggttgaaggctaatcccagggcacaggaattccctggctcttctggcctgctctgtttgcaggccaagtgggctccagggaccagagaaagccctccaagatgagtcatgggtacagacagttggaaatcggaaaaaatgctaagtgccaggggcactaagaggatatgcaacaaaaagtgacctctttgagaggagactttacctgatggtctgaacatattgagaaaacagaaagaaactaggcaaataaaaacacctgacaataactcctaatggggaaaaaagttatgtgtaaaaggaaaaaaaaaaaattagagggcatggtggtgcatgcctgtagtactagctactagggaggctgaggtgggaagatggtttgagcctggaaggtggaggttgcagtgagccaagattgtgccactgcactccaacctgggcaacagagagaggccctgtctcaataagaagagggaaaaaaaagatgggtaaggtggctcacacttataatcccagtattttgggaggcccagatgggaggatcacttgaggctaggagttggagatcagcctgggcaacataacaagagacaggtctctacaaaaaaaaaaaaatacccgggtgtggtggcatgcgcttgtagatccagctattcaggaggttgaagtgggaggatcacttaagcccaggagtttgagaatgcagtgagctataactgtttcactgcactccagcctgggtgacaaagcaagatcctgtctctaaaataaataaataaatggaaaagaaatcatagattactatgtggctctgttgtgattgtctttacatggccataatactgtaaacattgactaatgaaaattacgctgtaactacattaagaagagaaggagaaaagacaaaggtgcgtgggtttgaggacaggtttaagagagctacactgtagaattatttgagtctttcaactacgtgtaggtaagactttgataaagcagaaacaagaaccaccatcaatacaatcacggtaacaggacacctccattaataaaacacacagttgtcttggggtcagcctgctgagtatcaaactgcattccaagtttcaaataaaggattgacaaaccaactttcagaaaacagttctttgcaatacttaggagtgactttagatagcaggcatttctcaaaccaccctcctcctcctcaccccctgctccccaactcccccatccaatgcctgacaaaatcccaaagtctgcaatattagctgtagcctttgctacttacaactaaacataatcattaaaataaagtgaaagagaattctagatccagggttacagcctttgatatctgaacccacactaaacttcaaaattagatttgccttgcaaaggagctgaagaaatcactttctccactcttagcccatctatctttttttagcctatctgatgcagcctacctgtcctttttagtaatgcttgatacatgggtagcgccttggtttaaaagcacctcctcctacacctctcatctgacctcaacgctatcctgcttctcagatgagaactccacaggccacagggttgagggatctgacagacatcaggaggggacagcgacaggaacaagcaagagtgtctgagaagggctcctgtaggtaccaaagcttctccacctctggcctcagctgtggagggaattcgtggggatggagatggggatgggggtggggggatgaacttagatgggaaagaaaggttacaacttcagtttcgctgtcctccaactaaaatttaccattttttttttgcacgatcaatgtagcaaagacccacagtaaggaaatacctgtgactatcaacagaaattagacatctccacttcacatcgcggttgccgcagatctcttgaaataccatttgtgcagaccacaacgtcaacactacagtaggagttaccgctgccgctggcccctgcggtttctgcccttcatcaagaagccagtctaggaccccctcacaagtgtgttctaatcctttaggccctgtgtcttttaaatcacgttttccgggaaggagtacaaactcttcagactaccaagcccgccatttaaattgggaacttcagaggccggagccctggagccggagaccctccccgacagcacaaggtcgcccgcagcccgcgcgcccccaccccctcgacctcttggaggtggggatcccctcagggttacctgggggccccgttaggaacacgtgccgggccatactggtgggcgggggtaggggttgcggtcaggggagcagtccaggttggggtcgcaattcaggtcaggtccggaccagggtcgcgactcaggacccgcccaccgcgtgtcgcaggccccgccc

SEQ ID NO: 1058 - DNA, 242 bp, Homo sapiens
tcacgaggtcaggagatcgagaccatcctggctaacacggtgaaaccccgtctctactaaaaatacaaaaaattagccgggcgaggtggcgggcgcctgtagtcccagctactcgggaggctgaggcaggagaatggcgtgaaccccagggggcggagcctgcagtgagccgagattgcgccactgcactccagcctgggcgacagcgagactccgtctcaaaaaaaaaaaaaaaaaaaggc

SEQ ID NO: 1059 - DNA, 5754 bp, Homo sapiens
aagaccatcctggctaacacggtgaaaccctgtctctactaaaaatacaaaaaattagctgggtgtggtggcgggcgcctgtagtcccagctactctggaggctgaggcaggagaatcgcttgaacccaggaggcggaggttgcagtgagccgagatcgcgccactacactcagcctgggcgacagagtgagactccgtctcaaaaaaaaaaaaaaaattacttagacatggtggcacattcctttaatcccagctacttgggaggctgaggcaggagaatcgcttgaacccaggaggtggaggttacagtgagccgagatcgcaccactgtgctccacactccagcctgggcaacagagtgaaactctgtctcaaaaaaaaaaaaaaaaaaaaaaaaaaggaataaaggggatgggtttgacatctgacaaaatgctgctgctgccatccgcttctgcaaaacctcaagaatgaaatgtccttcccatggcccacacgaggccctgcacgagctgcttcatccccttccaaacctcctctcctctctcttcccctcctcactctgctcagacacacgggcctcctcactgttcctccaacacgccacgtgtggtctgccccagggcctttgcacaggccatgcctctgcctggaacacctgcccccagattctcctatggctgacttctcacacttgggtcttagtgcatgcatcacctcctcagggagggccccctgcccacccccagtgaatctagccccattcaggacagtcatctttattatgcactgattgtatactaagcccagagacttcaactgtggtttctttttcatcctcccaataaatccatccatccatccgttcactcagacatgaaattctggaccctccaattcaggatctgggccacccagtgcctagcttttttttttttttttttttttttttgccgacagagtttcattctgtcacccaggctggagtgcagtggtgcaatctcagctcactgcaacctccgcctcccgggttcaagcgattctcctgcctcagcctcccgagtagctgggattacaggtgtgccaccacgcccggctaatttttgtatttgtagtagagacggggtttcaccatattggccagactggtcttgaacacctgacctcaggtgatctgccctcctcagcctcccaaagtgctgggattactacaggcatgagccactgcacccgtcagcctacttcttgtgttcattcattcattcattcattcattcatcattcagcaaatgtctatgagcgcctactctgagccactgaaccagctgggctggccctgggggagaatcgacttcccctgcaaattcactctcatcagatccccaggctggtctaggattgtttagatgccctcacgttggggaactcattccttactaagaataaccaccaccaataccaaacagtctcaagtaccaccaatagtgctgagttctcagggtgactacagcatctgctcccaagcccagcccagcccatatggtgtgtgctgtgtcaaagaacctgggttcaaatcccatgtccttttctaacccttggacaagcccctacccattttgtgcctcggtttccctagctgtaaaatggagatagtagtgcctctcttgtgggctcagcaccaggcctgttacacagctggtgcttaataaatgtgtcctgttacttaaggtctgatatgtgtagctcctgtcgtcgccgtccatgggggtgagtggggtggggaaggggtggtttgagtttctgcacatcaggacacgaggcgcggtccatgcaaatgaaatgcaaatcccatgcaaataaatctctgggtggtgcaaggctggaggtacaaggtgcacgcatttggggggcgcctgggaaccccatgaatcgagcccaggcccggaggtgctgacccgcatccagcccggctttcagtgctcggtgtaaatgtttacacctggccggccgccaggctccacgccgccccacactaggcagccaggagggggaatgtaaactcgggctgggggccgcgggacgctcgggaggagcccagacggagtcgagtgtggtgggtgtgtacacgtgagttattaaacaccgactgtatgcagtgaggaggatgccaccaggcactcacagcaccaagtaactggtgcccgaatgggtaaagctcagggcattcctgggggcccactagcgcccctgcaccagccagaggttgaagtgaatagggtaggcagccatggaaggctccctggaggaggcaccctccaaggtgagattgcaaggggagtgagagctaggtacatgtgacttcacagcctgtaatcgccagctctttgggaggccaaagtggaaggatccttgagcccaggagtttgagaccagcctgggcacgttgtgagattcccctctctattaacaaaaacaaaaacaaaaaaaattaaaaattagccaggcatggtggctcatgcctgtagtcagtcctagctacttgggaggctgaggtgggaggatcgcttgagcctaggaggtggaggctgcagtgagctgtgatcacaccactgcactccagcctgggtgacagagcaagaccctgtctcaaaaaaaaagaaagagagagagaaagaaagaaaggaaagaaaggaagagaaaagaaagagagaagaaaaaggaaagaaagagagagagagagaggaggctgggtgcggtggctcatgcctgtaatcccagcactttgggaggccaaggtgggcggatcacttgagttcaggagcttgagaccagcatagctaacagggagaaaccctgtctctattaaaaatacaaaaattagccagtcatgctggcaggtgcctgtaatcccagctactcagggggctgaggccggagaatcgcttgaacccgggaggcagaggttgcagtgagctgagattgcgccactgcactccagcctgagggacaagagtgagactccatctccaaaagaaaaaaagaaaaagagaaagaaaggggagtgggagtggggagggagggaagaagtgttctccatgcaaggacctatctgtgcaaaagcccagagctgggactccatgtccagggcagctctggtccattgctgcccacttctgggcctgcttatccatctggatgggaaacaggctcagagaggggcagagtcaatggaggacaccagcatgtagggaacagtgtcagccccagattcctgcctccagactgtcctaaacaccaccctccccgcgcctttgtcccacactgccacctgccgggaatgacctctcctcctttcactcttccccctggctcctcagctgcagccgctccggcctccttgctgttcctgggatacgccacactcagtctggcctcggggcctttgcactggctgtgtcccctgcctgtgatgccattctcctctgcctggccaactcctacgtttattcaagtctggaccttgtcatcggctcctcaggaaggcactccgggacccccagatgggggcggttccctgtgactcctggcacggaggccaaccccttccttgttcaatggttccttgagggaccattcccatgtgattatcgaccattcggcaggcgttcaaagtcaaaggccccacactgagtcctggcccagcgccctgtgcccgttggctgctggagggacagacggggcgtgcggctgaccatcccgtgcccgcaggctgaggatgcagcgctggaaggcggcggccttggcctcagtgctctgcagctccgtgctgtccatctggatgtgtcgagagggcctgcttctcagccaccgcctcggacctgcgctggtccccctgcaccgcctgcctcgaaccctggacgcccggattgcccgcctggcccagtgtaagctcctcctctgtgtggggtcagatacccccaacgtaaggggtagaatttcaggcagtggagtgggaggtggggggggtgtcataggttttttaaagatagggccagccagcccccttgcagggaggcagggacagacatcctaaaagattattcagggcaaggcatggtggcgcctgcctataatcccagcactttgggaggctgagacaggaggatctcttgagcccaggagttcatgaccagccagggcaatgtagcgagaccgccatctctacaaaaaacttcagaaattagccaggtgtagtggcgcacgcctgtagttccagctacttgggaggctgaggtgggaggatcacttgagcccaagagttcaaggctgcattgagctatgattgcaccactatactccagcctgagcaacagagcaagattctgtctcaaaacattataataataaatacattttctaaaaaaagatggggtggagggaggttgcaaattcccccaatggcctggtggagctagggtgacttctgggaactggggtctttcggctcagctgtcacaaggaattaggctctgccctgaggtcccgtgggggccagatggagattagacctgggcattcgcctggttggcccccgcggcgcagcagggggggcggtgggaggagagagaggctggatctgaggtcccagtgacctgccccaggggacagggaccaaggggaggcgggagatggagcaggagctaaaaaccggaagaaaggcccagagattcgaaggggtgaggaggggtggagagaggagagacggggctgggggcacagacacgggcaaaagtgctgctatagggacacagaaatgcccaccctgagggcaagaccctcgcccaactccccaccaatccctaatgcctgccccaccgcaggtgctgtggggtgagggtggtgcgtgggccctgacccctgtgcccacgcacatgtccatgcgtgcgcctgcgcgggcatctgaggcgtggatgccggcagggtgcgtgtgcagcgcctttgggtgtgggccacgagtacgcccatgtgcgcgtctgcgcccgcccctgccagcccacacaatcctcttttcttgtccttacaatgcacaagggtggcctccagcacgagctccacttctgtcctcccaccacttccctctctgcaagcggcgtgaagtccttcctaggactctgggacagagacccgggcgggacccccaaaatccagtgctccaggacttggggtgcggggggcaaagcacgaatggaggaatttcaggcactgcggagggtcagggcccatgggcgggtgcctgtctgccctactgcaaaaagcgagtggccactgactccccaagtccccatgttctaggctcctggtggaatttcaggctggggaccttgtgttctagcccctgtgcaagcagccagcccccgttgcagggaggcagggacagacatcctaaaagatgattcattgttgccaggtgcggtggctcacgcctgtgatcccagcactttgggaggccgaggtgggcggatcacgaggtcaggagatggagaccattctggctaacactgtgaaaccctgtctctactaaaattacaaaaaaattagccgggcgtggtggcgggcgcctgtagtcccagctactcgggaggctgaggcgggagaatggcgtgaacccgggaggcggagcttgcagtgagccgagatcgcgccactgcactccagcctgggcgacagagcgagactccgtctcaaaaaaaaaa

SEQ ID NO: 1060 - DNA, 294 bp, Homo sapiens
gcgcggtggctcacgcctgtaatcccagcactttgggaggctgaggcgggcggatcacgaggtcaggagatcgagaccatcctggctaacacggtgaaaccccatctctactaaaaatacaaaaaattagccgggcgaggtggcgggtgcctgtagtcccagctactcgggaggctgaggcaggagaatggcgtgaacccgggaagcggagcttgcagtgagccgagattgcgccattgcactccagcctgggtgacagcgagactccgtctcaaaaaaaaaaaaaaaagaagt

SEQ ID NO: 1061 - DNA, 196 bp, Homo sapiens
  misc_feature (106)..(106): n equals a,t,g, or c
tctactaaaaatacaaaaaattagccgggcgtagtggcgggcgcctgtagtcccagctacttgggaggctgaggcaggagaatggcgtgaacccgggaggcggacntgcagtgagccgagatcccgccactgcactccagcctgggcgacagagcgagactccgtctcaaaaaaaaaaaaaaaaaaaaaagaaata

SEQ ID NO: 1062 - DNA, 100 bp, Homo sapiens
ctgaggcaggagaatggcgtgaacccgagaggcggagcttgcagtgagccgagatcgcgccactgcactccagcctgggcgacagagcgagactcccctt

SEQ ID NO: 1063 - DNA, 2364 bp, Homo sapiens
ctcactcctgtaatcccagcactttgggaggccgaggcgggcggatcacgaggtcaggagatcgagaccatcctggctaacacggtgaaaccccgtctctactaaaaatacaaaaaaaaaattagccgggcgtggtagcgggcgcctgtagtcccagctactcgggaggctgaggcaggagaatggcgtgaacctgggaggcggagcttgcagtgagccgagatcgcgccactgcactccagcctgggcgacagagcgagactccgtctcaaaaaaaaaaaaaaaaaaaaaaaagaataaagtataagagaacatgagtgaatgcctgtcatctttttttttttttcttcaaaaacagggtctcactttgtcacccaggctgcagtgcagtggcgcaatcatggctcactgcaacctctagcacctgggctcaagagctcaagaggtcctaccaactcagcctcccaaggagctgggactacaggtgcatgccaccacaccctaaggtaaatttttgtgtttttatagagacaggttttaccatgttgcccaggctgttctgaaactcctgggcttaagggatcgacccacctccatctcccaaggcactgggattataggcatgagccaccgcgcctggcctatcatcatttattcatttattcatctatgcaaaaatattctttgagtgcctaattgctaagcaatgggacaagcactggcaagtcacactggcaaaatatcatcccgccactcaaggagcttataggtcagctggggagacaaagaagaacatgggcccttgtaatgagctaagtatggtgctaggggaaatatccataagttatgggaacccagaggaattcattcatttattcgtttagtaaatatttatgtgccaaactcttgggacccaatggtgacctaagcagacaagacacatccacctacagtgtttacagagtagtgtgggagacagacattaatgaaatgctcttacagacctatcattacctattgtcatatgagttatgaaagaaaaataacaggccgggcatgatggctcacgcctgtaatcccagcactttgggagaccaaggcaggtggatcacttgaggtcaggagttcaagaccagcctggccaacatgatgaaaccccatctctactaaaaatacaaaaaaaaaaaaattatctgggcatggtggcaggcagctgtaatcccagctactcgggaggctgaggcaggaaactcgcttgaacctgggaggcagaggttgcactgagctgagattgcaccactgcactccagcctgggtgacagagcaagactctgtcaaaaaaaaaaaaaaaaaagaaaggaaggaaaggaaggaaggaaggaaggaaggaaatagagtgtaagaggggggcctagtgtagtctaagatgactcaggagaagctgtttgagctgatgcctgaagacgggttgcatgtaagtagttgagtaggtaaaagagaggggtactatcatatcagggattcgggagaaaaaaaaagagagagagagaggggaagagtgctgtggacccattgagctccagcccagctccaactctgtgggtcaggaaagactttccagcatctaagctgagtccagaaggatgagtaggagtgagccagctgaggaggagctggggtggaaggaaagcattccagagcagcagatagcttgtgcaaaggcacacaggcagctgggtgtggtggctcacacctgtaatcccagcactgtgggaggccaagatgggtggaccgtttgagcccaggaattcaagaccaacctggatgacatagtgaaaccctgtctctaccaaaaaaaaaaaaaaaaaaattgaaaaaaaaaaagaagctgggcatggtggcgtgcacctgtggtcccagctacccaggaaactgaggtgggagggaagtcgaggctgtagtgaaccatggtggcaccattgcattccagcccgggtgacagagcaaggccctgtacaaaaaaaaaaaaaaaaaaagcatggaggcaacagaacatagtggattggaaggaaaaacaagtggttcagaccaggtgcagtggctcatgcctgtaatcccagcactttgggaggccgaggcgggcagatcacgaggtcaggagatcaagaccatcctcgctaacacagtgaaaccccgtctctactaaaaatacaaaaaaattagccaggcgtggtggtgcgtgcctgtagtcccagctactcaagaggctgaggcaggagaatggcgtgaacctgggaggcagagcttgcagtgagcggagatcatgccactgcactccagcctgggcgacagagcaagactcca

SEQ ID NO: 1064 - DNA, 5755 bp, Homo sapiens
aagaccatcctggctaacacggtgaaaccctgtctctactaaaaatacaaaaaattagctgggtgtggtggcgggcgcctgtagtcccagctactctggaggctgaggcaggagaatcgcttgaacccaggaggcggaggttgcagtgagccgagatcgcgccactacactcagcctgggcgacagagtgagactccgtctcaaaaaaaaaaaaaaaattacttagacatggtggcacattcctttaatcccagctacttgggaggctgaggcaggagaatcacttgaacccaggaggtggaggttacagtgagccgagatcgcaccactgtgctccacactccagcctgggcaacagagtgaaactctgtctcaaaaaaaaaaaaaaaaaaaaaaaaaaggaataaaggggatgggtttgacatctgacaaaatgctgctgctgccatccgcttctgcaaaacctcaagaatgaaatgtccttcccatggcccacacgaggccctgcacgagctgcttcatccccttccaaacctcctctcctctctcttcccctcctcactctgctcagacacacgggcctcctcactgttcctccaacacgccacgtgtggtctgccccagggccttggcacaggccatgcctctgcctggaacacctgcccccagattctcctatggctgacttctcacacttgggtcttagtgcatgcatcacctcctcagggagggccccctgcccacccccagtgaatctagccccattcaggacagtcatctttattatgcactgattgtatactaagcccagagacttcaactgtggtttctttttcatcctccccaataaatccatccatccatccgttcactcagacatgaaattctggaccctccaattcaggatctgggccacccagtgcctagcttttttttttttttttttttttttttgcgacagagtttcattctgtcacccaggctggagtgcagtggtgcaatctcagctcactgcaacctccgcctcccgggttcaagcgattctcctgcctcagcctcccgagtagctgggattacaggtgtgccaccacgcccggctaatttttgtatttgtagtagagacggggtttcaccatattggccagactggtcttgaacacctgacctcaggtgatctgccctcctcagcctcccaaagtgctgggattactacaggcatgagccactgcacccgtcagcctagcttctttgtgttcattcattcattcattcattcattcatcattcagcaaatgtctatgagcgcctactctgagccactgaaccagctgggctggccctgggggagaatcgacttcccctgcaaattcactctcatcagatccccaggctggtctaggatttgtttagatgccctcacgttggggaactcattccttactaagaataaccaccaccaataccaaacagtctcaagtaccaccaatagtgctgagttctcagggtgactacagcatctgctcccaagcccagcccagcccatatggtgtgtgctgtgtcaaagaacctgggttcaaatcccatgtccttttctaacccttggacaagcccctacccattttgtgcctcggtttccctagctgtaaaatggagatagtagtgcctctcttgtgggctcagcaccaggcctgttacacagctggtgcttaataaatgtgtcctgttacttaaggtctgatatgtgtagctcctgtcgtcgccgtccatgggggtgagtggggtggggaaggggtggtttgagtttctgcacatcaggacacgaggcgcggtccatgcaaatgaaatgcaaatcccatgcaaataaatctctgggtggtgcaaggctggaggtacaaggtgcacgcatttggggggcgcctgggaaccccatgaatcgagcccaggcccggaggtgctgacccgcatccagcccggctttcagtgctcggtgtaaatgtttacacctggccggccgccaggctccacgccgccccacactaggcagccaggagggggaatgtaaactcgggctgggggccgcgggacgctcgggaggagcccagacggagtcgagtgtggtgggtgtgtacacgtgagttattaaacaccgactgtatgcagtgaggaggatgccaccaggcactcacagcaccaagtaactggtgcccgaatgggtaaagctcagggcattcctgggggcccactagcgcccctgcaccagccagaggttgaagtgaatagggtaggcagccatggaaggctccctggaggaggcaccctccaaggtgagattgcaaggggagtgagagctaggtacagtgactcacgcctgtaatcccagctctttgggaggccaaagtggaaggatagcttgagcccaggagtttgagaccagcctgggcaacgttgtgagattcccctctctattaaacaaaaacaaaaacaaaaaaaattaaaaattagccaggcatggtggctcatgcctgtagtcagtcctagctacttgggaggctgaggtgggaggatcgcttgagcctaggaggtggaggctgcagtgagctgtgatcacaccactgcactccagcctgggtgacagagcaagaccctgtctcaaaaaaaaagaaagagagagagaaagaaagaaaggaaagaaaggaagagaaaagaaagagagaagaaaaaggaaagaaagagagagagagagaggaggctgggtgcggtggctcatgcctgtaatcccagcactttgggaggccaaggtgggcggatcacttgagttcaggagcttgagaccagcatagctaacagggagaaaccctgtctctattaaaaatacaaaaattagccagtcatgctggcaggtgcctgtaatcccagctactcagggggctgaggccggagaatcgcttgaacccgggaggcagaggttgcagtgagctgagattgcgccactgcactccagcctgagggacaagagtgagactccatctccaaaagaaaaaaagaaaaagagaaagaaaggggagtgggagtggggagggagggaagaagtgttctccatgcaaggacctatctgtgcaaaagcccagagctgggactccatgtccagggcagctctggtccattgctgcccacttctgggcctgcttatccatctggatgggaaacaggctcagagaggggcagagtcaatggaggacaccagcatgtagggaacagtgtcagccccagattcctgcctccagactgtcctaaacaccaccctccccgcgcctttgtcccacactgccacctgccgggaatgacctctcctcctttcactcttccccctggctcctcagctgcagccgctccggcctccttgctgttcctgggatacgccacactcagtctggcctcggggcctttgcactggctgtgtcccctgcctgtgatgccattctcctctgcctggccaactcctacgtttattcaagtctggaccttgtcatcggctcctcaggaaggcactccgggacccccagatgggggcggttccctgtgactcctggcacggaggccaaccccttccttgttcaatggttccttgagggaccattcccatgtgattatcgaccattcggcaggcgttcaaagtcaaaggccccacactgagtcctggcccagcgccctgtgcccgttggctgctggagggacagacggggcgtgcggctgaccatcccgtgcccgcaggctgaggatgcagcgctggaaggcggcggccttggcctcagtgctctgcagctccgtgctgtccatctggatgtgtcgagagggcctgcttctcagccaccgcctcggacctgcgctggtccccctgcaccgcctgcctcgaaccctggacgcccggattgcccgcctggcccagtgtaagctcctcctctgtgtggggtcagatacccccaacgtaaggggtagaatttcaggcagtggagtgggaggtggggggggtgtcataggttttttaaagatagggccagccagcccccttgcagggaggcagggacagacatcctaaaagattattcagggcaaggcatggtggcgcctgcctataatcccagcactttgggaggctgagacaggaggatctcttgagcccaggagttcatgaccagccagggcaatgtagcgagaccgccatctctacaaaaaacttcagaaattagccaggtgtagtggcgcacgcctgtagttccagctacttgggaggctgaggtgggaggatcacttgagcccaagagttcaaggctgcattgagctatgattgcaccactatactccagcctgagcaacagagcaagattctgtctcaaaacattataataataaatacattttctaaaaaaagatggggtggagggaggttgcaaattcccccaatggcctggtggagctagggtgacttctgggaactggggtctttcggctcagctgtcacaaggaattaggctctgccctgaggtcccgtgggggccagatggagattagacctgggcattcgcctggttggcccccgcggcgcagcagggggggcggtgggaggagagagaggctggatctgaggtcccagtgacctgccccaggggacagggaccaaggggaggcgggagatggagcaggagctaaaaaccggaagaaaggcccagagattcgaaggggtgaggaggggtggagagaggagagacggggctgggggcacagacacgggcaaaagtgctgctatagggacacagaaatgcccaccctgagggcaagaccctcgcccaactccccaccaatccctaatgcctgccccaccgcaggtgctgtggggtgagggtggtgcgtgggccctgacccctgtgcccacgcacatgtccatgcgtgcgcctgcgcgggcatctgaggcgtggatgccggcagggtgcgtgtgcagcgcctttgggtgtgggccacgagtacgcccatgtgcgcgtctgcgcccgcccctgccagcccacacaatcctcttttcttgtccttacaatgcacaagggtggcctccagcacgagctccacttctgtcctcccaccacttccctctctgcaagcggcgtgaagtccttcctaggactctgggacagagacccgggcgggacccccaaaatccagtgctccaggacttggggtgcggggggcaaagcacgaatggaggaatttcaggcactgcggagggtcagggcccatgggcgggtgcctgtctgccctactgcaaaaagcgagtggccactgactccccaagtccccatgttctaggctcctggtggaatttcaggctggggaccttgtgttctagcccctgtgcaagcagccagccccgttgcagggaggcagggacagacatcctaaaagatgattcattgttgccaggtgcggtggctcacgcctgtgatcccagcactttgggaggccgaggtgggcggatcacgaggtcaggagatggagaccattctggctaacactgtgaaaccctgtctctactaaaattacaaaaaaattagccgggcgtggtggcgggcgcctgtagtcccagctactcgggaggctgaggcgggagaatggcgtgaacccgggaggcggagcttgcagtgagccgagatcgcgccactgcactccagcctgggcgacagagcgagactccgtctcaaaaaaaaaa

SEQ ID NO: 1065 - DNA, 183 bp, Homo sapiens
gaaaaatttagccgggcgtggtggcgggcgcatgtagtcccggctactcgggaggctgaggcaggagaatggcgtgaacccgggaggcggagcttgcagtgagccgagatggcgccactgcactccagcctgggcgacagagcgagactccgtctcaaaaaaaaaaaaaaaaataataatgaa

SEQ ID NO: 1066 - DNA, 292 bp, Homo sapiens
tggctcaagcctgtaatcccagcactttgggaggtcgaggcgggcggatcacgaggtcaggagatcgagaccatcctggctaacacggtgaaaccttgtctctactaaaaatacaaaaattagccgggcatagtggcgggcgcctgtagtcctagctactcgggaggctgaggcaggagaatggcgtgaacccgggaggtggagcttgcagtgagctgagattgcgccactgcactccagcctgggtgacagagtgagactccgtctcaaaaaaaaaaaaaaaattaaaaaa

SEQ ID NO: 1067 - DNA, 181 bp, Homo sapiens
caaaagttagccgggcgtagtggcgggcgcctgtggtcccagctactcgggaggctgaggcaggagaatggcgtgaacccgggaggcggagcttgcagtgagccgagatcgcgccactgcactccagcctgggtgacagagcgagactccgtctcaaaaaaaaaaaaaaaaaaaaaagatt

SEQ ID NO: 1068 - DNA, 123 bp, Homo sapiens
aggcaggagaatggcgtgaacccgggaggcggagcttgcagtgagccgagatcccgccactgcactccagcctgggcgacagagcgagctccgtctcaaaaaaaaaaaaaaaaaatgctgtta

SEQ ID NO: 1069 - DNA, 270 bp, Homo sapiens
tgggaggccgaggcaggtggatcacgaggtcaggagatcgagaccatcctggctaacacggtgaaaccccgtctctactaaaaatacaaaaaattagccgggcgtggtggcgggcgcctgtagtcccagctactcgggagactgaggcaggagaatggcgtgaacccgggaggcggagcttgcagtgagccgagatcgcgcccctgcactccagcctgggcgacagagcgagactccgcctcgaaaaaacaaaaacaaaaacacaaagtc

SEQ ID NO: 1070 - DNA, 303 bp, Homo sapiens
ggttgggggctgcggccttgcgggctgcgcgagctggaggtgcgcgtgagcgagctgggcctgggctacgcgtccgacgagacggtgctgttccgctactgcgcaggcgcctgcgaggctgccgcgcgcgtctacgacctcgggctgcgacgactgcgccagcggcggcgcctgcggcgggagcgggtgcgcgcgcagccctgctgccgcccgacggcctacgaggacgaggtgtccttcctggacgcgcacagccgctaccacacggtgcacgagctgtcggcgcgcgagtgcgcctgcgtg

SEQ ID NO: 1071 - DNA, 15689 bp, Homo sapiens
agagcccagagagctgaacctgcatcccggacctgcggcgaccgtcgtacaccatgggcctccacctccgcccctaccgtgtggggctgctcccggatggcctcctgttcctcttgctgctgctaatgctgctcgcggacccagcgctcccggccggacgtcaccccccagtggtgctgggtgaggcacgggtctcgtggtggatctgtcggtcgggcgggacgggccgcgggcggggctgccttcccggtctgcttctgttccagtcacgaaatgggggagcgtattggtatctgtcttgtcacttaggtgatctagatctgccggctcacctcccgccatgctgggcgcgggtgtggtcagctccccacctcctgtcctggtagaaaatgggggtgagtgggagagttaccatctggttattcatagttccacctgtccgcatcattcccaagccttgcctccccttatcccatttttaagctggaaagacaggtgcttcagccccactcctgagggatggtgggggtgtgtagagtggctcctgagttgacttctgcatcgacctgggcctggttaggaggctgtcaccctcgacccctccaatgccacatatgccagaaggcattgctgaaaggaacctccttagggaaaggattgctgtcctagctggccaccaactcccacaacttatcagatgtgtggcattgcctgagggaaaaggcctaagggaaactgaagacaactgaagtcaggggaaagggttgggacaatggccatgaacctgtgtcaggcaacatgcttgtactcttaccctgccacacatgcttggactagactatgtggaggctcggtgacctcccctgctcaccccgctccttgatcacaaccctggcaactctacaacggccactgtatttccttgcagggatgggcagggatgagacctctgtctggggggccttgggtgcctcattgaggccgtcactcccatccagagctggtgtgtccgtggccagccaggattcctgaaagcagaggcatctgaggcatgaattacacgtggagtctagtgcagcatgatctccatgctctttctgctgagagtactttaaatggggacgatgcaaatcacagaagggtagagttggcaggtagggtggtgccaggcaggccccaccaggagttcccagccaggaaaagctccagggggatactaggcccaggttcaccatgggatttgggcagacttggccctgcctccccaaagcttgcaggataggaataacagtgatccccagagaggaagtctgtgtggggcaagcacagagaatccaccaacccagcctggatgggtgggtgtcaagtaaggcttcctggagtatatagctggagctaaggccaggagagagtaatgggtcggggagagacgtgagcatctcaggctgcctgggatcgagtcacaggaggagtggactgcacaggacttgtgactggttgggtcatctgaactttatcttgagggcctcagggagtcctgggttggcctgcagagttctaagtctgaggggcgtggcattaggaagcatgtggtctgtggcacacaaaatggcacatagccattttgcctggattgatgctaaccgcactcatcaattcagtcagtctgtttatccttggtcacagcagaagagcctcagaccccacccagaatcacagagcagcaggagtcctaacatgcccagcttctcagggagtgaggctgctggccttagccctgggagacctcacggtgggcagttggataagcagctcctgggcacagagcagggatctgaccttgactgtcagaagatcagaatcctctaggggtggatcctgaaatggtggtggaggaaagagagaccagcgatgtgatacagaagaccctgggcaaggggaagggaccataggcaaggccatttccacctcttgcagcctcagtctccccatctgttaagtggaaatagtaaggctgtcccctcccagtgttacttgaggtgaaaggcatgtggatggctcttttcctagttccaggcgcagatgggctcaggaagtggccactgctatttttaggggccacacagcctgaccagggtaaggagcatctgagcaaagcagatctggtgacttcctcttttaccatttcccctttggtagagacagtgaccagggtctctgccctgccctgcccagtccacaggcatgtcatccagaggctgtcatgacagggactccctccctctgcacccataccatgaagggaggtgaaggcatgtgccgcccctgcctctcatggcaccctgaagacactgggatggtgcccagggagggcacgccctgttcagggtggatttacggtcagttcccagtgaatgtccaggagagccaagtgctggtttttcactcaatgatcatggaccctaaacggggatgtgtttgggaagtggcgagagcatggcatgtgggggcaggtgaggcccgaaaggtcaatgggagtaacgagactgtgaagggctttgacgcagtggggagggatttgggtgtcaccagggccccagagttctgagtacactgaataggatggctgggatggagagaagtcaccctagggcctggactgtggtgataatggtgctggttcagggtggctgtttccaatacgggctcccagccatgctagggccctccagatgatctgctctctggcaccttactggactctggcctttagtaaggcctgggcccttggtaggctggcgggtgccaatgtaagcttctctcagctgtgtttctgttcatttccctcccaccagcctgtcctgcatactttgtctggttgaattttagctgagtggcccagggctctgttctgtttccttcttcctctctcagggcgaacaggaccctgtcttctatgtagcctgggatagctatgggtggaagacttttgggttcaagcctccagggtatatatctttttttttttttgagaccgggtcttgctctgtcacccaggctggagggcaatggcacgattttggctcactgcaacctctgcctcccgggttcaagcaattctcctgtcttaggctcctgagtagctgggattacaggtgtgtgccaccacaccaaggtaattttttgtatttttagtagagatgggctttcaccatattggccaagctggtcttgaactcctgaccgcaagtgatccactcacctcggcctcccaaagtgctgggattacaggcatgagcccctgcgccctgcctcgaaggtatatatctaatgacaagggccttggccaaactttggaggttctggaatgcaaaggggtctccaagcccctcctcccaggcagagctcccatcggggtccattaaccatagaaaccatgtgtagaggtgtgtctgtgtttgctgggggtgattcagaccaagatctcatttaacagatacggaaactgaggcctagtgtggggagtgacttcaccctgaacccccttccaataatctgaatggcccaggaggatgttccagtgaaaatccaggagacttactttatctggagttggagacaatgttagggcccttccccaaacatgtcaggcctctcccaagccccccacaggcatctctgcaccacacagcagtagcagcttttctgcacaaagatggttccctggcctttgggtcaaggtccctgctctctgaatttcctgccaccagcactgtgctttaatttgagatgtggaactgcacaggtctgccatattatctgtggctcttcagggggtctgctgcagacatcaaagttcttgggagtcttgaacctgccgggctgagggctcacacatgtcctgtgccccctgcagtccctggtgatttgggtaaccaactggaagccaagctggacaagccgacagtggtgcactacctctgctccaagaagaccgaaagctacttcacaatctggctgaacctggaactgctgctgcctgtcatcattgactgctggattgacaatatcaggtgggggctggggcacacagaggggggtgctgctcaccaacagtgcctgagaggcctccagagtctgttccttctatcctcatctcgaggtcactgacctctctccttccccaggtcctcggtctggtctggtctggtctggttggcaccacctctgcactcccaggcagaactaactttcccttcctgctgcccttgttcctctactctccagtcctggcctctcatgcctacacacaattttttttttcttttattttgggatggagtcttgctgtgtcactcaggctggcgccatctcagctcactgcaacctccgtctcccaggttcaagcgattcttgtgcctcagcctcccaagtagctgggattacaggtgcccgccaccatgcctggctaattttttgtatttttagtggagatggtgtttcaccatgttggccatgctggtcttgaactcctgagctcaagtgttctgcccaccttggactcccaaagtgctgggattacaggcatgagccactacgcctgcctacacaaaatttctgtgtcccagcccctattcagagcctcggcatggcccccacccctttccttgtctgtgcctcggcctcccctacctctccagctgcttattcttcttgggacatgccatgtctttgtacctgctgttcttttggcctggaatctatttctacaccctttgcctgataaatggcttccattcacttttttttttttttttttttttggagacggagttttgctcttattgcccaggctggagtgcaatggcgcgatctcggctcacaactcttttttttttttttaacttttattttttgagacagagtcttgctctgtcgcccaggctgggtgcagtggcgctatctcggctcactgcaagctccgcctcccgggttcacgccattcttctgcctcagcctcccaagtagctgggaccacaggcgcccgccacagtgcccggctaattttttgtattttttagtagagacagggtttcaccgtgttaaccaggatggtctccatctactgaccttgtgatccgcctgcctcagcctcccaaagtgctgggattacaggcgtgagccaccacacccagccccattcactctttaaaacatgaccctaggccaggcatggtggctctgctataatcccatcactttgggaggctgaggcagtcagatcacctgagctcaggagttgaagaccagcctgggcaacttggtgaaaccccatctctaccaaaaatacaaaaaaattagctgggcatggtggcatgcacctgtagtcccagctacttagggggctgaggcaggagaattgcttgagccagggaagcagaggttgcagtgagcagaccactgtacccagcctgggttgcagagcaagaccctgtctcaaaacaacaaaaacctgaccctggtccctttgtgacatgtcccttttgactccccagagcggtttgcctctcctcccaggccccatgcttgcttcctctaaacatcatcatgtgcccgaatttgtctgcaggcatgtttgcccaaattgcacaggcactgtacattttatatactttctttcagttagtcttacagcaaccccgttttgaaataggtgctgttttctttttttttttttcaccagtgttacttgccaacaggtggtttttaaacctgctttacaactgcgaaatctggaggctcaatgaggttacaaaattgactgtgctcactcagctaataagtggtagaatcagaattcaaatccagaatgtgtggcgttgagctgaggttccctcccaggctgagttccgtgaagggagggagtgtgtgtctgttttatccttatagcagtagaaccagaaacacagttggcgcctgataaatgtttgagctgaatggagtctcccaaattaaaagtttttcctggtcgggtgcggtggctcatgcctgtaatcccagcactttgggaggctgaggtggacagatcatgaggtcaggagttcgagactagcccggccaacacagtgaaaccctgtctctactaaaaatgcaaaaattaaggccgggcatggtggctcacgcctgtaatcccagctagtcaggagtctgaggcaggagaaacgcttgaacctgggtggtggaagttgcagtgagctgagatcgtgccattgtactccagcccaggtgacagtacaagactccatctcaaaaaaaagaaaatacaaaaatacaaaaatgagccgggcgtggtggcacacgcccatgatcccagctactcgggaggctgagacaggagaatcacttgaacctgggaggcagaggttgcagtgagcagagatgggggcactgcactctagcctgggtgacagagcgagactgtctcaaaaaaaaaaaaaaaaaaaagtttttcccagagacccgctagctgctcctccaggtgccctggcctgccggctgtttgtgatgcccattttgatgactccttcctcctctgtgtgttgtgtgactggggttatttctgggctgttgatgtgcatttctatttttatactggggacacagcctcaggtgctgccagttggaggtgccagctgataccaagaggggcctgtctgccttcactgcttctctgacccgtttagattttcacccagcgcagaactgctttggctttccagaacagttttctgcattttgctgtttgataatttatttttagtagcaacaagctactttgctatgtggtcattgggataatctacaaattgccctggagagaatgggcctccaggacctgttatctgggtcagttgtggggatcctgtcagcttcagtggctgatatctaagtgggcaagtgggactcaggaccaccagaaactccaggttcctgtgttttgggggcacatttgcttcttcagtgtgtggcgaggccagagcaaggttcccagcctcgcacagaggcacaaggcttttctcctggtataaggtgtctcccctggcccatcaccctgttcccatcatttcttcaggccttgacaaccctcttcccacaggagatggtgcagcagctgtgtactgagccctgaggcggggtctgtcctgtctggttctgtttggcactgcagctacagaaactatgagatcacgtgtgtggtgttagaagctgctgagtctgtggtaatttattacacagttctagaaaactaataggctgggtgcagtggctcacacctataatcccagcactttgggaggctaaggcaggaggatcgcttgagcccaggagtttgagaccagcatgagcacatagtgtggccctgtccctacaaaataaataaacaaataaataaataaattagccagacctggtggtgcctgcctagctgttcaggagggtgaggtaagaggatcacttgagcccaggaggttatggctacagtgagctatgatctcctcactgtgctgcagcctgggcaacagagtgagaccctgtctcaaaaaagaagaagaaagaaaagtaagaaagggctgttagggatcttaagtcagtagctggtggtccatgtcctatgtcatggcgcttaggaatttgctgggcaagccctgagccttgtggctgcagtctgacagttgatacagccctggggtactgggaggtcataggagcatggttcattcccttcctccatggaggatgtgtttggaggttggctggctgctgtgtccaatgcgcagaggaagcgggacccaattatacctacctggggccacacaaggccttcctcctgtctctccccaccagctcccatcatttctctgggccttgctccttctcctacctgcctacccacccatacagcagccctgaggcatggtgcctttctagggtttgtttttgtttgtttgtttgtttttttgagacagagtttcgctcttattgcccaggctggagtgcagtggcgcaatctcggctcactacacctctgcctcccaggctcaagcacttctcctgcctcagactccggataactgggattacaggtacacgtcaccatgcctggttaatttttgtgtttttagtagagatggggtttcaccctgttggccaggctggtctcgaactcctaacctcaagtgatccacgtgcctcagccttccaaagtgctgagattataggcgtgagcccctgtgcctggcctagtgtgttttgttttgttttttttttttttttgagacagggtcttactttgctgcccaggctggtgtgcagtggcatgatcacggctcactgcagcctcaatatcccaggtgcaagtcatcctcctgcctcagccttccaagtagctgggaccacaggcctgcaccaccatgcctggctaattttttatttttagtagcaacaaggcctcactgtattgcccaggctggccttgaactcctggcctcaagcattcctcccaccttggccttgcaaattgttggaactacaggtgtcagccactgcacccggcccctgtctggttctgttgtgtactgcactcaccacctccttcacctgggatacgttgggctggcaggagctggatgcaaggagatggagcgatggaaagctgaaagagggtagactgcctcttggggtccagtgtgaagttcacggcagaatcaggactggtacttccttctcccaaccaggtccaagaccctcattctagagtagggtcacgggggagaggggaatgttgctttgacaggggtcctggggtcagtatttggagtaagtatgccttggtggggtcctcatttggatgtaattactctgatctgtgctttttatttttatttatttatttatttatttatttatttatttatttatttttttgagacagagtcttgctctgtcgcccaggctggagtgcagtggtgtgatctcagctcactacaacctccgtgtcacaggttcaagcgattctcctgcctcagcctcctgagtagctgggattacagtcgcctcccacgacacccggctgattttgtatctttagtagagatggggtttcgccatgtttgtcaggctggtctcaaactcctcactcaggtgacctgccagcctcagcctcccaaagtgctgggattaacaggcgtgagccactgcacctgggcaatttttgtatttttagtagagacagggtttcaccatattggccaggctggtttcaaactcctgacctcaagtgatcctcccacctcagcctccctaagtgctgggattacaggtgatctgtgctttatcaacctgctttgttacttttcggtctctcctatccatctgaccaaacctgggcatgagaagggagtatgactcaggacatgatgcactgttgggacacaccaagctcagtgtcccctccgggtcactggctcaatatcctctcacaacaggctggtttacaacaaaacatccagggccacccagtttcctgatggtgtggatgtacgtgtccctggctttgggaagaccttctcactggagttcctggaccccagcaaaagcagcgtgggtatgtagcccttactcaaggcctccgggagctgggatggggtttctgccggactggagctggagctggaggaactctgctggtttgtagggacagcctgtgagctgtctctgatcagcgtgggcacagagccctgtagcattcttccaaggacctgctagctgtcacagtctccatgctgggcatagtgtaggtggccggcactagctgtatcttttcttatcctctgtatttctgtctacaggttcctatttccacaccatggtggagagccttgtgggctggggctacacacggggtgaggatgtccgaggggctccctatgactggcgccgagccccaagtaagcaggcactctcattccctccctgacgtctcgggaggtaggggtgaggtgatcatgggcaccacagaccttgggctctccccttgtccttggctgtctcctgtccctgggcctctggcatccagtctagtggtcacagccaccacctttggtcagtcttatcctgtcctccatttcccaccctgggacctctgggcctgtgagccctggggagaaatataaggcttcctcccttcatggaaggcggggggacccagaccgctctgtttgaatgtgagcaccctcccctccccctctcgtcttgtgtctggcctgagaaaagctcagtggttccggctccaggacccttcccacctgacccctgcctggctctggcctgcagatgaaaacgggccctacttcctggccctccgcgagatgatcgaggagatgtaccagctgtatgggggccccgtggtgctggttgcccacagtatgggcaacatgtacacgctctactttctgcagcggcagccgcaggcctggaaggacaagtatatccgggccttcgtgtcactgggtgcgccctgggggggcgtggccaagaccctgcgcgtcctggcttcaggtaagaccctacctggcccagcgtggggggctgttgccaggaattctgccctctcttcccttcctaagtgtcctcctgggccagcatgcctcgtgtctgtcccacggtgtgtggggtctatgcaaatctacccctaaaagtccaaagaagaaagaggctgacaaatctagtttctcagagaaaagcatttaatagggacatacgaatagaagccacatctgtgtctcaggtgggggcaagacaagatggtggatccccacactattagcccccagacccagagcttatattctgtagggaaagggcgactccgatgcgatgtgttgaacattgaaggatgataacacagaggctgttttgatttatggttaagtacgtgcacaagaaacagtagataaagtggaaatctcagtggccttcctggatctggggttaatcagaagccaacatggtggattagtatccaaaatggagttgctttggtctccacaatgactattctcttgggtcagccctgttttttttttaatttttattttttgagacagagtctggttctgtcacccagactggaatgcagtggtgcaatcttgtctcactgcaacctctgcctcccgggttcaagcgattctgcctcagcctcctgagtagctgggattacaggtgcccgccaccatgcctggctaagttttgtgttttagtagagatgaggtttcatcatgttggccaggctggtcttgaactcctgacctcagatgttccactcgcttcggcctcccaaagtgctgggattacaagtgtgagccactgtgcctggccatccctccctcttaccccatccttacttcttcatccccaccttcaccgcagaggaggaaggctagagcattttttttttttttttggaggcagggtctttctcactctgccatccaggttggagtgcagtagcgtgattttggttcatgcaacctccaccttccaggttcaagtgattctcctgcctcagcctcccgggtaactgggactacaggcgcgtaccaccacacccggctaatttttgtatttttagtagagactgggtttcactatgttggccgggctagtctctaactcctgacctcaagtcaggaggatctgcctgcctcagcctcccaaagtgctgggattacaagcatgaaccaccgcacccggccagatttttttgtatttttagtagagatggggtttcaccattttggtcaggctggtcttgaactcctgacctcaaatgatctgcccaccttgacctcccaaagttctgggattacaaggatgagccactgcacctggcctctagactacagttttttatttatgagttgcgcctccatctgtgggcagcacggagcctctgtaggcaacacagggaggaagcaggtgcagatctggctgggcctgcttgcctggcaattgggaaagccaccccttttatggctcctcccccgtcttttcatgactgttgcagctcaccagctgcagctgtagagtagagcttcttcctctagaagggagctttcctccctctgctaggacttgggggaggcttatggaccctcactttgggagctatgagccagggctgtgccaagcatctcatgagctcaagtgcctgccactgcttgacctgcttggtctactggcattgtgattgggtcaggcccagtgactctgagttggctggaagacactcagatttagtgaggactcattatagccaccacttcggtctagcctgggcctggagggacggatgtgggcataccctgagtttagacaggtagccccggcccctttcagagtttctctgtgagtccccttagagctttgtttcaaaggctgggaagctgttctgtcctgccttggcagtccaggactgggtgtgtggtgcggggaggtggaagtccgtgcacccctaggggctttccttgcctcaggggtcccccagccaggccacagcaggcagagctgaggccctacagtcagtctgagaggcctccctgctttcagatacagggtggggtgatgggtgaccatggatcctgaacaggccagaggcccctgttcccaagttgcagcttttacttcctggaggcctccctgactgccgggtgtttgtgttgttcacattcctgtgtatagggactccgcctccatctgcagcctcccctcgtgccctgtctccagcacgcctggctgcccaggtcagcgcacatgcaagtgggtggaatgaggccacggctggctgaacgctggtctgagcttaggaaaagaaaaactggtacacagttcagtgtcataaaagggaaagcagaacatgtcatctccgagttgccaacctgctgactcactttagactaggtcagtgcccacaggcctgatcagcacttggaggatggtagagtttacaggcaaggaagcatcataaatcaccctgtgggtatgtgccgccttactccctggtgaggaaagcaaaaaaaacaaaacatagcttggatgtgtggttcccagatgtagcaaaaataaagagaaacaataaaagccaaggcaagcaaactgggcaacatagcaagaccccatctgtataaaaagtggaaacatttttagcccaggcgtggtgggacgtgcttgtagttccagctatgcaggaggctgacataggaggatcacttgaacccaggaggtggaggttgtagtgagccaagactgtaccactgcactccagcctgggtgacagaatgagaccctacttcaaaaaaaaaaaaaaggaaaaatttgccaggcatgaggcatggtggcgcatacctgtagtcccagctactccaaaggctgaggcgggaggattggttgagcctgagaggttgaggctgctgtgagccgtgatcatgccattatactccagcctgggcaacagagtgagaccctgtctcaaaaagaaaaaaaaagagccaaggcagggatgggagtcacagtgattacaatgatgataaccgggtagagatgcgggactgtggactgggcccctggctggggtctggcaggggcctggtggtgaacatgctgcccaaccagctggcattcctaagcacagactgaccagagccttctccctgcaggagacaacaaccggatcccagtcatcgggcccctgaagatccgggagcagcagcggtcagctgtctccaccagctggctgctgccctacaactacacatggtcacctgagaaggtgttcgtgcagacacccacaatcaactacacactgcgggactaccgcaagttcttccaggacatcggctttgaagatggctggctcatgcggcaggacacagaagggctggtggaagccacgatgccacctggcgtgcagctgcactgcctctatggtactggcgtccccacaccagactccttctactatgagagcttccctgaccgtgaccctaaaatctgctttggtgacggcgatggtactgtgaacttgaagagtgccctgcagtgccaggcctggcagagccgccaggagcaccaagtgttgctgcaggagctgccaggcagcgagcacatcgagatgctggccaacgccaccaccctggcctatctgaaacgtgtgctccttgggccctgactcctgtgccacaggactcctgtggctcggccgtggacctgctgttggcctctggggctgtcatggcccacgcgttttgcaaagtttgtgactcaccattcaaggccccgagtcttggactgtgaagcatctgccatggggaagtgctgtttgttatcctttctctgtggcagtgaagaaggaagaaatgagagtctagactcaagggacactggatggcaagaatgctgctgatggtggaactgctgtgaccttaggactggctccacagggtggactggctgggccctggtcccagtccctgcctggggccatgtgtcccccctattcctgtgggcttttcatacttgcctactgggccctggccccgcagccttcctatgagggatgttactgggctgtggtcctgtacccagaggtcccagggatcggctcctggcccctcgggtgacccttcccacacaccagccacagataggcctgccactggtcatgggtagctagagctgctggcttccctgtggcttagctggtggccagcctgactggcttcctgggcgagcctagtagctcctgcaggcaggggcagtttgttgcgttcttcgtggttcccaggccctgggacatctcactccactcctacctcccttaccaccaggagcattcaagctctggattgggcagcagatgtgcccccagtcccgcaggctgtgttccaggggccctgatttcctcggatgtgctattggccccaggactgaagctgcctcccttcaccctgggactgtggttccaaggatgagagcaggggttggagccatggccttctgggaacctatggagaaagggaatccaaggaagcagccaaggctgctcgcagcttccctgagctgcacctcttgctaaccccaccatcacactgccaccctgccctagggtctcactagtaccaagtgggtcagcacagggctgaggatggggctcctatccaccctggccagcacccagcttagtgctgggactagcccagaaacttgaatgggaccctgagagagccaggggtcccctgaggcccccctaggggctttctgtctgccccagggtgctccatggatctccctgtggcagcaggcatggagagtcagggctgccttcatggcagtaggctctaagtgggtgactggccacaggccgagaaaagggtacagcctctaggtggggttcccaaagacgccttcacgctggactgagctgctctcccacagggtttctgtgcagctggattttctctgttgcatacatgcctggcatctgtctccccttgttcctgagtggccccacatggggctctgagcaggctgtatctggattctggcaataaaagtactctggatgctgtaaggtg

SEQ ID NO: 1072 - DNA, 384 bp, Homo sapiens
tatggtgctggcatataaccagctgtcaggtctttgcccactctgttcgcccctgcttcctggcgcagggagtccatgtcctctctggttccccaggtttgcgagagtggagggggaccacgagctcccgatgcctctcctgctctgcaggggaacttgcagatggcccatggcgcagggtcgagactcaagcccactcccaaccccgcgcccgaactgcccggactggcggggtgacgctgcactctgcgcccctaaaacgaacagattaacccctctcttgggaactgaacatgctgacctggcctctcccggttccccccgcatctgtaaccccggggcagagttacaggggctgactggccgcacccaggtgccctcggg

SEQ ID NO: 1073 - DNA, 3871 bp, Homo sapiens
gaggcaggaccttgtcctattcattaatcttgcccctcaacagttattttcagaggggcaagaagtgtttcagggttcttggcccttgtttgaccagtcgtcctaaccctcatgtcttgggtcattgttgttataatctggggttaccttttggaaggtcatggggtacccttttgcaaaagttatgggccctctccttggaaactgcacacacaccatgcagcttacaattcagggagttcacaggtctacagaatcctggaaactctcatgtccggttctactcattgtagcttcagtggaaccttctagcagtcctttccagctcctccccagctcctcagctctgcttccctccgcccatcaagccctcctcagcccataaggtgggccaggtggcctgtggggataaatcagagtgcccacaagtgcaggggcccaaagacatcccagagcaaacccaagaatccctctacaagccccagcccactcagaaggatgcattttgccccctctgtttatttgtttgtttttaattatgaaagtagggcatggtcattgttgaaaatgtgagaaatgcagagaagttaaaatgatgctttttgtttagggcgctgctgcttctggcttaagatcctaaatcaaagcagctgccagatctggacctaagacttgcttcccatcaccttacataaaagaaagagcactggactaggaatcaaagatctgaattcccatcaaatctctgctattactagcttttatctctatttatttatttatctgtctatctatctagtaccttttgtgaatatgagtgtttctcaccgaggccctcccatctctcttgcccccgatcctggaatggaccaaataccttgtttactgaaggatacagatggcatgtgactgttgagaatcactcaccctcttagagccatggtttcctcttctataaaatagggatgttcgtgcctatttgctaatcatgagtgacaatgacataaggtacataaagctgtactgcatgatgcaaacataacatcatatttgtagggttgttgctaataatactatccatcagcaaagcagtcattcatttactcagtcaaatactgatgcactggtacattcagtttcctcttttgtaaaatggggataaaaataggacttagctcatagggtatttaagattcagtgagttaatatatataaaatacttagagcagtccttggaacatattaagaactcaatacatattagctagttgagcaggctgtagtatttgttccagccaagaaaagactgttctctaacagcacaggaaataaagatggggttaggcacgacacggcagcaggacttaccttctgtctaattcagctggcagtcaaagaaagaattattagaagcctatgagcttgttctcccaaagatctactgagtacagggggatatttaaagaataaaaatccctagacccacttacagtacaggagagacaagaagctgttcacacaataacaagtgctaaattccttgatttttatactgacagctgaagttttagagaagagaaggatcaataaagaccggaatattaaagcagacaggcctaaaagaggattttagatttgataaagaattcctccagttctcagagcagggactttggagggtaacaacttggatttcagtccttgcctgccacttactgattgtatgaccttggaaaagttacttcacttctgtgagcaatgattctctcatctggaaaacaaaacaaaacaaaaaaactaacaagggtgataataatacctacctccctacctcatagggctgatgagaagattaaaaagtacctacataaagcccttctctgcgtgcctggagcatggcaagggctccatgtgaaccactattttttttttttttttttaatgaaaagtcatgggcagcaccaaagctcagaattttggcagtaaggaattatgattctacattgaaatttgccagaaggggagctgactgcctcatgagacatttttgaatgaggccaaaaaaggaaacaagtgtatcctgggattttacgagatgctaggtatgtccttagcacttaatcctcatgactaccctatgatgtaagtactatctgttgtccctattttacagttggccaaggtcacatagctgaaacggacttctgtgtgtcttctaacttttgctttcaggtctggaaaaatgcaatgtaaacctagaccctctttgaaatactgaagatggtaatcttatcccttcctcactttctgttttctaaaataacagtccttgttccttacaatgtctgttttccagattcttagaagactttttgcttattttccataactctttacttgtgatccctgaatgacaccgggggtatagcagagaatgtccatttcctcaaagttcaaaggtcctacaaaaaatagttgctagcctggcatgatggtgtgtgcctgtagcctcagctacctgggaggctgaggcaagaggattgcttgagctgaggagtttgaggctgcagcgagccatgatcacgccactgctctccagcctggatgacaaagcaagatcacatcttaaaataaaataaaataaattttaaaaatatataaaaaataaaaagtggtgccactaagtgtcctggacagcattagagaaagcaagagatagaagagtgcaaacacctgaaaggaaagagatgcgggtcttccctctcccttgagtagccaccggctatccctggagcataggagtaggattttatcccccagcttcggcctccccaggcagcacttcctttctgtgctttgactccaatttggatggtgctcaggcgggaagtaggctggggtgggaggagtttaggggaatatttgtcttctctcctgttttgccctagagattctggccaggaagacaaatggctagtaccacttggtccttttcttttcttcttttgagacagggtcttgttctgttgcccaggctggagtgcagtggcgtgatcgcggctcaccgcagcctcccaggctcaagcattcctctcacctcagcctcctgagtagctgggaccacagctccactaattttgaagtttttttggtagacatgaagtctccctgtgttgcccgggctggtctcaaactcctgacctcaagcagtcctcctgtcttggcctctggaaatgctgggattacaggcgtgagccactgtgctggcctcttttttctttttctttttttttaaggtttttatttgttaaatgggaagtctgtgccatcaactgagcattgtattttctccttagtaagagcctgggtgggccactgggagagaactatacattaaatgtaagtagcctctgggtagagagcccctggctggtttcctttcctttctctccttttctctactttggtgtctggaggcatttcccagactccagtttcttaccaccctcacggattttgctattgtattatcacctcctttatcattcccaaaattgactttatggagactcattaaaagaaaaaatcatcggccgggagcggtggctcacgccacgaaggcgggcgaatcacctgaggtgcggagttcgtgaccagcctgaccaaaacagagaaaccccatctctactaaacaatacaaaattagctgggcgtggtggtgcacgcctgtaatcccagctactggggaggctgagacaagagaatcacttgaacccgggaggcagaggttgcagtgaccaaagatcgcactattgcactccagcctgggcaacaagagcaaaactctatctcaaaaaaaaaaaaaaaaaaa

SEQ ID NO: 1074 - DNA, 3872 bp, Homo sapiens
gaggcaggaccttgtcctattcattaatcttgcccctcaacagttattttcagaggggcaagaagtgtttcagggttcttggcccttgtttgaccagtcgtcctaaccctcatgtcttgggtcattgttgttataatctggggttaccttttggaaggtcatggggtacccttttgcaaaagttatgggccctctccttggaaactgcacacacaccatgcagcttacaattcagggagttcacaggtctacagaatcctggaaactctcatgtccggttctactcattgtagcttcagtggaaccttctagcagtcctttccagctcctccccagctcctcagctctgcttccctccgcccatcaagccctcctcagcccataaggtgggccaggtggcctgtggggataaatcagagtgcccacaagtgcaggggcccaaagacatcccagagcaaacccaagaatccctctacaagccccagcccactcagaaggatgcattttgccccctctgtttatttgtttgtttttaattatgaaagtagggcatggtcattgttgagaatgtgagaaatgcagagaagttaaaatgatgctttttgtttagggcgctgctgcttctggcttaagatcctaaatcaaagcagctgccagatctggacctaagacttgcttcccatcaccttacataaaagaaagagcactggactaggaatcaaagatctgaattcccatcaaatctctgctattactagcttttatctctatttatttatttatctgtctatctatctagtaccttttgtgaatatgagtgtttctcaccgaggccctcccatctctcttgcccccgatcctggaatggaccaaataccttgtttactgaaggatacagatggcatgtgactgttgagaatcactcaccctcttagagccatggtttcctcttctataaaatagggatgttcgtgcctatttgctaatcatgagtgacaatgacataaggtacataaagctgtactgcatgatgcaaacataacatcatatttgtagggttgttgctaataatactatccatcagcaaagcagtcattcatttactcagtcaaatactgatgcactggtacattcagtttcctcttttgtaaaatggggataaaaataggacttagctcatagggtatttaagattcagtgagttaatatatataaaatacttagagcagtccttggaacatattaagaactcaatacatattagctagttgagcaggctgtagtatttgttccagccaagaaaagactgttctctaacagcacaggaaataaagatggggttaggcacgacacggcagcaggacttaccttctgtctaattcagctggcagtcaaagaaagaattattagaagcctatgagcttgttctcccaaagatctactgagtacagggggatatttaaagaataaaaatccctagacccacttacagtacaggagagacaagaagctgttcacacaataacaagtgctaaattccttgatttttatactgacagctgaagttttagagaagagaaggatcaataaagaccggaatattaaagcagacaggcctaaaagaggattttagatttgataaagaattcctccagttctcagagcagggactttggagggtaacaacttggatttcagtccttgcctgccacttactgattgtatgaccttggaaaagttacttcacttctgtgagcaatgattctctcatctggaaaacaaaacaaaacaaaaaaactaacaagggtgataataatacctacctccctacctcatagggctgatgagaagattaaaaagtacctacataaagcccttctctgcgtgcctggagcatggcaagggctccatgtgaaccactatttttttttttttttttaatgaaaagtcatgggcagcaccaaagctcagaattttggcagtaaggaattatgattctacattgaaatttgccagaaggggagctgactgcctcatgagacatttttgaatgaggccaaaaaaggaaacaagtgtatcctgggattttacgagatgctaggtatgtccttagcacttaatcctcatgactaccctatgatgtaagtactatctgttgtccctattttacagttggccaaggtcacatagctgaaacggacttctgtgtgtcttctaacttttgctttcaggtctggaaaaatgcaatgtaaacctagaccctctttgaaatactgaagatggtaatcttatcccttcctcactttctgttttctaaaataacagtccttgttccttacaatgtctgttttccagattcttagaagactttttgcttattttccataactctttacttgtgatccctgaatgacaccgggggtatagcagagaatgtccatttcctcaaagttcaaaggtcctacaaaaaatagttgctagcctggcatgatggtgtgtgcctgtagcctcagctacctgggaggctgaggcaagaggattgcttgagctgaggagtttgaggctgcagcgagccatgatcacgccactgctctccagcctggatgacaaagcaagatcacatcttaaaataaaataaaataaattttaaaaatatataaaaaataaaaagtggtgccactaagtgtcctggacagcattagagaaagcaagagatagaagagtgcaaacacctgaaaggaaagagatgcgggtcttccctctcccttgagtagccaccggctatccctggagcataggagtaggattttatcccccagcttcggcctccccaggcagcacttcctttctgtgctttgactccaatttggatggtgctcaggcgggaagtaggctggggtgggaggagtttaggggaatatttgtcttctctcctgttttgccctagagattctggccaggaagacaaatggctagtaccacttggtccttttcttttcttcttttgagacagggtcttgttctgttgcccaggctggagtgcagtggcgtgatcgcggctcaccgcagcctcccaggctcaagcattcctctcacctcagcctcctgagtagctgggaccacagctccactaattttgaagtttttttggtagacatgaagtctccctgtgttgcccgggctggtctcaaactcctgacctcaagcagtcctcctgtcttggcctctggaaatgctgggattacaggcgtgagccactgtgctggcctcttttttctttttctttttttttaaggtttttatttgttaaatgggaagtctgtgccatcaactgagcattgtattttctccttagtaagagcctgggtgggccactgggagagaactatacattaaatgtaagtagcctctgggtagagagcccctggctggtttcctttcctttctctccttttctctactttggtgtctggaggcatttcccagactccagtttcttaccaccctcacggattttgctattgtattatcacctcctttatcattcccaaaattgactttatggagactcattaaaagaaaaaatcatcggccgggagcggtggctcacgccacgaaggcgggcgaatcacctgaggtgcggagttcgtgaccagcctgaccaaaacagagaaaccccatctctactaaacaatacaaaattagctgggcgtggtggtgcacgcctgtaatcccagctactggggaggctgagacaagagaatcacttgaacccgggaggcagaggttgcagtgaccaaagatcgcactattgcactccagcctgggcaacaagagcaaaactctatctcaaaaaaaaaaaaaaaaaaaag

SEQ ID NO: 1075 - DNA, 280 bp, Homo sapiens
tcacgcctgtaatcctagcactttgggaggcggaggcaggcggatcacctgaggtcgggagttcgagaccagcctgaccaacatggagaaaccccgtctctactaacaatacaaaaaaattagccgagcatggtggcgcatgcctataatctcagctacttgggaggctgaggcaggagaatcgcttgaacctgggaggcggaggttgcagtgagccgagatcgcgccattgcactccagcctgggcaacaaaagcgaaactcggtctcaaaaaaaaaaa

SEQ ID NO: 1076 - DNA, 8680 bp, Homo sapiens
cctcagcggccgggcccacggccccgagcagccatgctgggcgcgcgggcctggttgggccgcgtccttctgctgccccgcgccggtgcaggcctcgccgcgagccgcaggtacgggcgggcgagcgggcccctagggcactccctgcgcctgcctgcgggcccagtggagggtcttccggacaccggtccccagtgccagtctggaccacccctgcatgcctggcccttcccccacccccacctccggtctgctcctgagacctggctctggctgtaaggccctcctcccctcctctcccgtcctcatcccttccctcctctccccttccttccagtgcagtgccagctcctcagggactgttctgacactgcttccaggaagccttccttgcaccccagtgctggatgctgggtcaagggcctttctccaatagtaccctgtgccctgtcacagtcctttattgctgcatggacctttcgttatttaggtctgcctgcagtcccacttccaggctgaactccctgaggtctctgattccctaggtgtcctggagtctggcccaggacctggccccacaggagtcccagcaggtgggcgctgagtgagggagtccccatgtctggtttcctctgtttgtccctcacctggtcgagtcccagaccctactgatcttggcctgtccagccaccaacagtaggctgccttccagtggggccacacccaggcctgccagagagatgcctccaagcagctgctccaggaagggccgggggaggggcctggggaggggtaagaatggagccccaagaaccattctgcccattgtgacccgccctgacctcacagccatccttcccaccgccaggcccaggaggttgggggagactaacctggcaaggagcccccaatgagccacctctcctcaccccccaaaaaacataagggggagcacaaaggccacagtctcccccatggttcagaaaggtgggttgggctgggagcaggggtcctactggggtgctgagtgaaatggagcaggtgctggggggcctgggagaaggtgggtggaggcccctggcttgcctgatgcaccagtcctcgccaggggtagctcctcccgggacaaggaccgaagtgcgacggtcagtagttcagtgcccatgcctgctggagggaaaggaagccatccttcatctacaccccagagggtccccaaccgcctgatccacgagaagtcaccatacctcctacaacatgcctacaatcctgtggactggtgagcacctctcctggggccctgcctggaatcgctggggtcctgggcccctcccagaccccctgggctactgagtgatgccccaccctgctgggtctaggtacccctggggacaggaagccttcgacaaggccaggaaggaaaacaagccgattttcctctcaggtaatgctcccaccttccctgatgtgggggtgtgggcagggagtggcagtggatgggggagggtcctctcggcctggcgggtcttccaggagactagaggccaggacgtcttccatgtagccagggccacttggccagcctccctctgacccgttgctggccccctgacctctccccatggccctgttcagtcgggtactccacctgccactggtgccacatgatggaagaggagtccttccagaatgaggagattggccgcctgctcagtgaggactttgtgagtgtgaaggtagaccgtgaggagcggcctgacgtggacaaggtgtacatgacgttcgtgcaggtgagcagccctcctcgggagtgtatgcgccacatgggctcagagcagctcccctcaccctcgccctctctccgccaggccaccagcagcggcgggggctggcccatgaatgtgtggctgactcccaacctccagccctttgtcgggggcacctatttccctcctgaggatggcttgacccgagtcggcttccgcacagtgttgctgagaatacgagaacaggtgggtgtgcctccgggagttgggggaccagggtgggggactaggaaacaagagcccctccccctagctgacctccaggtgtgcccccacctcccgcagtggaaacagaacaagaacaccctgctagaaaatagccagcgtgtcaccactgccctgctggcccgatcagagatcagcgtgggtgaccgccagctgccgccctctgccgccaccgtgaacaatcgctgcttccagcagctggatgagggctatgatgaggaatacggtggcttcgctgaggcccccaagtttcccacgccgggtcagtgccccacgcccgccttagcccaggctttggccttctgattcctatgctggtcagggacctactggctcctggcctcacccatagcttcctgtcctcctgactggcagtgacctccttgcccctagcctgtcggtagctatcggtgaagacccgactgctggtgtcagcagtgaccctctcaccttaacctagatgatgaccttctgtcccctgacttggtcagttacccagtgaccctgacttggctaatgacattctgggctctagggggacaagtaacttactggtcctctgtgaaccaatgatattctgacctctggcttaggctattaccttctgtcctgtgggttgactcttgacctcacagcctgtccagagactgcctgttgagtgaactcccagcctctgcctggcccaaggcctcctgaccaccccgatctctgtccccactttcccattctctcacctgcatgttcttggtgcccccacagtgatcctgagcttcctgttctcctactggctcagccatcgactgactcaggatggctctcgggcccagcagatggccttgcataccctgaaaatgatggctaacgggggcatccgggaccatgtggggcaggtgacgggcactgggtgttccctggaggggcagcagggggctgtggggtggggcagaagctgggactggcctccagctttgtatccgcacagggctttcaccgctactccacagaccgccagtggcacgtccctcactttgagaagatgctctatgaccaggcacagctcgctgtggcctattcgcaggccttccaggtgacccctgaccccagcccagagaacaggcatctcactctggctgcccctcccaaggccttcctggtgactgtggcttctcttaatctgaatcccctgttccctcccatgtacccactacccaggcttccctcccccgcctgcctcagagaatgttgccaccttccacctgggcctccccagtgacctctctgttcacagtctcctttcttccctttcttagctctctggtgatgaattctactctgacgtggccaaaggcatcctgcagtacgtggctcggagcctgagccaccgggtgtgtgtccatggtggcaggcaggcctggctgtgggaggggttggggcctccactgccctgtgggccggggccagccaactctcccctccccacagtccggaggcttctatagcgcagaagatgcagactcgcccccagagcggggccagcggcccaaagagggcgcctactatgtgtggacggtcaaagaggttcagcagctcctcccggagcctgtgttgggtgccaccgagccgctgacctcaggccagctcctcatgaagcactacggcctcacagaggctggtaacatcagccccagtcaggtgaggacttctggggtcacctgacgggccctggtgcctgccaggcgtgtgagctcgcagacaaaggccattctcctcaggaccccaagggggagctgcagggccagaatgtgctgaccgtccggtactcgctggagctgactgctgcccgctttggcttggatgtggaggccgtgcggaccttgctcaattcagggctggagaagctcttccaggcccggaagcatcggcccaagccgcacctggacagcaagatgctggctgcctggaatggtggggcagcacacctgagaccgagcctgtctgtaggatcccccttcacaaagcccctgtctttccggcagcggctaaatgctcactctcccttgattagcgttattattctcagttgacaaaagaggcttaaggagcttgagtaacccgcccaaggtcacgcgcaagggctgggaaccccgccatgtctggctttggagcccaagatcttagggatcacccatggctccagggaggtgttggggcctaaggtgatagggtggacatgcctggagggtcctggccagcttcttaccactacttgtctctcctggctccaggcttgatggtgtcaggctatgctgtgactggggctgtcctgggccaagacaggctgatcaactatgccaccaatggtgccaagttcctgaagcggcacatgtttgatgtggccagtggccgcctgatgcggacctgctacaccggccctggggggactgtggagcacaggttgggggctgggtagaccgggagggcccgtctccccaacgcgtccccagcctacctctgccctacttctcccctccatgtggactccagtcctggctctgccaggtgcttgctgtgagtttgtagcttccctgggcccatttactcatctgggaagtgggctgatggcacctgcccaagagggttcatctggagggttaagtgaacaaatgcgtgaaagggcctcctctgggaaaggccctctctcctggggctctccccagcccctcccgtaatgcctgtcccccagcaacccaccctgctggggcttcctggaggactacgccttcgtggtgcggggcctgctggacctgtatgaggcctcacaggagagtgcgtggctcgagtgggctctgcggctgcaggacacacaggacaagctcttttgggactcccagggtggcggctacttctgcagtgaggctgagctgggggctggcctgcccctgcgtctgaaggacggtcagtgggggtgcagggctagtctggggtcctgggaggtgtaagtgcagcgtgggtgaagagctggtgtgggcaggagccctcctggctttgtgtctctgctacttattaatggcgtgatttttggctgctgtaatatttctgtgtctcaatttcttttttttaaatagagacagagtcttgctatgttgcccaggctgatcttgaaatcctgggctcaagtgatcctcccacctcggcctcccaaagtgctgggattacaggcatgaaccactacactcagcgtgttttgtttcgttcctttcttttctttttatttcctttctctttctttctttctctttcctttcttcctttctttcttttctttctctctttctttctcttttttttttttttttgagacagggtctcactgtcacccaggctggaatgcagtggcatgatcttggctcacagcaacctctgcctccggggctgaatcaattctcccacctcagcctcctgagtagctaggactataggcatgcaccaccatgcctggctaattttttgtagagatgggatttctccatgttgcccaggctggtctgaaactactgggctcaagtgatctgcccacctcggcctcccaaagtgctgggattacaggcgagagccaccatgcctggcctgtttcttaataagtaaaatggagctaacattggtactaccttacagggttgatgtaaagatgaatgtagctgttctgtaaacatgcttagcacagtaactgacacccatggattcagatattgaccaaggctcacttggtctctgccctcatgaagcttacagtatggtaggggagacagcgaaaatgcagtaatgatgcaaaaacacatgcacaaatgtgcagttaaaattgtggtgagtgccatgaagaagtaggacgctctatgtgtgcctgctccctatcacccatgtgccttgtctgtggttaaaggtttctttcccaaaactcaaattttagctcctcaaagatcaggactttctgccactgttgtatccccagggtctagtgtggttctggcacattgtaagtgcttaataaatgttaactgagtgaatgaaagggccttgggagagaaccacagaggaggaccaactcagcctagggagagattagaggacacctgtgacaggtgtcatttaaccaaggcctggagggaaagaggggccatgtggccatggagaagctgtggagagagttcaggcatagggagcagtgcatgacaggcctggtgcaggcagcctgtatcctggaggacaggcagggcccgcgtgttccaggagggcaccgaggagaatgctgaggccggcagggcacggaagccgtcttttttttttttttttcctaagaaaagaaggctggtctcaaactcctgggctcaggtgatcctcccgcctcggcttcccaggtgctgggactacaggtgtgagccaccatgcccggctggcaaggaggttttaagtggattgtgatctgctctggtatggttttaaggaggtcactctgaccactgatggagagaagtgggggtgggggaaacaggcgaccagttaggaggccattactcgtgttcagtccaggcaggcattggtgaaggctcagaggatgtggaagtatgagatggggagacatggtgagatttggatctcttctggccacagccctggcaagactcacagatggattagaagcggagggagagggagaggaaggggacaggatgatgccgctctagcttgagcagctgagtggctggacagaggcatcagcagcgaggagggagcctggagaccaacagttgaggctaggacaggtagagtggagggtgccataaaaaagacagcaaagtactgataactgctggagtggcatccacacccagagcggggaaggggcaggatgggcagggccttttctctgtcccgtcccccaagtggccctggatacagtcctgggcagggtcctgggactcagtgacctgcccttacccccaccccctgcctccctatgtgctgtagaccaggatggagcagagcccagcgccaattccgtgtcagcccacaacctgctccggctgcatggcttcacgggccacaaggactggatggacaagtgtgtgtgcctattgaccgccttttccgagcgcatgcgtcgtgtcccggtggcgttgcccgagatggtccgcgccctctcagcccagcagcagaccctcaagcaggtggggggtgagggcatctgggctgggacctcgggtaggagggaagttggggctgcgatggcagatgggaacagggggtggggttcctgggctgtccccagagctcaggtctgtgtgtgtgcaggcacgtggcctgtcagacagggaggcagaagttaatatgagtccgtggtggctgatgaagtgtttctctgtacgtcttggtgtcagtgtaattgcttctgtccatactgtgttactggtgtgtgtgtacttccgggtgtgtgtgaccctggaggtgtgtgtctgtgcacctacctttgagggggatgctggtgtgagtgtttgtctgtctgcatgtggatgccccatctgcaggtttgcctctgtgtctgcctgcatgcgtgtgtgtctggtgtttgtgtgtgtggtatctgcctctgtgtgggcatctactgtgtgtgtgtgtgtgtgtgtgtgtgtgtgtgtgtgtgtgtgtgtgactactctgtgtctgtctgaatgggtctctgtgtgctctgggtcttctgggtgtgtgtctccccatgtttgtatctgtaccattgtgtatatgtatgacatttccacttcggtattctcatgtgtgagtgtgtgtgtgtgttcccacttgccaagcattaactcatcctggcagctgagatgagtccctgttccttcttagagatatacggtggggcggaaggaggatggggaagccctggtggtctagggctcagccctccctcccctgacacaccggagtgacctttctattccggtcagatcgtgatctgtggagaccgtcaggccaaggacaccaaggccctggtgcagtgcgtccactctgtctacattcctaacaaggtacccatccctgtgagcccaatctgccacctccccagagctgccccctcccatcctcagctcctcaacatctccttcccctcagaatgttgggaagagggaacttcccagtgggcctttctaatgggcaggtgaccccaccccggcaggtgactctccctgctctgctgctgccctaggtgctgattctggctgatggggacccctcgagcttcctgtcccgccagctgcctttcctgagtaccctccgacggttggaagaccaggccactgcatatgtgtgtgagaatcaagcctgctcagtgcccatcactgatccctgcgaattacgaaaactactacatccatgactgccccaacccccttggggtggggcagaaggtgaagcatcccaactgactagagactcaggccctgcagggccctatagaacctgtggccatccctgagcaccctgccaccaggtgacctcggccatactcactgccccccttgggcacccactcaccctagaataaacttaacagtgtcccgtggtaa

SEQ ID NO: 1077 - DNA, 8677 bp, Homo sapiens
cctcagcggccgggcccacggccccgagcagccatgctgggcgcgcgggcctggttgggccgcgtccttctgctgccccgcgccggtgcaggcctcgccgcgagccgcaggtacgggcgggcgagcgggcccctagggcactccctgcgcctgcctgcgggcccagtggagggtcttccggacaccggtccccagtgccagtctggaccacccctgcatgcctggcccttcccccaccccacctccggtctgctcctgagacctggctctggctgtaaggccctcctcccctcctctcccgtcctcatcccttccctcctctccccttccttccagtgcagtgccagctcctcagggactgttctgacactgcttccaggaagccttccttgcaccccagtgctggatgctgggtcaagggcctttctccaatagtaccctgtgccctgtcacagtcctttattgctgcatggacctttcgttatttaggtctgcctgcagtcccacttccaggctgaactccctgaggtctctgattccctaggtgtcctggagtctggcccaggacctggccccacaggagtcccagcaggtgggcgctgagtgagggagtccccatgtctggtttcctctgtttgtccctcacctggtcgagtcccagaccctactgatcttggcctgtccagccaccaacagtaggctgccttccagtggggccacacccaggcctgccagagagatgcctccaagcagctgctccaggaagggccgggggaggggcctggggaggggtaagaatggagccccaagaaccattctgcccattgtgacccgccctgacctcacagccatccttcccaccgccaggcccaggaggttgggggagactaacctggcaaggagcccccaatgagccacctctcctcaccccccaaaaaacataagggggagcacaaaggccacagtctcccccatggttcagaaaggtgggttgggctgggagcaggggtcctactggggtgctgagtgaaatggagcaggtgctggggggcctgggagaaggtgggtggaggcccctggcttgcctgatgcaccagtcctcgccaggggtagctcctcccgggacaaggaccgaagtgcgacggtcagtagttcagtgcccatgcctgctggagggaaaggaagccatccttcatctacaccccagagggtccccaaccgcctgatccacgagaagtcaccatacctcctacaacatgcctacaatcctgtggactggtgagcacctctcctggggccctgcctggaatcgctggggtcctgggcccctcccagaccccctgggctactgagtgatgccccaccctgctgggtctaggtacccctggggacaggaagccttcgacaaggccaggaaggaaaacaagccgattttcctctcaggtaatgctcccaccttccctgatgtgggggtgtgggcagggagtggcagtggatgggggagggtcctctcggcctggcgggtcttccaggagactagaggccaggacgtcttccatgtagccagggccacttggccagcctccctctgacccgttgctggccccctgacctctccccatggccctgttcagtcgggtactccacctgccactggtgccacatgatggaagaggagtccttccagaatgaggagattggccgcctgctcagtgaggactttgtgagtgtgaaggtagaccgtgaggagcggcctgacgtggacaaggtgtacatgacgttcgtgcaggtgagcagccctcctcgggagtgtatgcgccacatgggctcagagcagctcccctcaccctcgccctctctccgccaggccaccagcagcggcgggggctggcccatgaatgtgtggctgactcccaacctccagccctttgtcgggggcacctatttccctcctgaggatggcttgacccgagtcggcttccgcacagtgttgctgagaatacgagaacaggtgggtgtgcctccgggagttgggggaccagggtgggggactaggaaacaagagcccctccccctagctgacctccaggtgtgcccccacctcccgcagtggaaacagaacaagaacaccctgctagaaaatagccagcgtgtcaccactgccctgctggcccgatcagagatcagcgtgggtgaccgccagctgccgccctctgccgccaccgtgaacaatcgctgcttccagcagctggatgagggctatgatgaggaatacggtggcttcgctgaggcccccaagtttcccacgccgggtcagtgccccacgcccgccttagcccaggctttggccttctgattcctatgctggtcagggacctactggctcctggcctcacccatagcttcctgtcctcctgactggcagtgacctccttgcccctagcctgtcggtagctatcggtgaagacccgactgctggtgtcagcagtgaccctctcaccttaacctagatgatgaccttctgtcccctgacttggtcagtgacccagtgaccctgacttggctaatgacattctgggctctagggggacaagtaacttactggtcctctgtgaaccaatgatattctgacctctggcttaggctattaccttctgtcctgtgggttgactcttgacctcacagcctgtccagagactgcctgttgagtgaactcccagcctctgcctggcccaaggcctcctgaccaccccgatctctgtccccactttcccattctctcacctgcatgttcttggtgcccccacagtgatcctgagcttcctgttctcctactggctcagccatcgactgactcaggatggctctcgggcccagcagatggccttgcataccctgaaaatgatggctaacgggggcatccgggaccatgtggggcaggtgacgggcactgggtgttccctggaggggcagcagggggctgtggggtggggcagaagctgggactggcctccagctttgtatccgcacagggctttcaccgctactccacagaccgccagtggcacgtccctcactttgagaagatgctctatgaccaggcacagctcgctgtggcctattcgcaggccttccaggtgacccctgaccccagcccagagaacaggcatctcactctggctgcccctcccaaggccttcctggtgactgtggcttctcttaatctgaatcccctgttccctcccatgtacccactacccaggcttccctcccccgcctgcctcagagaatgttgccaccttccacctgggcctccccagtgacctctctgttcacagtctcctttcttccctttcttagctctctggtgatgaattctactctgacgtggccaaaggcatcctgcagtacgtggctcggagcctgagccaccgggtgtgtgtccatggtggcaggcaggcctggctgtgggaggggttggggcctccactgccctgtgggccggggccagccaactctcccctccccacagtccggaggcttctatagcgcagaagatgcagactcgcccccagagcggggccagcggcccaaagagggcgcctactatgtgtggacggtcaaagaggttcagcagctcctgccggagcctgtgttgggtgccaccgagccgctgacctcaggccagctcctcatgaagcactacggcctcacagaggctggtaacatcagccccagtcaggtgaggacttctggggtcacctgacgggccctggtgcctgccaggcgtgtgagctcgcagacaaaggccattctcctcaggaccccaagggggagctgcagggccagaatgtgctgaccgtccggtactcgctggagctgactgctgcccgctttggcttggatgtggaggccgtgcggaccttgctcaattcagggctggagaagctcttccaggcccggaagcatcggcccaagccgcacctggacagcaagatgctggctgcctggaatggtggggcagcacacctgagaccgagcctgtctgtaggatcccccttcacaaagcccctgtctttccggcagcggctaaatgctcactctcccttgattagcgttattattctcagttgacaaaagaggcttaaggagcttgagtaacccgcccaaggtcacgcgcaagggctgggaaccccgccatgtctggctttggagcccaagatcttagggatcacccatggctccagggaggtgttggggcctaaggtgatagggtggacatgcctggagggtcctggccagcttcttaccactacttgtctctcctggctccaggcttgatggtgtcaggctatgctgtgactggggctgtcctgggccaagacaggctgatcaactatgccaccaatggtgccaagttcctgaagcggcacatgtttgatgtggccagtggccgcctgatgcggacctgctacaccggccctggggggactgtggagcacaggttgggggctgggtagaccgggagggcccgtctccccaacgcgtccccagcctacctctgccctacttctcccctccatgtggactccagtcctggctctgccaggtgcttgctgtgagtttgtagcttccctgggcccatttactcatctgggaagtgggctgatggcacctgcccaagagggttcatctggagggttaagtgaacaaatgcgtgaaagggcctcctctgggaaaggccctctctcctggggctctccccagcccctcccgtaatgcctgtcccccagcaacccaccctgctggggcttcctggaggactacgccttcgtggtgcggggcctgctggacctgtatgaggcctcacaggagagtgcgtggctcgagtgggctctgcggctgcaggacacacaggacaagctcttttgggactcccagggtggcggctacttctgcagtgaggctgagctgggggctggcctgcccctgcgtctgaaggacggtcagtgggggtgcagggctagtctggggtcctgggaggtgtaagtgcagcgtgggtgaagagctggtgtgggcaggagccctcctggctttgtgtctctgctacttattaatggcgtgatttttggctgctgtaatatttctgtgtctcaatttcttttttttaaatagagacagagtcttgctatgttgcccaggctgatcttgaaatcctgggctcaagtgatcctcccacctcggcctcccaaagtgctgggattacaggcatgaaccactacactcagcgtgttttgtttcgttcctttcttttctttttatttcctttctctttctttctttctctttcctttcttcctttctttcttttctttctctctttctttctcttttttttttttttttgagacagggtctcactgtcacccaggctggaatgcagtggcatgatcttggctcacagcaacctctgcctccggggctgaatcaattctcccacctcagcctcctgagtagctaggactataggcatgcaccaccatgcctggctaattttttgtagagatgggatttctccatgttgcccaggctggtctgaaactactgggctcaagtgatctgcccacctcggcctcccaaagtgctgggattacaggcgagagccaccatgcctggcctgtttcttaataagtaaaatggagctaacattggtactaccttacagggttgatgtaaagatgaatgtagctgttctgtaaacatgcttagcacagtaactgacacccatggattcagatattgaccaaggctcacttggtctctgccctcatgaagcttacagtatggtaggggagacagcgaaaatgcagtaatgatgcaaaaacacatgcacaaatgtgcagttaaaattgtggtgagtgccatgaagaagtaggacgctctatgtgtgcctgctccctatcacccatgtgccttgtctgtggttaaaggtttctttcccaaaactcaaattttagctcctcaaagatcaggactttctgccactgttgtatccccagggtctagtgtggttctggcacattgtaagtgcttaataaatgttaactgagtgaatgaaagggccttgggagagaaccacagaggaggaccaactcagcctagggagagattagaggacacctgtgacaggtgtcatttaaccaaggcctggagggaaagaggggccatgtggccatggagaagctgtggagagagttcaggcatagggagcagtgcatgacaggcctggtgcaggcagcctgtatcctggaggacaggcagggcccgcgtgttccaggagggcaccgaggagaatgctgaggccggcagggcacggaagccgtcttttttttttttttttcctaagaaaagaaggctggtctcaaactcctgggctcaggtgatcctcccgcctcggcttcccaggtgctgggactacaggtgtgagccaccatgcccggctggcaaggaggttttaagtggattgtgatctgctctggtatggttttaaggaggtcactctgaccactgatggagagaagtgggggtgggggaaacaggcgaccagttaggaggccattactcgtgttcagtccaggcaggcattggtgaaggctcagaggatgtggaagtatgagatggggagacatggtgagatttggatctcttctggccacagccctggcaagactcacagatggattagaagcggagggagagggagaggaaggggacaggatgatgccgctctagcttgagcagctgagtggctggacagaggcatcagcagcgaggagggagcctggagaccaacagttgaggctaggacaggtagagtggagggtgccataaaaaagacagcaaagtactgataactgctggagtggcatccacacccagagcggggaaggggcaggatgggcagggccttttctctgtcccgtcccccaagtggccctggatacagtcctgggcagggtcctgggactcagtgacctgcccttacccccaccccctgcctccctatgtgctgtagaccaggatggagcagagcccagcgccaattccgtgtcagcccacaacctgctccggctgcatggcttcacgggccacaaggactggatggacaagtgtgtgtgcctattgaccgccttttccgagcgcatgcgtcgtgtcccggtggcgttgcccgagatggtccgcgccctctcagcccagcagcagaccctcaagcaggtggggggtgagggcatctgggctgggacctcgggtaggagggaagttggggctgcgatggcagatgggaacagggggtggggttcctgggctgtccccagagctcaggtctgtgtgtgtgcaggcacgtggcctgtcagacagggaggcagaagttaatatgagtccgtggtggctgatgaagtgtttctctgtacgtcttggtgtcagtgtaattgcttctgtccatactgtgttactggtgtgtgtgtacttccgggtgtgtgtgaccctggaggtgtgtgtctgtgcacctacctttgagggggatgctggtgtgagtgtttgtctgtctgcatgtggatgccccatctgcaggtttgcctctgtgtctgcctgcatgcgtgtgtgtctggtgtttgtgtgtgtggtatctgcctctgtgtgggcatctactgtgtgtgtgtgtgtgtgtgtgtgtgtgtgtgtgtgtgtgtgtgactactctgtgtctgtctgaatgggtctctgtgtgctctgggtcttctgggtgtgtgtctccccatgtttgtatctgtaccattgtgtatatgtatgacatttccacttcggtattctcatgtgtgagtgtgtgtgtgtgttcccacttgccaagcattaactcatcctggcagctgagatgagtccctgttccttcttagagatatacggtggggcggaaggaggatggggaagccctggtggtctagggctcagccctccctcccctgacacaccggagtgacctttctattccggtcagatcgtgatctgtggagaccgtcaggccaaggacaccaaggccctggtgcagtgcgtccactctgtctacattcctaacaaggtacccatccctgtgagcccaatctgccacctccccagagctgccccctcccatcctcagctcctcaacatctccttcccctcagaatgttgggaagagggaacttcccagtgggcctttctaatgggcaggtgaccccaccccggcaggtgactctccctgctctgctgctgccctaggtgctgattctggctgatggggacccctcgagcttcctgtcccgccagctgcctttcctgagtaccctccgacggttggaagaccaggccactgcatatgtgtgtgagaatcaagcctgctcagtgcccatcactgatccctgcgaattacgaaaactactacatccatgactgccccaacccccttggggtggggcagaaggtgaagcatcccaactgactagagactcaggccctgcagggccctatagaacctgtggccatccctgagcaccctgccaccaggtgacctcggccatactcactgccccccttgggcacccactcaccctagaataaacttaacagtgtcccgtggtaa

SEQ ID NO: 1078 - DNA, 5846 bp, Homo sapiens
gctttatatgagcttttatatttcacagaatggtgactttgcatatgccctggtgcattgtgggagctgctattgtcacgactaagacatttcttttggggtatccatctagccccagcctcgaaaggatggaagcagggcctccttgcaggaggtcatgttgtccatttgtctgctttcatacaagctggtccaaagaaagagttctctttcgtttggaacatctgttgggttggaagtccttccccaaatctatctgagtccttcttgctgcagagaaagccttcctgtgacctcatcctttcccctaaatgttgggaaatgctcctgagtcctgtccttgacacatacatcttccttgggttgagggatggggactgggacacatgctttgggaagggcaggtgcagagtgatggggctgacggggtgggggaagcagggggaggagctgtccctctgaggcctttgggaatcggctgtgccaggcatcctcagccctccagctaagcaacacagagagccaaaagaggctactagagacaagaaggccttcatggggccactgcttgtgggggatgtcagcagtggggaggagtgaagcaggaaggaaccgggagactggatggaattgctcccttcacacggtcacacatagccacacatggtcactgggaccagagtcagctctgtctgggcagccaggccctcagtgcaagccaccagcccatctggaggggattagtgctccggccaacaaggtcagctggccccttcctagctggagcctactcaaccttgccaggaagtcagagagctggacaagtggagcccagcctggggaggtggaagagagggaggatggagcatggtgaagcacaggtggcctttttggcagccccagccctggctttggaacagtctgggcagtgtgccaacccctcttgccactgtcgtcccattgaccctcatgaatgagttgcgaggcagttaccttcagcctcctatggataaatattcgaggcccagagagggtaagagacctgcctgcgacccctcagcacttctgtttctctctggggtcttgagggtacaataaagacccctaaggcttcctcttctcgcaggaggtccaggcgcagctgtgggggagggtgcccttggtgtcttctgtccctgcagccagtctgctttctactcggcagctcctctctccctcctgggatgagatgtgcacgcgatgatgggattctgtaaatgggttgggaagaaggagttacctccttaaagggttagttctcccaggagtgctcgaatttctaaagggggcagggtcccacataaatctcactcagaagcaggattataagagttcctgcagcatcccttcccctttgctggtccctcttgagtgtgcaccctgttctaccagcggaacacctgcgggccagggtcactggagacagggccataccgtctgggcggtcacttaagtaacttcatcattctgagcaccccccttccttatctgaaaggtggggggccatccacccagctctcagggctgttaaggtgactaaatgggataatggttgtatcatccctgagcaaagggtatcacagatgggaagattatcttagctccgcagggagccagatgggctgtgagggaggggtaaaggcagggctggagggggctggaggggctggctgagcagggtatatatggggggggttcttcctcaaacccagaaaaactcttagttaggcttagtgtctttgttgagaaactgaggcccaaagaaaggaatttcttgtccctttgtttccctttccctgcctgaggtcattcattcacctaacaactttgtgcccgacactagacaaggccctagtgagcaaaatgaacatagcccctctgggaacacagagcctagatagggagatgatcatttcattactgcaaacacaaacatataatcccagcctgggctaagtgctgtgaagttccagacttgtgtctggctcggtgctgtatcctaagcaccttggcacttaagtggcattgaaatacttgctggaaagaaggccactctgaggaggtgatgtcagagctgaggcttggagggctggagttaaataaagatggtttcaggtcttctttgccttccctgtaggttctgcctctgcctcctctctggcactcaggctaagggtaagcatctccgactggccatcagccccaacatgccgagtacagggatcagatcctgtcttgcgtggccggtctcccctaggtcctgaacccagggaagtgcatgtggatctcaatttatctagatggtgcgtttgtgcctgccctcctttcgggcatgttctagaacagagttcagtccagagcccaggggtggccgggatgatggatgagggtgtggggcctgctgaccaccaggggacctgatcattgggctgggccagcctctctgtcctcattttcccctctgcaaagaaggggtgttgggcgtccctacttctcgcgccagccccggggcctctatcctggcgggaagggcaggccgacccggcagactgcggcctctcgggagggaagaaggtgtcagacgcgcggagcaaccataaatagcccccctttcccagaagacggcacggggttcaagactcaggcgccgcatactcagaatgagagcagagactcccgccaggaaaaaaaggcacttaggggatctgctcattagcatgaaatgcaaatgagcccgcccggcctcatttacacaactctgtgcatggattcggcgaaagggcaaccagggagacgacggcgcagcagccactctgccacttcccccatcccctccccccatcggccggggcgggaactgagacgaccccaaccctctgcggtggcgggaggtgcgcgggggctgcgtgggtggtgcagccttaggagagtgaacaacgcccaggggtgatggcctcagcaaagtgaggggtggtgatggaggtcatccgacccatcccgccgcctctccgcagtggcgcaagcgccccaaaatctccggagagggaactgactgacccactaggttccgccgtgtctacctctcgcagatgttggggaagtgcttcccggcgtctaatcctcgctgttcccccctccaccggcgcccagcacacccgcggcgctccgctcccgggtacccacagctttctggagtggcgccggcggcaggagagagctagagccgactgagccccagaactcggggaggtaggcggggcaagggccggggtctgcgcgtgcgtgtgcacgcgtggaaagcacaaacccacgagggcccgctgccggtagggttaaggtgagtgagtgaaggcggcagacccgcgaagttccagttccgcggacactccttccctaagccacatagggacttaagagaaactgaggcacgaagttggggggtggcggtggtggggactttgaaggtcgagtcgataaagcccagctctgtgcttccgccccctcccacacactcgagacccccacaggttccttcttaggggtcctcgctctgctccgcagcccctcctggggatccgggctctgcggtccagcgcgacctgcctggggccacgtgttcaagcacgaagcccctgcgtggagtccacgcccttcaaaaggtccctaggggcaaagggatgaagcccaggagcgtcaatgtgaggtcaggtccagcgggttagggttacgaggtcagggtcgaagtctcagaattgactcgggagtatgaccaataagcccaagagatttgtggaggccacgcccagaccatgcctaccctagcctttctcgagctccgcccgtttctccaagactgggcccctccagcctgaagccccacccccaggacatccagctccgctccttcccttccccagtcccgcagccaagctcaactccagggtgggagattaaccaggtggagacctgggatttcgctctgggaccccctggtgacaaccctcacccccgtgccgcctgtctcctttcttccccaggcccgcccagagctgagctccgtcctccggctgctgcccaaatcaggggtcgtggacaaaggatgcctggggcctgcggccctacgccaggaccccgcgccgaatactctgattcttcgggctccctccaagggagtcccaaagaccccaatggccaataggaaagtgggttcggtctgggcagcagtctgattggctccagccttcgggagcggacccaggggcaaggggaggggagaggggcggtcctgggttttggggtgggaatcggattccagctgtggttctctccctgcgctcccgcccgcactgccacggcggacggccaatgggcgcgcggctcggggccggcggcgtccggcgattggctgcggggctgtctgggggcggggccgaggcttgaagttgaagtgagggatccagctgtggtgtgcgcggggctcctcgccgccgctttcgctcgctcgctccgcgtctcggccggaggaggaggctgtggcgccggcgacagctacggcagcggcagccaccgcggcggctgcggcggcggcatctccgcctccactcccgcccgggactgccccccactgtctccccgcccctcccggacagtgagcccgcggcggggcgggggaaggagccgcccccaccccctccaagcccacccctaaagagatccctcctcccctcccccgccgcctggcgcggagccgggacgatgctgaccccttagatccggctccagctgcgccgcgggaagagggggcgcccctccccggacccccgccctccgccgctgccccccttttcgttcgccctctcggggcggcttcgccgaaggtagcgccgaatccggcaaccggagcctgggcgcgaagcgaagaagccggaacaaagtgagggggagccggccggctggcccgggaagccccaggggcgcaggggaagcgggactcgcgccgggcggggtttccctgcgccccggcgccccgcgggcagcatgcccctgcgggcagggggagctgggctgaactggccctcccgggggctcagcttgcgccctagagcccaccagatgtgcccccgccggggcccccgggttgcgtgaggacacctcctctgaggggcgccgcttgcccctctccggatcgcccggggccccggctggccagaggatggacgaggaggaggatggagcgggcgccgaggagtcgggacagccccggagcttcatgcggctcaacgacctgtcgggggccgggggcggccggggccggggtcagcagaaaaggacccgggcagcgcggactccgaggcggaggggctgccgtacccggcgctggccccggtggttttcttctacttgagccaggacagccgcccgcggagctggtgtctccgcacggtctgtaacccatatccttcggggcacgacggccaggcgcggggtcagaagggggacgggccgcaccgccgggggtcgggggggaagaagacccaccgccaggtgagtcgaagtgagcccggagggtaggcggatggggggggggctgccagggaggggagggggcaccagagtgggagcggagacgcgagcaggtctcgtcggtaacccgggcttaccccacctgcgtacacacacctcagtcttcctgggttgggggggtggggatccaggccaggagaagagagctgtgccccgctggctcgcagctggacgccctccagatgtggtcaggggagggtcgtcatcctccagatgtgggaagc

SEQ ID NO: 1079 - DNA, 5848 bp, Homo sapiens
gctttatatgagcttttatatttcacagaatggtgactttgcatatgccctggtgcattgtgggagctgctattgtcacgactaagacatttcttttggggtatccatctagccccagcctcgaaaggatggaagcagggcctccttgcaggaggtcatgttgtccatttgtctgctttcatacaagctggtccaaagaaagagttctctttcgtttggaacatctgttgggttggaagtccttccccaaatctatctgagtccttcttgctgcagagaaagccttcctgtgacctcatcctttcccctaaatgttgggaaatgctcctgagtcctgtccttgacacatacatcttccttgggttgagggatggggactgggacacatgctttgggaagggcaggtgcagagtgatggggctgacggggtgggggaagcagggggaggagctgtccctctgaggcctttgggaatcggctgtgccaggcatcctcagccctccagctaagcaacacagagagccaaaagaggctactagagacaagaaggccttcatggggccactgcttgtgggggatgtcagcagtggggaggagtgaagcaggaaggaaccgggagactggatggaattgctcccttcacacggtcacacatagccacacatggtcactgggaccagagtcagctctgtctgggcagccaggccctcagtgcaagccaccagcccatctggaggggattagtgctccggccaacaaggtcagctggccccttcctagctggagcctactcaaccttgccaggaagtcagagagctggacaagtggagcccagcctggggaggtggaagagagggaggatggagcatggtgaagcacaggtggcctttttggcagccccagccctggctttggaacagtctgggcagtgtgccaacccctcttgccactgtcgtcccattgaccctcatgaatgagttgcgaaggcagttaccttcagcctcctatggataaatattcgaggcccagagagggtaagagacctgcctgcgacccctcagcacttctgtttctctctggggtcttgagggtacaataaagacccctaaggcttcctcttctcgcaggaggtccaggcgcagctgtgggggagggtgcccttggtgtcttctgtccctgcagccagtctgctttctactcggcagctcctctctccctcctgggatgagatgtgcacgcgatgatgggattctgtaaatgggttgggaagaaggagttacctccttaaagggttagttctcccaggagtgctcgaatttctaaagggggcagggtcccacataaatctcactcagaagcaggattataagagttcctgcagcatcccttcccctttgctggtccctcttgagtgtgcaccctgttctaccagcggaacacctgcgggccagggtcactggagacagggccataccgtctgggcagtcacttaagtaacttcatcattctgagcaccccccttccttatctgaaaggtggggggccatccacccagctctcagggctgttaaggtgactaaatgggataatggttgtatcatccctgagcaaagggtatcacagatgggaagattatcttagctccgcagggagccagatgggctgtgagggaggggtaaaggcagggctggagggggctggaggggctggctgagcagggtatatatggggggggttcttcctcaaacccagaaaaactcttagttaggcttagtgtctttgttgagaaactgaggcccaaagaaaggaatttcttgtccctttgtttccctttccctgcctgaggtcattcattcacctaacaactttgtgcccgacactagacaaggccctagtgagcaaaatgaacatagcccctctgggaacacagagcctagatagggagatgatcatttcattactgcaaacacaaacatataatcccagcctgggctaagtgctgtgaagttccagacttgtgtctggctcggtgctgtatcctaagcaccttggcacttaagtggcattgaaatacttgctggaaagaaggccactctgaggaggtgatgtcagagctgaggcttggagggctggagttaaataaagatggtttcaggtcttctttgccttccctgtaggttctgcctctgcctcctctctggcactcaggctaagggtaagcatctccgactggccatcagccccaacatgccgagtacagggatcagatcctgtcttgcgtggccggtctcccctaggtcctgaacccagggaagtgcatgtggatctcaatttatctagatggtgcgtttgtgcctgccctcctttcgggcatgttctagaacagagttcagtccagagcccaggggtggccgggatgatggatgagggtgtggggcctgctgaccaccaggggacctgatcattgggctgggccagcctctctgtcctcattttcccctctgcaaagaaggggtgttgggcgtccctacttctcgcgccagccccggggcctctatcctggcgggaagggcaggccgacccggcagactgcggcctctcgggagggaagaaggtgtcagacgcgcggagcaaccataaatagcccccctttcccagaagacggcacggggttcaagactcaggcgccgcatactcagaatgagagcagagactcccgccaggaaaaaaaggcacttaggggatctgctcattagcatgaaatgcaaatgagcccgcccggcctcatttacacaactctgtgcatggattcggcgaaagggcaaccagggagacgacggcgcagcagccactctgccacttcccccatcccctccccccatcggccggggcgggaactgagacgaccccaaccctctgcggtggcgggaggtgcgcgggggctgcgtgggtggtgcagccttaggagagtgaacaacgcccaggggtgatggcctcagcaaagtgaggggtggtgatggaggtcatccgacccatcccgccgcctctccgcagtggcgcaagcgccccaaaatctccggagagggaactgactgacccactaggttccgccgtgtctacctctcgcagatgttggggaagtgcttcccggcgtctaatcctcgctgttcccccctccaccggcgcccagcacacccgcggcgctccgctcccgggtacccacagctttctggagtggcgccggcggcaggagagagctagagccgactgagccccagaactcggggaggtaggcggggcaagggccggggtctgcgcgtgcgtgtgcacgcgtggaaagcacaaacccacgagggcccgctgccggtagggttaaggtgagtgagtgaaggcggcagacccgcgaagttccagttccgcggacactctttccctaagccacatagggacttaagagaaactgaggcacgaagttggggggtggcggtggtggggactttgaaggtcgagtcgataaagcccagctctgtgcttccgccccctcccacacactcgagacccccacaggttccttcttaggggtcctcgctctgctccgcagcccctcctggggatccgggctctgcggtccagcgcgacctgcctggggccacgtgttcaagcacgaagcccctgcgtggagtccacgcccttcaaaaggtccctaggggcaaagggatgaagcccaggagcgtcaatgtgaggtcaggtccagcgggttagggttacgaggtcagggtcgaagtctcagaattgactcgggagtatgaccaataagcccaagagatttgtggaggccacgcccagaccatgcctaccctagcctttctcgagctccgcccgtttctccaagactgggcccctccagcctgaagccccacccccaggacatccagctccgctccttccctcccccagtcccgcagccaagctcaactccagggtgggagattaaccaggtggagacctgggatttcgctctgggaccccctggtgacaaccctcacccccgtgccgcctgtctcctttcttccccaggcccgcccagagctgagctccgtcctccggctgctgcccaaatcaggggtcgtggacaaaggatgcctggggcctgcggccctacgccaggaccccgcgccgaatactctgattcttcgggctccctccaagggagtcccaaagaccccaatggccaataggaaagtgggttcggtctgggcagcagtctgattggctccagccttcgggagcggacccaggggcaaggggaggggagaggggcggtcctgggttttggggtgggaatcggattccagctgtggttctctccctgcgctcccgcccgcactgccacggcggacggccaatgggcgcgcggctcggggccggcggcgtccggcgattggctgcggggctgtctgggggcggggccgaggcttgaagttgaagtgagggatccagctgtggtgtgcgcggggctcctcgccgccgctttcgctcgctcgctccgcgtctcggccggaggaggaggctgtggcgccggcgacagctacggcagcggcagccaccgcggcggctgcggcggcggcatctccgcctccactcccgcccgggactgccccccactgtctccccgcccctcccggacagtgagcccgcggcggggcgggggaaggagccgcccccaccccctccaagcccacccctaaagagatccctcctcccctcccccgccgcctggcgcggagccgggacgatgctgaccccttagatccggctccagctgcgccgcgggaagagggggcgcccctccccggacccccgccctccgccgctgccccccttttcgttcgccctctcggggcggcttcgccgaaggtagcgccgaatccggcaaccggagcctgggcgcgaagcgaagaagccggaacaaagtgagggggagccggccggctggcccgggaagccccaggggcgcaggggaagcgggactcgcgccgggcggggtttccctgcgccccggcgccccgcgggcagcatgcccctgcgggcagggggagctgggctgaactggccctcccgggggctcagcttgcgccctagagcccaccagatgtgcccccgccggggcccccgggttgcgtgaggacacctcctctgaggggcgccgcttgcccctctccggatcgcccggggccccggctggccagaggatggacgaggaggaggatggagcgggcgccgaggagtcgggacagccccggagcttcatgcggctcaacgacctgtcgggggccgggggccggccggggccggggtcagcagaaaaggacccgggcagcgcggactccgaggcggaggggctgccgtacccggcgctggccccggtggttttcttctacttgagccaggacagccgcccgcggagctggtgtctccgcacggtctgtaacccatatccttcggggcacgacggccaggcgcggggtcagaagggggacgggccgcaccgccgggggtcgggggggaagaagacccaccgccaggtgagtcgaagtgagcccggagggtaggcggatggggggggggctgccagggaggggagggggcaccagagtgggagcggagacgcgagcaggtctcgtcggtaacccgggcttaccccacctgcgtacacacacctcagtcttcctgggttgggggggtggggatccaggccaggagaagagagctgtgccccgctggctcgcagctggacgccctccagatgtggtcaggggagggtcgtcatcctccagatgtgggaagc

SEQ ID NO: 1080 - DNA, 6654 bp, Homo sapiens
  misc_feature (554)..(554): n equals a,t,g, or c
  misc_feature (640)..(640): n equals a,t,g, or c
  misc_feature (650)..(650): n equals a,t,g, or c
  misc_feature (953)..(953): n equals a,t,g, or c
  misc_feature (1019)..(1019): n equals a,t,g, or c
gaaactgtcttctactgactgtttcaaaaccgaggccttcacatccccggaggccctgcagcctggggggactgccctggcgcctaagaagaggagccggaaaggccgggcaggggcccatggactctccaaaggcccgctggagaagcggccctatcttggcccggctctgctcctgactccccgagacagggccagtggcacacaaggggccagtgaggacaactctggtggaggaggcaagaagccaaagatggaggagctgggcctggcctcccagcccccggagggcaggccctgccagccccagacaagggcacagaaacagccaggccacaccaactacagcagctattccaagcggaagcgcctcactcggggccgggccaagaacaccacctcttcaccctgtaaggggcgtgccaagcgacgacgacagcagcaggtgctgcccctggatcccgcagagcctgaaatccgcctcaagtacatttcctcttgcaagcggctgaggtcagacagccggacccccgccttctcacccttcgtgcggngtggagaagcgagacgcgttcaccaccatatgcactgttgtcaactcccctggagatgcgcccaagccccacaggaagccttcctnctctgcatcntcttcctcatcctcgtcatcgttctccttggatgcagccggggcgtccctggccacactccctggaggctccatcctgcagccgcggccctccttgcccctctcctccacgatgcacttggggcctgtggtttccaaggccctgagtacctcttgccttgtttgctgcctctgccaaaacccggccaacttcaaggaccttggggacctctgtgggccctactaccctgaacactgcctccccaaaaagaagccaaaactcaaggagaaggtgcggccagaaggcacctgtgaggaggcctcngctgccgcttgagagaacactcaaaggtcccgagtgtgcagctgccgccactgccgggaagccccnccaggcctgacggcccagctgacccggccaagcagggcccactgcgcaccagtgcccggggcctgtcccggaggctgcagagctgctactgctgtgatggccgggaggatgggggcgaggaggcagccccagccgacaagggtcgcaaacatgagtgcagcaaggaggctccggcagagcccggcggggaggcccaggagcactgggtgcatgaggcctgtgccgtgtggaccggcggcgtctacctggtggccgggaagctctttgggctgcaggaggccatgaaggtggccgtggacatggtaagaggccagcccagccagggtggggagtgtggggttccaaaggacaggcaggcaggcagtcggggagccccttgtttctagtgctacagtgtgggccaaatgtgtctgcagtctcgggacaatctgcagagtcctgagcctctctggggtgtgtgggggaagtggaggcacccatctggctaaggcaggtcacactcacctaccctgtcccaggagacttcccgccggggcccgtatgcccagccaccgccactctcccactcacctggcatcttcaggctccagccccacccagaatccactgggcccctccccatgctgtcaccggagatgccaaggcccagagaacacgaggactcccaagattgaacatcagggctgccccgggcggtgcaagagcaagttgcccaccctctgttcctgtctccattgcctctgggatgaagctaagggctcaggaagaccctctctggcgacacaggcttggtgcatggacccagtcacagggttcctccctctgcaggacagtccatggggtcacacagtcacaacaggcagggcggggcagatccagaccctctcaccattggctctgagaccagctttggaagccatagtcactgagcaccaacatgagagagggaactctggggctgtgccgccatgcacctttggggctgtgacctgccctctctgtgcctccgtcccctcgcccctaacgtgggtatgagggtgcccatggaggaggggtcgggagggttaaaaggtgggcacctctgagcccaccgagcacagcagccctgtgatagtcagtgcagaggggcctggtggctctggtgacagcagggtgacgttcttcgtggtgtcaccacttccccagtaccatagagtacctctgtgcccttctgagggaggggtcagtgggggcggtggggtgcacctctcccccggggccatgcttctgcccccacattcaaccccgactccactgcctcatccagacttccgtggagtgacgctcccggctctcagcgctgtgtggtggctctcagtggggacgcctgcagccttctctggcccctgccctgagtcccatcccctccactccttccttcaacccactatgtgcggctgaggtcacaggggagccagaggggcttggcaggggtctccagaggccctggacaaacactgcctgcatctgagtgattcagtgacccagcacagtggccccagccggtggcttcgcccctccccctgcccagcctcctcccccgtcgctgcactgcccacctgctcctcgcagtacacccctgcagcccctctgagcagcccctgctcctgacagttgccgtggcattgcctggccaaaccaaggtcccggtgggggcccactgtgtttgccacccacgcctcctagtgtgtgtcttgggcacctgcttcccactgcccatggggatggctggagaccttctccacgcccagacgccctgcccacctcactccaccctccacctcagaggaaggctggccccgacaggactcctgcaggttcctggtgccgcgggccttgcttacccagcagatggtggccttgggcctcttccctctccccttcccagttagtgattttttgcctctctcctgctttctgtctctctctgtctctctctctctctctctctctctctctctctctctctctctctctcattactggctccttcccagcgccttgaaacaggttcaagtctctcccgtcatcaaaaaataataaccctcagatcaccagccccagctggctgccacctcccctgcttcacagccccattcctgaaagccttgtccccacggcatcctcggtcccgcagcctcaccaggggctccccgacactcacgtcccaccaggctgagatcaggtcgtctccacatcccctgcagccagcactggccggccgaagggaggaggggtcagccccgagcaccgaccaccccatcctgtccctggcccatgggtgtcttaaccgcccatgcacacacaaggtcctgctggactgaggagacagtgtgtgttggagaggcgctagcttccctacaccacgcgggggctggaacttgccagcccagcccatgcctgtctgctgtgccatgctccagaaatggcctgacagcctgcgcaactagggctgccccgggaaggtcggaaccaggaacaccctgccagacagatgggacatcctgggagaatgggcagagtctggggcttcccagggtcacttttggctcaccaccccttcctgcctcagtggcttgggggcgccatgctccttggagtgagaccctggttcaaatcccagctctgccgagggctggttccatagctccaggcgagtcacgcatgctctgagaactccacaatgtcaaaccccgttagcaggattgtggggttctgtggatcatgtgggacctgcctggcatgtggaaggggcttggggtgcagctgtgtccctggccccagcactgccacacccctcggtaccttgacctcacttttgcgctctggagggcagaacctctgagccagctctcagggataccttttttcctcgatggccttttctgggaactgccctcgcctgctatctctgagccctgcctgcccttcccccaaagccatcatagacccctacctcctatccagatggagcctggccatggaatgcttggggtgagagggacccatagcgggctccgggcattgttagggggctaggtggtgtctgcagaggccccacctgtggcagggtttacatgccgccacccctgccctcctcttgggtagctggggtcagaagggcctgaggcctcactctctctgcatcttagtttcttcacatctaaaatgctattcatatgcctgcctgagggtggttggggcctccgtgcagtaagtggagagaagccttcagccagaggacccccatatgcttaaacatccagacaccaagggccactcacagacagcagccggcttgtgtttcgtcatcccttttgggtcaggaactggggacgctggactccagatctccaggaggccatcccagactaggcgggaaggaggcctcagccctgagctgaaaacctgaaattctagaataaaccccaggccccactcccagcatgggcagcggggaggggagtgttctgacatttctcagctgctgtggttgggatggtgcgcccaccctgagcatgtggggtcctgtgggcccctactccagcctggaggcagctgcaggggtcagagaccagcctggagccctcgggcaggttactcagcctcagctctcattggtaacccaggtaaaataacagtaatcccatcataaggttgctgtgggcatgaggcttccagccatgcctggcacataggaagctattgtcgtttgtttcactggcttcgcacttgggcagaggccgccgccctctctgctgccttctctacctcaccccccgcccccagcacggtggcactgtggctctggcgcctggtgacttctccctccccggcctcaggtttgcttcactcttccaagggccttcttggtgtgactgtcctgtcctggccacgtccactccaagcagctggtccaggtgtggggcagcccccaagctcagcagaggacagttttgagacttagaggaggacggcatcagatttacatgaagtcagccatctcaagggattaccacgtcaccgcctcctctcacaggtctgagagctggtcccctggagggtgcaggtctcatcctaggtagaacagtcccagcctagcttcaaagtgctcctgctgccagaaagggtagaaaaccatgctgaatgccttcactgttgcctggaatgggagcctcagtttcaccatctgtaaagtgagattaatgaaagggacccacagagggctgttagagccagtaggcggccaggcgcggtggctcacgcctgtaatcccagcactttgggaggctgaggtgggcggatcacgaggtcaggagatcgagaccatcctggctaacacggagaaaccccgtctctactaaaaatacaaaaaattagcctggcgtggtggcgggcacctgtagtcccagctactggggaggctgaggcaggagaatggcgtgaacccgggaggcggagcttgcagtgagccaagattgtgccactgctctctagcctgggcaacagagcaagactccatctcaaaagcaaaagaaaaaagagccagtaggccaggcgctatgtcttacacctgtaatcccagcactttgggaggcctaggcaggcagatcacctgaggtcgggagttcgagaccagcctggccgacacagtgaaactccgtctctactaaaaatacaaaaattagctgggcatggcagcacatgcctgtaatcccagctactcgggaggctaaggcaggagaatcacttgaacacaggaggcagcggttgccgtgagcggagatcacaccattgcactccagccccggggggacagagtgaaattctgtctcaaaaaaaaaaaaaaaaaaaaaaagcaagccagtgggcaaggacacacaccacgcccagcacaccagaagcatgcagcagatgctggctggtagccacagccatggtagtaactggcatcactggcccaagggggtctccctacccaatgtaccagcccagagggtgctaaatgacccatgtttgtgggcatgtgtaccccagtgctgaacctccttctggtagattttcaagcaccattttggagaagggaggcagggaccacagggggccagccagcctgtacaggttttttgtgttttttttgtttgtttgtttgtttgttttttgaggcagggtctcactcttgcccaggctggagtacaggcagtggcgtcatctcggctcactgcagcctcaacctcccaggctgcagcaatcctcccacctcaccttcctgagtagctgggactacaggcacacaccaccaaccctcactattttttgtagagacagtttcaccatgttgcccaggctggtatcaaactcctggactcaggcgatcctcccaccttggcctcccagagtgctgggattacaggcatgagccactgcacctggcctaccagcctgtaaagcttgagggctgggctccaactggagactcacctgcctttcctttctcttcatcagatgtgttccagctgccaagaagccggggccaccattgggtgctgccacaaaggatgcctccacacctaccactacccgtgtgccagcgatg

SEQ ID NO: 1081 - DNA, 6650 bp, Homo sapiens
gaaactgtcttctactgactgtttcaaaaccgaggccttcacatccccggaggccctgcagcctggggggactgccctggcgcctaagaagaggagccggaaaggccgggcaggggcccatggactctccaaaggcccgctggagaagcggccctatcttggcccggctctgctcctgactccccgagacagggccagtggcacacaaggggccagtgaggacaactctggtggaggaggcaagaagccaaagatggaggagctgggcctggcctcccagcccccggagggcaggccctgccagccccagacaagggcacagaaacagccaggccacaccaactacagcagctattccaagcggaagcgcctcactcggggccgggccaagaacaccacctcttcaccctgtaaggggcgtgccaagcgacgacgacagcagcaggtgctgcccctggatcccgcagagcctgaaatccgcctcaagtacatttcctcttgcaagcggctgaggtcagacagccggacccccgccttctcacccttcgtgcgggtggagaagcgagacgcgttcaccaccatatgcactgttgtcaactcccctggagatgcgcccaagccccacaggaagccttcctcctctgcctcctcttcctcatcctcgtcctcgttctccttggatgcagccggggcctccctggccacactccctggaggctccatcctgcagccgcggccctccttgcccctctcctccacgatgcacttggggcctgtggtttccaaggccctgagtacctcttgccttgtttgctgcctctgccaaaacccggccaacttcaaggaccttggggacctctgtgggccctactaccctgaacactgcctccccaaaaagaagccaaaactcaaggagaaggtgcggccagaaggcacctgtgaggaggcctcgctgccgcttgagagaacactcaaaggtcccgagtgtgcagctgccgccactgccgggaagccccccaggcctgacggcccagctgacccggccaagcagggcccactgcgcaccagtgcccggggcctgtcccggaggctgcagagctgctactgctgtgatggccgggaggatgggggcgaggaggcagccccagccgacaagggtcgcaaacatgagtgcagcaaggaggctccggcagagcccggcggggaggcccaggagcactgggtgcatgaggcctgtgccgtgtggaccggcggcgtctacctggtggccgggaagctctttgggctgcaggaggccatgaaggtggccgtggacatggtaagaggccagcccagccagggtggggagtgtggggttccaaaggacaggcaggcaggcagtcggggagccccttgtttctagtgctacagtgtgggccaaatgtgtctgcagtctcgggacaatctgcagagtcctgagcctctctggggtgtgtgggggaagtggaggcacccatctggctaaggcaggtcacactcacctaccctgtcccaggagacttcccgccggggcccgtatgcccagccaccgccactctcccactcacctggcatcttcaggctccagccccacccagaatccactgggcccctccccatgctgtcaccggagatgccaaggcccagagaacacgaggactcccaagattgaacatcagggctgccccgggcggtgcaagagcaagttgcccaccctctgttcctgtctccattgcctctgggatgaagctaagggctcaggaagaccctctctggcgacacaggcttggtgcatggacccagtcacagggttcctccctctgcaggacagtccatggggtcacacagtcacaacaggcagggcggggcagatccagaccctctcaccattggctctgagaccagctttggaagccatagtcactgagcaccaacatgagagagggaactctggggctgtgcgccatgcacctttggggctgtgacctgccctctctgtgcctccgtcccctcgcccctaacgtgggtatgagggtgcccatggaggaggggtcgggagggttaaaaggtgggcacctctgagcccaccgagcacagcagccctgtgatagtcagtgcagaggggcctggtggctctggtgacagcagggtgacgttcttcgtggtgtcaccacttccccagtaccatagagtacctctgtgcccttctgagggaggggtcagtgggggcggtggggtgcacctctcccccggggccatgcttctgcccccacattcaaccccgactccactgcctcatccagacttccgtggagtgacgctcccggctctcagcgctgtgtggtggctctcagtggggacgcctgcagccttctctggcccctgccctgagtcccatcccctccactccttccttcaacccactatgtgcggctgaggtcacaggggagccagaggggcttggcaggggtctccagaggccctggacaaacactgcctgcatctgagtgattcagtgacccagcacagtggccccagccggtggcttcgcccctccccctgcccagcctcctcccccgtcgctgcactgcccacctgctcctcgcagtacacccctgcagcccctctgagcagcccctgctcctgacagttgccgtggcattgcctggccaaaccaaggtcccggtgggggcccactgtgtttgccacccacgcctcctagtgtgtgtcttgggcacctgcttcccactgcccatggggatggctggagaccttctccacgcccagacgccctgcccacctcactccaccctccacctcagaggaaggctggccccgacaggactcctgcaggttcctggtgccgcgggccttgcttacccagcagatggtggccttgggcctcttccctctccccttcccagttagtgattttttgcctctctcctgctttctgtctctctctgtctctctctctctctctctctctctctctctctctctctctctctctcattactggctccttcccagcgccttgaaacaggttcaagtctctcccgtcatcaaaaaataataaccctcagatcaccagccccagctggctgccacctcccctgcttcacagccccattcctgaaagccttgtccccacggcatcctcggtcccgcagcctcaccaggggctccccgacactcacgtcccaccaggctgagatcaggtcgtctccacatcccctgcagccagcactggccggccgaagggaggaggggtcagccccgagcaccgaccaccccatcctgtccctggcccatgggtgtcttaaccgcccatgcacacacaaggtcctgctggactgaggagacagtgtgtgttggagaggcgctagcttccctacaccacgcgggggctggaacttgccagcccagcccatgcctgtctgctgtgccatgctccagaaatggcctgacagcctgcgcaactagggctgccccgggaaggtcggaaccaggaacaccctgccagacagatgggacatcctgggagaatgggcagagtctggggcttcccagggtcacttttggctcaccaccccttcctgcctcagtggcttgggggcgccatgctccttggagtgagaccctggttcaaatcccagctctgccgagggctggttccatagctccaggcgagtcacgcatgctctgagaactccacaatgtcaaaccccgttagcaggattgtggggttctgtggatcatgtgggacctgcctggcatgtggaaggggcttggggtgcagctgtgtccctggccccagcactgccacacccctcggtaccttgacctcacttttgcgctctggagggcagaacctctgagccagctctcagggataccttttttcctcgatggccttttctgggaactgccctcgcctgctatctctgagccctgcctgcccttcccccaaagccatcatagacccctacctcctatccagatggagcctggccatggaatgcttggggtgagagggacccatagcgggctccgggcattgttagggggctaggtggtgtctgcagaggccccacctgtggcagggtttacatgccgccacccctgccctcctcttgggtagctggggtcagaagggcctgaggcctcactctctctgcatcttagtttcttcacatctaaaatgctattcatatgcctgcctgagggtggttggggcctccgtgcagtaagtggagagaagccttcagccagaggacccccatatgcttaaacatccagacaccaagggccactcacagacagcagccggcttgtgtttcgtcatcccttttgggtcaggaactggggacgctggactccagatctccaggaggccatcccagactaggcgggaaggaggcctcagccctgagctgaaaacctgaaattctagaataaaccccaggccccactcccagcatgggcagcggggaggggagtgttctgacatttctcagctgctgtggttgggatggtgcgcccaccctgagcatgtggggtcctgtgggcccctactccagcctggaggcagctgcaggggtcagagaccagcctggagccctcgggcaggttactcagcctcagctctcattggtaacccaggtaaaataacagtaatcccatcataaggttgctgtgggcatgaggcttccagccatgcctggcacataggaagctattgtcgtttgtttcactggcttcgcacttgggcagaggccgccgccctctctgctgccttctctacctcaccccccgcccccagcacggtggcactgtggctctggcgcctggtgacttctccctccccggcctcaggtttgcttcactcttccaagggccttcttggtgtgactgtcctgtcctggccacgtccactccaagcagctggtccaggtgtggggcagcccccaagctcagcagaggacagttttgagacttagaggaggacggcatcagatttacatgaagtcagccatctcaagggattaccacgtcaccgcctcctctcacaggtctgagagctggtcccctggagggtgcaggtctcatcctaggtagaacagtcccagcctagcttcaaagtgctcctgctgccagaaagggtagaaaaccatgctgaatgccttcactgttgcctggaatgggagcctcagtttcaccatctgtaaagtgagattaatgaaagggacccacagagggctgttagagccagtaggcggccaggcgcggtggctcacgcctgtaatcccagcactttgggaggctgaggtgggcggatcacgaggtcaggagatcgagaccatcctggctaacacggagaaaccccgtctctactaaaaatacaaaaaattagcctggcgtggtggcgggcacctgtagtcccagctactggggaggctgaggcaggagaatggcgtgaacccgggaggcggagcttgcagtgagccaagattgtgccactgctctctagcctgggcaacagagcaagactccatctcaaaagcaaaagaaaaaagagccagtaggccaggcgctatgtcttacacctgtaatcccagcactttgggaggcctaggcaggcagatcacctgaggtcgggagttcgagaccagcctggccgacacagtgaaactccgtctctactaaaaatacaaaaattagctgggcatggcagcacatgcctgtaatcccagctactcgggaggctaaggcaggagaatcacttgaacacaggaggcagcggttgccgtgagcggagatcacaccattgcactccagccccggggggacagagtgaaattctgtctcaaaaaaaaaaaaaaaaaaaaaaagcaagccagtgggcaaggacacacaccacgcccagcacaccagaagcatgcagcagatgctggctggtagccacagccatggtagtaactggcatcactggcccaagggggtctccctacccaatgtaccagcccagagggtgctaaatgacccatgtttgtgggcatgtgtaccccagtgctgaacctccttctggtagattttcaagcaccattttggagaagggaggcagggaccacagggggccagccagcctgtacaggttttttgtgttttttttgtttgtttgtttgtttgttttttgaggcagggtctcactcttgcccaggctggagtacaggcagtggcgtcatctcggctcactgcagcctcaacctcccaggctgcagcaatcctcccacctcaccttcctgagtagctgggactacaggcacacaccaccaaccctcactattttttgtagagacagtttcaccatgttgcccaggctggtatcaaactcctggactcaggcgatcctcccaccttggcctcccagagtgctgggattacaggcatgagccactgcacctggcctaccagcctgtaaagcttgagggctgggctccaactggagactcacctgcctttcctttctcttcatcagatgtgttccagctgccaagaagccggggccaccattgggtgctgccacaaaggatgcctccacacctaccactacccgtgtgccagcgatg

SEQ ID NO: 1082 - DNA, 460 bp, Homo sapiens
aggctggagtgcagtggtgcgatcttggctcactgcaacctccgcctcccgagttcaagcgattctcctgcctcagcctctcaagtagctgggactacaggcgtgcaccaccacgctcagctaatttttgtattttttgtagagatggggtttcactgctttggacaggatggtctccatctcttgacctcgtgatccgcccgcctcagctgcctaaagtgctgggattacaggcgtgagccactgtgcccggcccctagtagcgtttttaatgtgtggtcttgagcaagttggttgatacctctgcacacagtttccctacctgtatgatggagatgataatagccccttctctgcagagctgctgggaggagagtgaaataatgaacactacccacacggtgctgcctcagtcctattttgggtccagcctctgtgacctctccccacacggtgctgc

SEQ ID NO: 1083 - DNA, 400 bp, Homo sapiens
accctcttcaagaggatgtcttctcccaagaaagccaagcccaccaagggcaatggcgagcctgccacaaagctcccacccccggagacccccgatgcctgcctcaagctcgcctctcgggcagccttccagggggccatgaagaccaaggtgctgccaccccggaagggccggggcctgaagctggaagccatcgtgcagaagatcacctcgcccagcctcaagaagttcgcatgtaaagcgccaggggcctctcctggtaatcctctgagcccatccctttccgacaaagaccgtgggctcaagggtgctgggggcagcccagtgggggtggaagaaggcctggtaaatgtgggcaccgggcagaagctcccaacttctggggctgatccgttatgca

SEQ ID NO: 1084 - DNA, 400 bp, Homo sapiens; identical to SEQ ID NO: 1083

SEQ ID NO: 1085 - DNA, 460 bp, Homo sapiens; identical to SEQ ID NO: 1082

SEQ ID NO: 1086 - DNA, 1122 bp, Homo sapiens
ccagggcccagcatcagaagccggccgttttgatagacgtgttccctctgcgtccttgcagccttccatctgtgctacctcccaggaagccgaaggccgcagagtccctttcggatggcactgggagcaggaaaatgaggtgattatgggctgctgctccaagaagtattggcagctgttgctggggcggctccctggggtgtcatccctttcttgctcttgtggatgggaaccagagcaccccacttcaaagactctgtaagccagggcttaccagagaaagctgaagagtctagggccaattttaatcagtttcttgtgcttctcatgccaaaagagatgattgtcctcactatagttcatcctatagtgcggcgggcctgactcgctactgccctctaatgttctgggagagaagctgttgggtctttcctacctaatctggtagaaatgttagaacagaggctaatttggggaaataaatctctcaatttttttgagttgctttgtgtgtgtgcgcgcgcgcatgtgtgtgtgtaaggggcagggtctctaagaaagaaagaaaaggaggcgagaggaggaaagaacctgtttcagtttcccaggctctggcaaggtgactgaggaagcgccaagccccttagcctctttgggctctggttacctcatcagtaacattagaaggttttatacatgatttatccttttttattcagctcttatagtctataaatctccagtaagttgtggaaataaactgtcttttaaaaatctttaaaaaaccattttccggccgggcgcggtggctcacgcctataatcccagcactttgggaggccgaggcgggtggatcacgaggtcaggagatcgagaccatcccggctaaaacggtgaaaccccgtctctactaaaaatacaaaacattagccgggcgtagtggcgggcgcctgtagtcccagctacttgggaggctgaggcaggagaatggcgtgaacccgggaggcggagcttgcagtgagccgagatcccgccactgcactccagcctgggcgacagagcgagactccgtctcaaaaaaaaaacaaaacaaacaaacaaacaaaaaaaacaaaaaaaaaa

SEQ ID NO: 1087 - DNA, 1120 bp, Homo sapiens
ccagggcccagcatcagaagccggccgttttgatagacgtgttccctctgcgtccttgcagccttccatctgtgctacctcccaggaagccgaaggccgcagagtccctttcggatggcactgggagcaggaaaatgaggtgattatgggctgctgctccaagaagtattggcagctgttgctggggcggctccctggggtgtcatccctttcttgctcttgtggatgggaaccagagcaccccacttcaaagactctgtaagccagggcttaccagagaaagctgaagagtctagggccaattttaatcagtttcttgtgcttctcatgccaaaagagatgattgtcctcactatagttcatcctatagtgcggcgggcctgactcgctactgccctctaatgttctgggagagaagctgttgggtctttcctacctaatctggtagaaatgttagaacagaggctaatttggggaaataaatctctcaatttttttgagttgctttgtgtgtgtgcgcgcgcgcatgtgtgtgtgtaaggggcagggtctctaagaaagaaagaaaaggaggcgagaggaggaaagaacctgtttcagtttcacaggctctggcaaggtgactgaggaagcgccaagccccttagcctctttgggctctggttacctcatcagtaacattagaaggttttatacatgatttatccttttttattcagctcttatagtctataaatctccagtaagttgtggaaataaactgtcttttaaaaatctttaaaaaaccattttccggccgggcgcggtggctcacgcctgtaatcccagcactttgggaggccgaggcaggtggatcacgaggtcaggagatcgagaccatcccggctaaaacggtgaaaccccgtctctactaaaatacaaaacattagccgggcgtagtggcgggcgcctgtagtcccagctacttgggaggctgaggcaggagaatggcgtgaacccgggaggcggagcttgcagtgagccgagatcccgccactgcactccagcctgggcgacagagcgagactccgtctcaaaaaaaaaacaaaacaaacaaacaaaaaaaaaaacaaaaaaaaaa

SEQ ID NO: 1088 - DNA, 518 bp, Homo sapiens
atgatttttaaacagatttggcacaggagtgcctttctgggtttagggaagtggtggacaaggcaggagagaaccacattcatcttctcctcttgtgtttgtcttctgtctttcaataacgtccatgaactgtgaggttagtgtcttggctgagagataagtatggcttggcattgattcttctgttgttacctcaagctgttttctagtccccaagaacagcactctcagtgggtgtggaagtgggcgggacatgaagcaatggttttacattgcattgcctggctacagcttggcatttctttcctttttctttttctttgcgtcattgccattggtgccactaattttgcttcccctctcttttataacttgtttcttcgggagttgcctagagtctctgcattatatcttatttggtattgaggcagtgtgttcttggccaataacctaggagatgatatctgttcatcttacaggtttagtgctggaggaattcattaaaaataataataaaa

SEQ ID NO: 1089 - DNA, 3598 bp, Homo sapiens
atggggcggccctggccagaagcggaggaggtggcacccgggaccgagctggggtcttggaggaagagagggtgaggggaatacagtactgggggtgagagaagggttggacagaagagggtcgggtatctgggcatgcgcagggccgcaggactcttggtggggtagcgagggggacggtcccacgactgctccgaagggccgggactcccagtgggggcgggacccccggagtgcccgcctgcggactcccaagcctggagcctggggagagggtgggcacctccgttcccgcacacccgtccatggtgtgtgcgccgagcgtccaggagccacggcggtgtcttccttgcgcgtcttttacacgtgtgggggtaggctgctcctcggggctgagccgtggccagggttatggagaggcccgcctctccccagatggcgtcgtcgagccctgactccccatgttcctgcgactgctttgtctccgtgcccccggcctcagccatcccggctgtgatctttgccaagaactcggaccgaccccgggacgaggtgcaggaggtggtgtttgtccccgcaggcactcacactcctgggagccggctccaggtgggttagactttatggggtgctgggaggtgtggcagatctctgcattcttttaagaccttcttccctgctccccacacctgggaggctgccagaagtagtggaagagcatgagctttaggtctaccaacctggacctgagctcattatgtagcctcagtctacctcagtttcctcttctgtaaaatgggaatgagaccttcctcaaagggatctataaggtaattggcagagtgccacactcgaggggccgcccctctatgagtggacgcttcctttctcctccctcacctccagtgcacctacattgaagtggaacaggtgtcgaagacgcacgctgtgattctgagccgtccttcttggctatggggggctgagatgggcgccaacgagcatggtgtctgcattggcaacgaggctgtgtggacgaaggagccagttggggagggggaagccctgctgggcatggacctactcaggtgcagaccctgcccttcctcatctgcctgacacaccagaaatctaggggctgagttttgacctgggcccatccatccctcccccagcctggttcacaggggcctcctcctctctgcagactttgcccttgtgccttcgtgaagaaggctgcagcagcagccacctttgggcctctcctggcccagaaatagagcagtggttatttatttattttcagttgaaatcttacatagagtcccaatttataaaaccagtaatagtggatggagcagctctgggtggagagaggttaggggctcaggacacttctctctctgaaactgtgtttcaggccttttcatggaaccctcaaagcatagcacatggaaccagagcattgaaagccactggcataattgcatttgatacgatcagtgccagcagatttgctgtgtgacttgggcctatcaccaaacctctccgggcctcttctgtcccctggagcttctgccaccagccattgatccctctgtcacccttctgtcccttggccctctcttttgccaggctggctttggaacggagcagctctgcccaggaggccttgcatgtgatcacagggttactggagcactatgggcaggggggcaactgcctggaggatgctgcgccattctcctaccatagcaccttcctgctggctgaccgcactgaggcgtgggtgctggagacagctgggaggctctgggctgcacagaggatccagggtgaggtgttccctttctcccagctttgggaagtgggagagatggtaggggcagggaggggcccgatccaggtgcaagcctgtcaggacatccagggagatgggagatgagcccacttgggaattctcctccccttcacttggttaagtcttccgtgtgctacagcctgttgcttcctctgggaagccttcctggacttccctgggtggtcaggtttcctgcttatatgcaagcaggtacttctttttcatcgcattcaacacagttgcatgcttacatttatctctgtgattattttgtctgcctcccccaccaaaacgtaggctccatgagggtaggtagttctcttctccaccatgttctcagcacctcgcccagtgcctggcatagaatagatgctcaatggtaaatgaaccactccccgatctcctccacagagggggcccgcaacatctccaaccagctgagcattggcacggacatctcggcccaacacccggagctgcggactcatgcccaggccaagggctggtgggatgggcagggtgcctttgactttgctcagatcttctccctgacccagcagcctgtgcgcatggaggctgccaaggcccgcttccaggcagggcgggagctgctgcggcaacggcaaggttagtgaacggtggagggggctgggggccaggagggccacagcagtgccagccactctcccctcccacagcttccccctctactccttggcagggggcatcacggcagaggtgatgatgggcatcctcagagacaaggagagtggtatctgtatggactcgggaggctttcgcaccacggccagcatggtgtctgtcctgccccaggatcccacgcagccctgcgtgcactttcttaccgccacgccagacccatccaggtgggaagaatgagggtggggaaggctggggagaagagaggatctgatatatctccgtgcttccatctgtgcccctctaggtctgtgttcaaacctttcatcttcgggatgggggtggcccaggccccccaggtgctgtcccccacttttggagcacaagaccctgttcggaccctgccccgattccagactcaggtagatcgtcggcataccctctaccgtggacaccaggcagccctggggctgatggagagagatcaggtatcccccagggagtaggggctaccttgaggggatgatagacctcccccactcccagtgggactctggaaatatgaaggaactagggagtggaagagatttcagagctggggagaggagttcctcccttcaaagccagcaactgcctttggggaatgtcggggggtatctcctttctcctgcttgtgtgaggtggtacacagtccccccttcacctggcgggaagcctgtcccggacagactcatctcagctttcccttggggcaggatcgggggcagcagctccagcagaaacagcaggatctggagcaggaaggcctcgaggccacacaggggctgctggccggcgagtgggccccacccctctgggagctgggcagcctcttccaggccttcgtgaagagggagagccaggcttatgcgtaagcttcatagcttctgctggcctggggtggacccaggacccctggggcctgggtgccctgagtggtggtaaagtggagcaatcccttcacgctccttggccatgttctgagcggccagcttggcctttgccttaataaatgtgctttattttctcttcagtgaa

SEQ ID NO: 1090 - DNA, 5689 bp, Homo sapiens
tttagaatcaggtggctcactgagctctgtattttgtttcctggagctttcactggtttcttcccctgagataccccaagtgacatgaaaagcatactcagggcctagagacactttactggggatgggcttctgtcacaggtcagaggtctgagaagaggggcaggccccactcctctccactagtagagaaaggttgacagagaatcatttcttgcttctcttggccgtagttttggttgtgctgggggcctcagccacagaggccttgggggctgtggctgctcgtgcccccttccttccccagaaagagctttggtggcccctgggaatcagactgcatggtttcttggtgggagaggaggcctggggtgaggagacggcctcagggactgtctcctccccttgcgcaggagtggcagaagggctgctgtccccagccatgggcaccccaggtagcaggggcaggtcggtgagggtgggctgcatctccatcctcagcaggtgctctgtcagggccgtctgttgccggtgctccctgtgcctgctcagctcctgctccagctccttgaggaagcctgggaggggccgggggtggagggtacagggtgggtggagccctgggctcagcaggagggtccctgggctcagggaagtctctggctggccccttgtcccttgtgggaaggagcctgaggctggggcccaggactgacacctggctctggcccagatgttgatctgaacttggggctcccctccccggacgccactgccaccttagcttccctcatgtcccacagggcagaggtgggctctggggaggctgaaaaccttggaaagcagggtcacctcgttctgagcagaatgggccactcagctctgggaactcctcatcgcttgaggcttcatcctcctcatccgaaatccagcgctccaccacaggctgcccgtccaggtccaggagaagtggcagggcttctgtcaccagctcgctgcagagcagaaggagcagaggttacccaggagggcaccctggcgtggaggatgcaaagacacgcaccacagcactcacacccggaggggtggtggctcatgagctaggtaggaggtgggggagaaggtgtcatggacaggaccccaggtttgcaggctgagaggggtctgggctgagttagcaggtagagctcagccatgacctttcttcccaccctccactccttaccggtagccatcctggttggtgcagctgtttccagacaggttgaggatgagaaggctctgggggaactcatctgcacacagcaaagagagaggaaatggggttctcacttgatcttagccaaaagaccatgaagcgatgggaatggggttctcatacccactttctagtccaaagccagtacctctaggcacaaccccttgaactccctgaggatgaaatgtggacctgcaggggcatggctaatagaagcatgggcagatgggtgcagaggggagggcaggccccacaggggatgtgtttggtgagccagggcgagtgggttcctacccagcttcaatgtttctatcaggttctcagaaaggtccagaaactggaggcatgggaggtcgaggaggttttccacctgcctgatttggtttcctgccagagacaggaagctgtaggggaaggaaggggtacagaggcagagctgaatcatggaacagctggaagaaaagaggagggcacctgacaccggggcccctgggctaggcagctgatgaccagtggggacacatggccttctggggtgagggagtagatctaggcttgctggtccttgactgacaaggacccaggcttggagaaatctgaaccagttctttgggatatggctaggttcccccaacccctcttcccctgcctgagccctggcaccacataccgcaaggaggggatgcaagccaggttctcaatttgctggatcttattctgcaagaagaaaccgaagtggggaaaccaagctgagatcagatgcgtcaggggccctttacggggacaaagccccaagaccatgtctactctgcagctggagatctggcactttgggaatgatcaccccactccttgaacaggttgccactaccttaagaaagatgattttctttccccatgtggatggttaagggtgtaaacctggggtatctaaacctgactacgtatactcttctgattccacaaccaaagagtgacctgggaatcagaaaaggaaactaagaagccaccaggaaaacggaaagggccttggtggtggcttgcatacacagagagaacaatgagcatacaggaacttgacggttaaagtttctatggggaaagttgaagcgagctgggaatactcaaccaggggaaggctgaagatcaaccaaccaccaccaccaccaccaaacagccttcaagtaggatctgaatgatgtacaggaatcttcatagtttcctcttcttcaaaacaggaaatgggctggagctatttaacgtgaaagatttagagtagatgccaaaaagaacttctagatcaagagaagtgcctaaagaacagtggaaggagcacaggtcatgttcaggatctattttgagggaattagtttttcaattcaggaccctatgtcattcgtctgggaatggtttaaatgaaggtctgcctgcctgaacaccagggaatgggcaggatgacctggttggctcctttcagatgagacagattaggtccacaggggtcaaggggaggggaagggtggagaaagaagttaccccttgcagatagagactgtgaagattctggaggccttctaagttcctgatagtagtaatcccctcccggtccaggcggacagtctgcagttcatcaagagtgtgaaacctgggaaaagagtcagtaagggtggtgttagagcaccactcatgtggtctcttagcagggaggatgggagacggaggagggaaggggtttcaaggaggggtagttggctgagtcattttaatcagatgtgagaaacatcttgacatcttgaggtggtgtctagatcatgaaaccggcttgacttgcagactcgtatctctattgttagcactgggaagggtgagagagaggagtaagggccctctgggaaattgggggatggcagcttatggtttctggagagattcagaggcaagagaaaccttcctctggccagcttggatggtggaggcaggggtgggacagagatgagacactgcagaaagatccttcctcaccttccttttgagtcgttcatggagaaaaaagcacttgttccatccacccattcattcattccacaacattgctgagtgcctactagagacaaatgacagagtctctgcccaccactaataaagaagcagggcaggctgaccatggtggcttaccctgtactcccagcactttgggaggccgaggcaggaggatcgctcgagcccaggaggtcgaggctgcagtgtgccatgattatgccactgcacttcagcctgggtgacagagcaagaccctatgtcataaaaaaaaaaaaaaaagaggctgggcgaggtggctcactgtaatcccagcactttgggaggtcgaggtgggtggattgcctgaggtcaggagttcaagaccagcctggctaacatggtgaaaccccatctctactaaaaatacaaaaaaaattagccgggtgtggtggcgcacacctgtagtcccagctactcgggaggctgaggctggagaatcgcttcaactcaggaggcagacgttgcagtgagccgagatcacaccattgcactccagcctgcgcaacagagtgagactccgtctcaaaaaaaaaaaaaaaaaataggaagaaggccaaacatctatgacaagtggataacagaggcaagtacaggggaaaggaagaaggaggaggaagaagggaaagaaggaggaagaggaagaagaaagaaagaaagaaagaataaggccaaacatccctgacaagtggataacagaagcaagtacaggggacaaagggagtacataggctgtgcactaaattcacagtaggaggaatcagggaatgcttcctagaggaggtgacagatgagtaggcattagccatgaaggtggggggatatggggagaaggcatttcaagcagaaggaatagtacatgctaatacagcccttccgaaactccaatatgcccatgcagattctaattcagtagatcgggtggaggggctgagatgctccacttctaacaagccccctgtgatgccaatgctgctgtcctacccctgcaccccctcccatccacacatactctgagtagtaaggtactaaggtgtgagtacacagtgtgggaaattgtacacttgtggagagtggccagaaataaggctgaaaagcagaagtcaactcatgcttaggcattgggatttatttgggaggaagtttctatcagtgaatgcctgattagatttgttatttaaaaggatcactttggctactcaggaggctgaagtgggaggattgtttgaggagttcaagaccagtctggccaacagagcaagaccccatctctaaaaaagtaattaaaaatactttactttttgtttgttttagaaatagggtctcaccctgttgcccaggctggcatgcaatggcatgatcatagcttactgcagccacaggtacctgggttcaagtgatcctcctgtctcagccacctaggactacaggtgtgcaccaccatgctcagctagtttatttttattttttagagataggattctgtctctattgcccaggctggtctcaaactcctgggctcaagtgatcctcctgcctcagcctcccaaagtggtgggtgtgtaggagagaggtgaacacggccttatctaagacagttgagtgaggatggtgaaaaagaaatggaattattttgaagaagggaaaatcagctgggcattaccactgattgaatgtgtggagtaaggagagaaacaaagatcagttgacaaatcagtacacgtcagggacctggtcatcctgagtgtttcagccttctagcaccccttttctcccccatgcactcacatcttctctgacagttccccatcttcagggaaagtcaagttccgcttagtgataagggcttcagtgatgcagacgcccccttcctctggaccctgggctgacttccctgtgaaaagatgagtccaactgtgacacttcctcactcttggaggccttaccccgctgttttccaactgctctacccaccgtcccacctccctactcacctccagacatgatctaaaataaaaggctgctggtctgaggcgggagaggaacgaaaagagaggtcttggcggcccctaaggatggcagaactcaggatggcaggaggagagagaaactcagagacttaggagaggaggaaagggggttgattcagagaaaattgctggggtgaggtcgaagaaaacagtaaattgatgtgaagggtctggagtttgaggggtgtggaggggctttgctggcagcaagctggggtgttgtgggcaggaatggttgagaaaggagcagttcctaggaagccggagtcgttgctaagagactggacgccgagtggggaggtaaaggcgggctccgttggcccgg

SEQ ID NO: 1091 - DNA, 776 bp, Homo sapiens
  misc_feature (709)..(709): n equals a,t,g, or c
  misc_feature (738)..(738): n equals a,t,g, or c
tacaacgtcgtgactgggaaaaccctggcgttacccaacttaatcgccttgcagcacatccccctttcgccagctggcgtaatagcgaagaggcccgcaccgatcgcccttcccaacagttgcgcagcctgaatggcgaatggcgcctgatgcggtattttctccttacgcatctgtgcggtatttcacaccgcatatggtgcactctcagtacaatctgctctgatgccgcatagttaagccagccccgacacccgccaacacccgctgacgcgccctgacgggcttgactgctcccggcatccgcttacagacaagctgtgaccgtctccgggagctgcatgtgtcagaggttttcaccgtcatcaccgaaacgcgcgagacgaaagggcctcgtgatacgcctatttttataggttaatgtcatgataataatggtttcttagacgtcaggtggcacttttcggggaaatgtgcgcggaacccctatttgtttatttttctaaatacattcaaatatgtatccgctcatgagacaataaccctgataaatgcttcaataatattgccaaaggaagagtatgagtattcaacatttccgtgtcgcccttattccctttattgcggcattgagcctgtctgtttttgctcacccagaaacgctggtgaaagtaaaagatgctgaagatcagttgggtgcacgagtggngtacatcgaactggatctcaacagcggtnagatcctcgagaggtttcgcccccgaagaacgtttttc

SEQ ID NO: 1092 - DNA, 878 bp, Homo sapiens
  misc_feature (741)..(741): n equals a,t,g, or c
gaaaaccctggcgttacccaacttaatcgccttgcagcacatccccctttcgccagctggcgtaatagcgaagaggcccgcaccgatcgcccttcccaacagttgcgcagcctgaatggcgaatggcgcctgatgcggtattttctccttacgcatctgtgcggtatttcacaccgcatatggtgcactctcagtacaatctgctctgatgccgcatagttaagccagccccgacacccgccaacacccgctgacgcgccctgacgggcttgtctgctcccggcatccgcttacagacaagctgtgaccgtctccgggagctgcatgtgtcagaggttttcaccgtcatcaccgaaacgcgcgagacgaaagggcctcgtgatacgcctatttttataggttaatgtcatgataataatggtttcttagacgtcaggtggcacttttcggggaaatgtgcgcggaacccctatttgtttatttttctaaatacattcaaatatgtatccgctcatgagacaataaccctgataaatgcttcaataatattgaaaaaggaagagtatgagtattcaacatttccgtgtcgcccttattcccttttttgcggcattttgccttcctgtttttgctcacccagaaaacgctgtgaaaagtaaagatgctgaagatcagttgggtgcacgagtgggttacatcgaactggatctcaacagcggtaaaaaccttgagagttttcgnccccgagaacgtttttcaatgatgagcacttttaaagttctgctatgtggcgcggtattaatccctatttacgcccgggcagaagcactcggtcgccggatacactattctagaatgacttggttgagtactaacca

SEQ ID NO: 1093 - DNA, 150 bp, Homo sapiens
cgtcgtgactgggaaaaccctggcgttacccaacttaatcgccttgcagcacatccccctttcgccagctggcgtaatagcgaagaggcccgcaccgatcgcccttcccaacagttgcgcagcctgaatggcgaatggcgcctgatgcgg

SEQ ID NO: 1094 - DNA, 1299 bp, Homo sapiens
ttttttttttttttggcaaataaagagtaaaacaggctatttaaaacatccatttaaatgcaaattttgatatcccaagagaaaaatgttaatcatttaaatagacaggattatcgcccacccttaccacttccctcctctcccaagttttagaaaacgtagccttagcccacacaagtcaagtcagccaggagtccttacatcttaagaactcccactcagatgagagggctgaggcagatagagggggacttttccttcttttgaggaaggagatggaaaagagagaaaatagtctaacatatcctataagccaggcatggggcaatattataaatacaaacacacacacacacacacacacatgcatgcacacacacacacccacacttaatcatcacaactgtcttggaacggggaattatcatcctcatctacagacaaggaaactgaggcttagaaaggtgaagcagtttgccccactggtaggtgacccagttgggagtagaggcctccatagccctcccagtccatggtgacctgcggtcctgtccagactcacccagcatccccatgccaagcatgaacgcgtccatggtgtaaggcagtccccgggcccggcctcttgtcccaggtgggaacatgacttctttcggctgagctttcttacattctacctgttaaacagaaaggcgaacaaatgagatgcaaatgaattccacgtaaatgtcaaatgcagaacctgtctggttatgagctaagttatttttagccttgctccttacccactgtaaaaatagccatgccgagtaaatggcctgcaaaataaatacttaagaaaacacgccacttgtgcaaatcctgcttcggaaaaacctacaaggatgaaactgggttctggaggggtggcaaggacgtaagctgcagatatacacacagattgaagctcaggctgacgctcgtgcagaaagcatgacagataaggaggcagacaatggctgttggatgtgtctgtgaataataacaacaatagcaataataataatccctcaggatttttcagccctttacacatttacaaatgcccctgacattctctcaggccagtgactcttcatgccaggccatctgattcaaactcttattaaacagacagaccacttagccttagctccagttcacagatgagaaaacagagcatcagaagttttgtgttggctgggcgtgggggatcatgtttgtaatcccagcactgtgggaggtggaggcaggtgaatcagcttgagcccaggcgtttca

SEQ ID NO: 1095 - DNA, 330 bp, Homo sapiens
tttttaaaaacattttctcatttattctcacttgtttcttcttccagggataagttttagaaacatctggccaatttaaaaaaattacaataggatttctctttgaaactctgttaagcctaaaaaattcatatgaggagaattaacatcatggccatttttaatattctcctggcatctttttctatttcataaagttcctcaaaatagttttacctgcccttgttatttcctcagacaagtagatacaattctttgtcagaccacaagatgttttataaatttaaaattaagccagaagtgatttaaacagcagcaaatctgaaaata

SEQ ID NO: 1096 - DNA, 3328 bp, Homo sapiens
ttgttttgtctcaggttttttttttcttttttttttttgagagggtgtctcgctctgttgacaggctggagtacagtagcacgatctcaggccactgcaacctctaccttctgggttcaagagattctcctgcctcagcctcccaagtagctgggactataggcgcatgccaccacgcccagctaatttttgtatttttagtagagacagggtttcaccattgttggccaagctggtctcgatctctttgaccttgtgatccacccaccttggcctcccaaagtcctgggattacaggcgtgagccactgtgcccagcctggctcaggtttttcaatacagtcttgaccttggcattcagtatcctcacagcatggttctaattaactttctagctctatttcccttttcctgctccctctctctacaactagtctttctctgattgccccgccctcaacccatctaaactagaccccagggaagcaccttggtccccttcctctctcccactcaccatccaaccaatcaccagagcctgtacattctatattttcaacatcgattcaattgtctacttctttctagcctgccctctctgactgggactccttgagccagcctgatcaccccaatccatccctcacactgtgcccatctttctgaagtaggaatctgatcacaccaccctgctaaaaacactctggttctccccacggcatgtggtgcccttgtatagctggcaaagccttgcatggcacggccccagcctgtgcttcaactcaattgcccgactctctccagctctgctgagccacctaagtcacagatggtttctcctctcatctctgctctcttccatgtgccatttctgtggcttggaatgttcttccctcattctctttctggccctttcccgtcacaccttagacgtgcatcttcctctcgaaaacctctagtgaagcctcccagggccaggcagtaccctcctctggcttcttctggatacagaggaagaatctgagcatcgattctccatctcagcaggcctctgtgtgcctgctgactccgactagaccagagatccgtaaggacagggatcgagttttttttcttttaattcactgcctcaaaaatcctctgtgcattacctattcatcctcttctctcccttaacctgaaccagtgatcttactgtctccatcattgtttttttcttttcttttcttttcttttttttttttgaggtggagtctggctcttcacccaggctggagtgcagtgatgcgatctcgactcactgcaacctccatctcctgggttcaagcgattctcctgcctcagcctccccagtagctgggattacaggcatgcgctaccatccccaactaatttttgcctccataattttgccttttctagaatgtcatacaggtggaattactcagtatgctgcctttttcagattggcttctttcacttagtaatatgtttgttttttgagacagggtcttgctctgtcgcccaggctagagtgtggtggtgcgatcttagctcactgaaacctccacctcccaggttcaagtgactctcctgcctcagcctcccgagtagctgggactacaggcacatgccaccatacccggctaatttgtggatttttagtacagacggggtttcatcatgttggccagggtgttgttgaattcctgacctcaagtgatccacctgcctcagcctcccaaagtgttgcgattacaggtgtgagccactgcgccaagcctcatttagtaatatgcatttaaactttctccatgtctttaatggcttgatagctcatttatttttatcatggaatatttcattgtctggatggaccacagtttatttctccattcacctactgaaggacatctcggttgcttctaagttttggcaattatgaataaagctgctataaccatcaagtgcaggtttttgtgtggacctattatcaactaattcgggtaaatctcaaggagtgcaattgctggatcacacagtaagagtgtgtttagttttaagtggctgtgccattttgcattcccaccagcaatgaatgagagtttctgttgctccacattctcactaccattcggtgttgtcagtgttttgcattttggccattctagtaggtgtttacatggtatctagtcatttgaatgggcatatgatgtggaacatctttttttttttaattttattattattatactttaagttttagggtacatgtgcacaacgtgcaggtttgttacatatgtatacatgtgccatgttggtgtgctgcacccattaactagtcatttagcattaggtatatctcctaatgctattggaacatcttttcatgtgtttatttgccatctgtatatcttccctgatgagttggggatgcattctttccatctcagagtccccagaaactaacatagcagttggtacagagttggtgctcaacaaacatcagcttaggaactatgtcctatgtttttttgtttttttttttttttaaaaaggaatgtgagctgttcccaaaacgtatgtccttcccccatgcctctaccctgcccttccacaaactttctgatcttcagcacacactacccaaccatcaaggctgagacttcccgtggccagcagtgtctcatgctggcttcaagccccacagcactgcttttttcaacttctcttgtggtttagactgtctttagcccagcaagagaattcattgtcttatcccccattaaactgtacctacactctttgaggaaaagggtccatcttacttaaaatattttaaaaattcacatgtgataaaactgatgtgtatgtgtatgagagagagagaaagagagaacagttctatgaggcttaatgtatacatgtggctgtgcagcccactgccccatgtcaccattttcaattctgtcattacccctgggacaatgtcttgtcaatatacacttgaggctgggcggggtggttcctgcctgtaatcccacctgtaatcaggagttcaagaccagcctggccaacacagcaaaaccccgtctctactaaaaatacaaaaatttgctgggcgtggtggcacgggcctgtaatcccagctactcaggtggctgaggcaggacaatcgcttgaaccggggaggtggaggttgcagtgagccaagatcgtgccactgcactccagcctaggcaacagagcgagactctgtctcaaaaatacatacatacacacacacatacacacacacgcgcaagagacacagtgagtagaaacaccga

SEQ ID NO: 1097 - DNA, 3051 bp, Homo sapiens
tttttttttttgagagggtgtctcgctctgttgacaggctggagtacagtagcacgatctcaggccactgcaacctctaccttctgggttcaagagattctcctgcctcagcctcccaagtagctgggactataggcgcatgccaccacgcccagctaatttttgtatttttagtagagacagggtttcaccattgttggccaagctggtctcgatctctttgaccttgtgatccacccaccttggcctcccaaagtcctgggattacaggcgtgagccactgtgcccagcctcggctcaggtttttcaatacagtcttgaccttggcattcagtatcctcacagcatggttctaattaactttctagctctatttcccttttcctgctccctctctctacaactagtctttctctgattgccccgccctcaacccatctaaactagaccccagggaagcaccttggtccccttcctctctcccactcaccatccaaccaatcaccagagcctgtacattctatattttcaacatcgattcaattgtctacttctttctagcctgccctctctgactgggactccttgagccagcctgatcaccccaatccatccctcacactgtgcccatctttctgaagtaggaatctgatcacaccaccctgctaaaaacactctggttctccccacggcatgtggtgcccttgtatagctggcaaagccttgcatggcacggccccagcctgtgcttcaactcaattgcccgactctctccagctctgctgagccacctaagtcacagatggtttctcctctcatctctgctctcttccatgtgccatttctgtggcttggaatgttcttccctcattctctttctggccctttcccgtcacaccttagacgtgcatcttcctctcgaaaacctctagtgaagcctcccagggccaggcagtaccctcctctggcttcttctggatacagaggaagaatctgagcatcgattctccatctcagcaggcctctgtgtgcctgctgactccgactagaccagagatccgtaaggacagggatcgagttttttttcttttaattcactgcctcaaaaatcctctgtgcattacctattcatcctcttctctcccttaacctgaaccagtgatcttactgtctccatcattgtttttttcttttcttttcttttcttttttttttttgaggtggagtctggctcttcacccaggctggagtgcagtgatgcgatctcgactcactgcaacctccatctcctgggttcaagcgattctcctgcctcagcctccccagtagctgggattacaggcatgcgctaccatccccaactaatttttgcctccataattttgccttttctagaatgtcatacaggtggaattactcagtatgctgcctttttcagattggcttctttcacttagtaatatgtttgttttttgagacagggtcttgctctgtcgcccaggctagagtgtggtggtgcgatcttagctcactgaaacctccacctcccaggttcaagtgactctcctgcctcagcctcccgagtagctgggactacaggcacgtgccaccatacccggctaatttgtggatttttagtacagacggggtttcgtcatgttggccagggtgttgttgaattcctgacctcaagtgatccacctgcctcagcctcccaaagtgttgcgattacaggtgtgagccactgcgccaagcctcatttagtaatatgcatttaaactttctccatgtctttaatggcttgatagctcatttatttttatcatggaatatttcattgtctggatggaccacagtttatttctccattcacctactgaaggacatctcggttgcttctaagttttggcaattatgaataaagctgctataaccatcaagtgcaggtttttgtgtggacctattatcaactaattcgggtaaatctcaaggagtgcaattgctggatcacacagtaagagtgtgtttagttttaagtggctgtgccattttgcattcccaccagcaatgaatgagagtttctgttgctccacattctcactaccattcggtgttgtcagtgttttgcattttggccattctagtaggtgtttacatggtatctagtcatttgaatgggcatatgatgtggaacatctttttttttttaattttattattattatactttaagttttagggtacatgtgcacaacgtgcaggtttgttacatatgtatacatgtgccatgttggtgtgctgcacccattaactagtcatttagcattaggtatatctcctaatgctattggaacatcttttcatgtgtttatttgccatctgtatatcttccctgatgagttggggatgcattctttccatctcagagtccccagaaactaacatagcagttggtacagagttggtgctcaacaaacatcagcttaggaactatgtcctatgtttttttgtttttttttttttttaaaaaggaatgtgagctgttcccaaaacgtatgtccttcccccatgcctctaccctgcccttccacaaactttctgatcttcagcacacactacccaaccatcaaggctgagacttcccgtggccagcagtgtctcatgctggcttcaagccccacagcactgcttttttcaacttctcttgtggtttagactgtctttagcccagcaagagaattcattgtcttatcccccattaaactgtacctacactctttgaggaaaagggtccatcttacttaaaatattttaaaaattcacatgtgataaaactgatgtgtatgtgtatgagagagagagaaagagagaacagttctatgaggcttaatgtatacatgtggccgtgcagcccactgccccatgtcaccattttcaattctgtcattacccctgggacaatgtcttgtcaatatacacttgaggctgggcggggtggttcctgcctgtaatcccacctgtaatcaggagttcaagaccagcctggccaac

SEQ ID NO: 1098 - DNA, 3029 bp, Homo sapiens
  misc_feature (1)..(1): n equals a,t,g, or c
  misc_feature (4)..(4): n equals a,t,g, or c
  misc_feature (150)..(150): n equals a,t,g, or c
ntancccattgtgcccagcctggctcaggtttttcaatacagtcttgaccttggcattcagtatcctcacagcatggttctaattaactttctagctctatttcccttttcctgctccctctctctacaactagtctttctctgattgcnccgccctcaacccatctaaactagaccccagggaagcaccttggtccccttcctctctcccactcaccatccaaccaatcaccagagcctgtacattctatattttcaacatcgattcaattgtctacttctttctagcctgccctctctgactgggactccttgagccagcctgatcaccccaatccatccctcacactgtgcccatctttctgaagtaggaatctgatcacaccaccctgctaaaaacactctggttctccccacggcatgtggtgcccttgtatagctggcaaagccttgcatggcacggccccagcctgtgcttcaactcaattgcccgactctctccagctctgctgagccacctaagtcacagatggtttctcctctcatctctgctctcttccatgtgccatttctgtggcttggaatgttcttccctcattctctttctggccctttcccgtcacaccttagacgtgcatcttcctctcgaaaacctctagtgaagcctcccagggccaggcagtaccctcctctggcttcttctggatacagaggaagaatctgagcatcgattctccatctcagcaggcctctgtgtgcctgctgactccgactagaccagagatccgtaaggacagggatcgagttttttttcttttaattcactgcctcaaaaatcctctgtgcattacctattcatcctcttctctcccttaacctgaaccagtgatcttactgtctccatcattgtttttttcttttcttttcttttcttttttttttttgaggtggagtctggctcttcacccaggctggagtgcagtgatgcgatctcgactcactgcaacctccatctcctgggttcaagcgattctcctgcctcagcctccccagtagctgggattacaggcatgcgctaccatccccaactaatttttgcctccataattttgccttttctagaatgtcatacaggtggaattactcagtatgctgcctttttcagattggcttctttcacttagtaatatgtttgttttttgagacagggtcttgctctgtcgcccaggctagagtgtggtggtgcgatcttagctcactgaaacctccacctcccaggttcaagtgactctcctgcctcagcctcccgagtagctgggactacaggcacatgccaccatacccggctaatttgtggatttttagtacagacggggtttcatcatgttggccagggtgttgttgaattcctgacctcaagtgatccacctgcctcagcctcccaaagtgttgcgattacaggtgtgagccactgcgccaagcctcatttagtaatatgcatttaaactttctccatgtctttaatggcttgatagctcatttatttttatcatggaatatttcattgtctggatggaccacagtttatttctccattcacctactgaaggacatctcggttgcttctaagttttggcaattatgaataaagctgctataaccatcaagtgcaggtttttgtgtggacctattatcaactaattcgggtaaatctcaaggagtgcaattgctggatcacacagtaagagtgtgtttagttttaagtggctgtgccattttgcattcccaccagcaatgaatgagagtttctgttgctccacattctcactaccattcggtgttgtcagtgttttgcattttggccattctagtaggtgtttacatggtatctagtcatttgaatgggcatatgatgtggaacatctttttttttttaattttattattattatactttaagttttagggtacatgtgcacaacgtgcaggtttgttacatatgtatacatgtgccatgttggtgtgctgcacccattaactagtcatttagcattaggtatatctcctaatgctattggaacatcttttcatgtgtttatttgccatctgtatatcttccctgatgagttggggatgcattctttccatctcagagtccccagaaactaacatagcagttggtacagagttggtgctcaacaaacatcagcttaggaactatgtcctatgtttttttgtttttttttttttttaaaaaggaatgtgagctgttcccaaaacgtatgtccttcccccatgcctctaccctgcccttccacaaactttctgatcttcagcacacactacccaaccatcaaggctgagacttcccgtggccagcagtgtctcatgctggcttcaagccccacagcactgcttttttcaacttctcttgtggtttagactgtctttagcccagcaagagaattcattgtcttatcccccattaaactgtacctacactctttgaggaaaagggtccatcttacttaaaatattttaaaaattcacatgtgataaaactgatgtgtatgtgtatgagagagagagaaagagagaacagttctatgaggcttaatgtatacatgtggctgtgcagcccactgccccatgtcaccattttcaattctgtcattacccctgggacaatgtcttgtcaatatacacttgaggctgggcggggtggttcctgcctgtaatcccacctgtaatcaggagttcaagaccagcctggccaacacagcaaaaccccgtctctactaaaaatacaaaaatttgctgggcgtggtggcacgggcctgtaatcccagctactcaggtggctgaggcaggacaatcgcttgaaccggggaggtggaggttgcagtgagccaagatcgtgccactgcactccagcctaggcaacagagcgagactctgtctcaaaaatacatacatacacacacacatacacacacacgcgcaagagacacagtgagtagaaacaccga

SEQ ID NO: 1099 - DNA, 224 bp, Homo sapiens
gaccaacatggtgaaaccctgtctctactaaaaacacaaaatttagctgggtgtggtggtgcgcacctgtaatcccagctactcaggaagctgaggcaggagaatcacttgaacctggtaggtggaggttgcagtgagctgagatcatgccactgcactccagcctgggtgacagagcgagactctctctccaaaaaaaaaaaaaaaaacctagaccagatgca

SEQ ID NO: 1100 - DNA, 468 bp, Homo sapiens
tcagcattaaaatttggggaaaaaaatgtttgaagatcaatgaaaaatagcactggactctatatttacttatataagattttttttttaaatcttgatgaaaatttttattaggctagaattgcagagctgcaagagaattctgagatcaacaggtctttttccttcatttaccagctgagaaacttggggtcataggagattaagattgtttatcttaccagttgaattcaatactttcagaaataattgttagaattcagtgaaagttattctcttaaaagtacactgcttttcagctcctatcaagtgtttccctatgcttccacaatcctgattatcaatttgggtatgggccactctgggaaaggctgtcaaatgtttattctagaatccagcaactcccagatgtccatctccatctcaggttctggtcaaagtctgatgtagcaaagaaacagagtaaca

SEQ ID NO: 1101 - DNA, 222 bp, Homo sapiens
ccaacatggtgaaaccctgtctctactagaaacacaaaatttagctgggtgtggtggtgcgcacctgtaatcccagctactcaggaagctgaggcaggagaatcacttgaacctggtaggtggaggttgcagtgagctgagatcatgccactgcactccagcctgggtgacagagcgagactctctctccaaaaaaaaaaaaaaaaacctagaccagatgca

SEQ ID NO: 1102 - DNA, 468 bp, Homo sapiens; identical to SEQ ID NO: 1100

SEQ ID NO: 1103 - DNA, 224 bp, Homo sapiens; identical to SEQ ID NO: 1099

SEQ ID NO: 1104 - DNA, 1854 bp, Homo sapiens
ttttttttttgagactataaacatatatatacacgtagtattttctatggttgccaattcttatgctagatgttagcattacaaattcgtataaaatctgtgtccgccttcatagtccaacaacaaacgtttgctgagtgtagaactcccaggagttctctcatggacacaacagccacactcaccctcacattagctggcagaggccctttataccagtgatacgcttgggccaagggcccctgggttgaaaatcattaggtagacaccatccagtgccctgtctcatgtgctgaacagggctagtaatgccgactttcactttgggaggccaagtcgggtggatcacttgaggccaggaggtcaggaccagctagccaacatggtaaaaccctgtctctactaaaaatacaaaaattagctgggcatggtggcatatgcctatagtgccagctactcaggaggctgaggcatgagaatcacttgtacccaggaggccgaggtttcagtgagccaagatcatgccactacactccagcctgggtgacagagtgatatagatctcaaaaaaaaaaaaaaaaagtgtcaacctttacttctattttatcaagttcttgttccagcctgtccttttcaaaagataccctccttggtaaagattccaaagttttgggttttctttaaatgtatgcatccaatgtctttttcatttcattaaggtcaaataaatatttgtcctgggtttccaataaggtatttgagattttcctgtgccataatgactgtatttggtacaggcaaggcaatatactaaggtctctctacagatcttgaaaatcagatcagccttggaggatgaaattagtaacaactaatacaccctggaggacaccagccctttggaaggcattcattggaagagactagaaaagcagttgaggttgggagtttctcatttcaggcaaagtgacaagggagtggtatcagaaaatacgatcttaactaagaaagctagaacctatatcactctagaagactgttcacaaacggtagcagggcccatgtgcagcttggaaagaggaagcttaatgtgcaaaaatttaatatccctgcaactctctggaaattggcaagatggtccctcagaagagcagatctgtgtggtgagtgagatatcacagctccatgaggtgaacaccaaaccttccaatcatcagttgtctcccatgtacttatggagaatggtagacaaaactcactgaactgcttcatttgtacattgatctcttgtgaccttgctttgtgggagttagtcccagagaatctttataaactggcaagattttctgacctaaagaggtaggatctgtggaaaatgatgacctaccaaagtacaaatctagagaactgaggtttggagaacatgaaaaccatggtcaaacacgtgaaggcctgccactgggaagaggaattcaactagcaatacacaggcccaactaatatgtaagaaagacactacaaagtagtagttaagaacacaggctctggagccaaacgacttggctctaacacttactggctccatgaccttgaacaacttaggttccatgtgccttaatttctccatctgttaaataaagtgattgtgaagatttaatgagataatccaaataaatgcttagtacaatgtatggaacacagcaagttctcaagagactagccattacatcattattatccaaagaagaaacagaccaccctgtaagatttggaagggagctcccccaggactcctcccaccccctgccaggggtacagagagactagtttattgagggccaaacacaaaacttg

SEQ ID NO: 1105 - DNA, 1583 bp, Homo sapiens
ggatctgtgtggcatggtatgtgtgtttatgtgtattgtgggtgtctgtgtggcatgctgtgcgtgtgtgtattgtggatgtttactgtcccgggcagtagaaaggacgtcggggaagcagccccagcatcagggacaggccaggagtgcagaatgcatggaagctggtcaggtcggagcccgggatgaaggaagcacagagatgcaagggtgccagggcccatggaaccaagagccgatgatcaaggccacagtgcacacagccctggaggcaaaggacatattcatttcacaaggattaaaaagcatgggccaaggctgggccccaggccaggactggggatacagagtggatcagtccccatccctgcccccaggtgcttacccacacccattcacctcacaggtttccccaccccagccccttggcgagctcctcctcattcctcaaaacgtcgctgaggtcacgctccttcccgaggcctctccccatcctctaaaacaccctctccctgctgcccacttgcagcacagtcagagagctccgtggcctgtttccactggactgagtcttctggggggtgctggtgcagagcagaaccctgggctgggagtcccggcacctcgttccactccctcacccacagcctcgctgtttaacctcaggcaggccgtgtccctcctcagcctcactttccccttgtgtaaaatgagggaagggactgcgccttctaagtcatctttcagcttaaaacctctttgaccttctatctggctaatggaggtgctgaccaggggcaagaagggatttgaaaaacgctttgaaaaattcatagcaggaggcaaaggagaaagagtctttattttcgtagagcgggaggcaggaggagttatggacagaggctgtcgatgaaaaggacagcatctcagagcactttgtggcatttaatgtctaatgcctcctcccattaaagcagtggcatcaaatatttaccaaagcagcattaaaaattaacctttaccatggggatgtataaaggccctaagttccctgagaagtgaccgaacatcaggagggtaaagtgacaggaaggaaggctacaagcgggttgtgaataatggaagcccccaaaggtcccccaacacagctccctgttgaccccactcccaaagccagggcagcctccggccgtgtctctgcagaggctcccagcccttcggagactcccagagggcctgcaggataaggacaggccctcagctgggcatccacagccttccatggcctggccctgcctctctgggcagctgggatctgtaggatggaaaggaatgagtctgtcggagttggaagagaccaggggaggaagtggggagtggtccgggcactggaaatagcacgtgcagaggcactgaggcagagacagctgcacatcaatccatcagaagagcagccaggtggcatgagtgtgggggaggaaggaagcgcaggaggggacaggtgggagatgcaggtaggtctgactgtgcagggccatggtaagatgtgggcttctcggtccagggacaggggtgccctcgag

SEQ ID NO: 1106 - DNA, 2128 bp, Homo sapiens
tctacctccgggctgaaacgtcaccatgcctccccacagacagacggatggacagatgggcctccctgcacctgctctgtgggtgtgggggctcctgctcagcagcagtttccagacccttctccctgctttccccaagccacccgccttgaatctggggtgctctaccagacccatcccctcatttctaaagatttgagccactagtcgtgtccctctccctcagaaatgccttggtgacacttggctgctttcaactcttccacccatctgcctcttggtctcatctttaccttctgctaaaggtcctgacccccacccccgccacgccatggggcaccccatggtggtgcgtccttgggagcagctctgtccctttccccgtggcctttgccccgcctcctatgacttcgattcccacctgtccccgacccctgggaccactgaccgggcccgatcaccctgtcactgccctgtcatctgcttaccccacacggtgctctgctgacccaggtcttgctgtctcccaacagccccacgaggcttcccgtcgctcctggacactgcaggctgagcccgctgccccgccgcctccatgaggaaggcttttcctctgtgagccccaggccaccctttccctcctttaagtaattacttaagtcccttgccagggccctcccagtaccctttctaaagacacccctgccccagcatgctgcaggctcctgctccactttcctctcaggccctcgtcgctgtggtgctgcctttgttttctgtctctgccacggcagggggtcagctccttggaggtggggcttctgcccttgctgtaccactgcctggcacacagtaggtgctcaataaagacttgcagggtgagctgcctgaagaatagtcaccagaggccagaaatgtctagagctctgccggtagggtgactggccgaggagcctggcctgcatgtgtgcgtgtgtgtgtgtgtgtgtgtgtgtgtgagtcagggtttatatgcaggtgtctacaggagacatgctgggttctgtgctgggtgtgaggaatatgggagcagaaccccagggaggtggcagagacttgggggccaaagggctggggtgcaggggggcaacagccaggtgccactggccaccccagccgcagggagccctgcccaccctccaggtgcctggatgtccaacctcactgctattcccacctcaagccaggcctggagatggaggccccatgactcagccagggccggtttgcagctgcggctgacccagacgggcgggcagcccccagcccccgggcctgcacccaggacagggccgccctccctccctcccccgcttctggctcctaggacaggattctctgaattcagctcccctgaggctggggccaggttggaggccaggcctgggggctctgggctggggtcccagataggggctgggcggccaggcttggaatctggaatccagccccattcctggcatctgcaggagcctcgtggggagggagacttgggatggacttcaaccagccagggctggattcttgccccggaacctgcattcctggggcagccaagggatccttcccacttctgggcccagcttggccctgcctggcattcgaggcccatctggggcttgggggtgtctccccaactctcagacataaggacacccttccaagcttgttccttcacctggcggggccctgagccccacacccctcccctgtcctttctccatccgacatcaagcgcctccctgcctctgctcgcacagtctctgagatggggaactcagcacctcacaggtgggcccagctctggtgctgtctgtgttgggggagctggggcagcccccaaaagaccttggagacagaccctcagaggcaggagcagaggctggcagtggatgctgtgcctggaggccttgagggcgaggtgtgatgatgaggcccaggctgcagggctctttctggctctccagctccggagaacaagggatttcctcctgctctgcccaccctccccagccagtgcatgctcagcctcagcaccgcacctgggcgccctccatgatctgccccacctggacacatggctcgaggg

SEQ ID NO: 1107 - DNA, 2129 bp, Homo sapiens
tctacctccgggctgaaacgtcaccatgcctccccacagacagacggatggacagatgggcctccctgcacctgctctgtgggtgtgggggctcctgctcagcagcagtttccagacccttctccctgctttccccaagccacccgccttgaatctggggtgctctaccagacccatcccctcatttctaaagatttgagccactagtcgtgtccctctccctcagaaatgccttggtgacacttggctgctttcaactcttccacccatctgcctcttggtctcatctttaccttctgctaaaggtcctgacccccacccccgccacgccatggggcaccccatggtggtgcgtccttgggagcagctctgtccctttccccgtggcctttgccccgcctcctatgacttcgattcccacctgtccccgacccctgggaccactgaccggggccgaatcacctgtcactgccctgtcatctgcttaccccacacggtgctctgctgacccaggtcttgctgtctcccaacagccccacgaggcttcccgtcgctcctggacaatgcagggtgagcccgatgccccgccgcctccatgaggaaggcttttcctctgtgagccccaggccaccctttccctcctttaagtaattacttaagtcccttgccagggccctcccagtaccctttctaaagacacccctgccccagcatgctgcaggctcctgctccactttcctctcaggccctcgtcgctgtggtgctgcctttgttttctgtctctgccacggcagggggtcagctccttggaggtggggcttctgcccttgctgtaccactgcctggcacacagtaggtgctcaataaagacttgcagggtgagctgcctgaagaatagtcaccagaggccagaaatgtctagagctctgccggtagggtgactggccgaggagcctggcctgcatgtgtgcgtgtgtgtgtgtgtgtgtgtgtgtgtgtgagtcagggtttatatgcaggtgtctacaggagacatgctgggttctgtgctgggtgtgaggaatatgggagcagaaccccagggaggtggcagacacttgggggccaaagggctggggtgcaggggggcaacagccaggtgccactggccaccccagccgcagggagccctgcccaccttccaggtgcctggatgtccaacctcactgctattcccacctcaagcaaggctggaaaatgaaggcccactaatccgccaggggcgggttggcacttccggttaaccaaaacgggcgggcagccccagccccctggcctgcacccaagagaagggcggcctccctccctcccccgcttctggctcctaggacaggattctctgaattcagctcccctgaggctggggccaggttggaggccaggcctgggggctctgggctggggtcccagataggggctgggcggccaggcttggaatctggaatccagccccattcctggcatctgcaggagcctcgtggggagggagacttgggatggacttcaaccagccagggctggattcttgccccggaacctgcattcctggggcagccaagggatccttcccacttctgggcccagcttggccctgcctggcattcgaagcccatctggggcttgggggtgtctccccaactctcatacataacgacacccttccaagcttgttccttcacctggcggggcccttagccccacacccctcccctgtcctttctccatccgacatcaagcgcctccctgcctctgctcgcacagtctctgagatggggaactcagcacctcacaggtgggcccagctctggtgctgtctgtgttgggggagctggggcagcccccaaaagaccttggagacagaccctcagaggcaggagcagaggctggcagtggatgctgtgcctggaggccttgagggcgaggtgtgatgatgaggcccaggctgcagggctctttctggctctccagctccggagaacaagggatttcctcctgctctgcccaccctccccagccagtgcatgctcagcctcagcaccgcacctgggcgccctccatgatctgccccacctggacacatggctcgaggg

SEQ ID NO: 1108 - DNA, 2132 bp, Homo sapiens
tctacctccggcctgaaacgtcaccatgcctccccacagacagacggatggacagatgggcctccctgcacctgctctgtgggtgtgggggctcctgctcagcagcagtttccagacccttctccctgctttccccaagccacccgccttgaatctggggtgctctaccagacccatcccctcatttctaaagatttgagccactagtcgtgtccctctccctcagaaatgccttggtgacacttggctgctttcaactcttccacccatctgcctcttggtctcatctttaccttctgctaaaggtcctgacccccacccccgccacgccacggggcaccccatggtggtgcgtccttgggagcagctctgtccctttccccgtggcctttgccccgcctcctatgacttcgattcccacctgtccccgacccctgggaccactgaccgggcccgatcaccctgtcactgccctgtcatctgcttaccccacacggtgctctgctgacccaggtcttgctgtctcccaacagccccacgaggcttcccgtcgctcctggacactgcaggctgagcccgctgccccgccgcctccatgaggaaggcttttcctctgtgagccccaggccaccctttccctcctttaagtaattacttaagtcccttgccagggccctcccagtaccctttctaaagacacccctgccccagcatgctgcaggctcctgctccactttcctctcaggccctcgtcgctgtggtgctgcctttgttttctgtctctgccacggcagggggtcagctccttggaggtggggcttctgcccttgctgtaccactgcctggcacacagtaggtgctcaataaagacttgcagggtgagctgcctgaagaatagtcaccagaggccagaaatgtctagagctctgccggtagggtgactggccgaggagcctggcctgcatgtgtgcgtgtgtgtgtgtgtgtgtgtgtgtgtgtgtgagtcagggtttatatgcaggtgtctacaggagacatgctgggttctgtgctgggtgtgaggaatatgggagcagaaccccagggaggtggcagagacttgggggccaaagggctggggtgcaggggggcaacagccaggtgccactggccaccccagccgcagggagccctgcccaccctccaggtgcctggatgtccaacctcactgctattcccacctcaagccaggcctggagatggaggccccatgactcagccagggccggtttgcagctgcggctgacccagacgggcgggcagcccccagcccccgggcctgcacccaggacagggccgccctccctccctcccccgcttctggctcctaggacaggattctctgaattcagctcccctgaggctggggccaggttggaggccaggcctgggggccctgggctggggtcccagataggggctgggcggccaggcttggaatctggaatccagccccattcctggcatctgcaggagcctcgtggggagggagacttgggatggacttcaaccagccagggctggattcttgccccggaacctgcattcctggggcagccaagggatccttcccacttctgggcccagcttggccctgcctggcattcgaggcccatctggggcttgggggtgtctccccaactctcagacataaggacacccttccaagcttgttccttcacctggcggggccctgagccccacacccctcccctgtcctttctccatccgacatcaagcgcctccctgcctctgctcgcacagtctctgagatggggaactcagcacctcacaggtgggcccagctctggtgctgtctgtgttgggggagctggggcagcccccaaaagaccttggagacagaccctcagaggcaggagcagaggctggcagtggatgctgtgcctggaggccttgagggcgaggtgtgatgatgaggcccaggctgcagggctctttctggctctccagctccggagaacaagggatttcctcctgctctgcccaccctccccagccagtgcatgctcagcctcagcaccgcacctgggcgccctccatgatctgccccacctggacacatggctcgaggg

SEQ ID NO: 1109 - DNA, 290 bp, Homo sapiens
gatgtgtgtttgtgtgtgtgtgtggtgtgtgtatgtgtgtggtgtgtgtatgtgtgtggtgtatgtgtgtgtgtggtgtatgtgtgtgtttgtgtgtgtgtggtgtgtgtatgtgtatttctttgaatgagaaattggctcccatgattatggagctgacaactcccaaggtctgcaggcagcaagctggaggcccaggagggccggtggtgtggctgcagccggtgtctgaaggcctgagaaccaggagggcgggtggtgcagctgcagtgtgaaagccggcaggctcg

SEQ ID NO: 1110 - DNA, 96 bp, Homo sapiens
ccaacatggtgaaaccccgtctctactaaaaatacaaaaattagccgggcatggcggcacgtgcctgtaatcccagctactcaggaggctgaggca

SEQ ID NO: 1111 - DNA, 2236 bp, Homo sapiens
  misc_feature (996)..(1995): n equals a,t,g, or c
tgcagggagctgagatcgcgccactgcattccagcctgggtgacagagtgagactccatctcgaaaaaaaaaaaaaaaagaatctgaggtttaattcaaggagcagtggaagccattcattccaaattgtcaggatctatgcaggtatgcccctccctgtcctctctgagcttagggtcaatgcctagaaatgtatgtgattgctaatagatttgctacatgccaggcactactctgagcactttattccttcctttctaatttgtgtgccttttatttcttttccgtgctttattgcattggctagggcctccagtacagcactgaataggcatggtgacagcacgcagacatcccttccttgttcctgatcttaggagaaaaacattccacttcccactcccaccaggaaggataagattcgctgtagttttgggtgttattattattatttttttggtttgcttgagacagagtcttgctctgttacccaggctggagtgcagtggcacaattttgactgactacaacctccacttctcaggttcaagcaatcctcctgcctcagcctcccgagtatctgggactacagtgtacaccaccacacccagctaatttttgtatttttagtagagacagggtttcaccatgtttgccagtctggtcttgaactcctgacctcaagtgatctgcccgcctcggcctcccaaagtgctggaattacaggtgtgagccactgtgcctggcctagttttgggtggttttttgtagatgtcttttatcaagttaagaaagtttccttctagttctagtttgccgagagttttcttttttaaaatcatgaatggatgttgaattttatcaaatgcttctacatttattgatatgataatatcatttttctctaataactatacatttatttaagcctcccaacagtcttatgaggtagatactgggttcacaccaatttaaaaaaaaaaaaaaaaaaggggnnnnnnnnnnnnnnnnnnnnnnnnnnnnnnnnnnnnnnnnnnnnnnnnnnnnnnnnnnnnnnnnnnnnnnnnnnnnnnnnnnnnnnnnnnnnnnnnnnnnnnnnnnnnnnnnnnnnnnnnnnnnnnnnnnnnnnnnnnnnnnnnnnnnnnnnnnnnnnnnnnnnnnnnnnnnnnnnnnnnnnnnnnnnnnnnnnnnnnnnnnnnnnnnnnnnnnnnnnnnnnnnnnnnnnnnnnnnnnnnnnnnnnnnnnnnnnnnnnnnnnnnnnnnnnnnnnnnnnnnnnnnnnnnnnnnnnnnnnnnnnnnnnnnnnnnnnnnnnnnnnnnnnnnnnnnnnnnnnnnnnnnnnnnnnnnnnnnnnnnnnnnnnnnnnnnnnnnnnnnnnnnnnnnnnnnnnnnnnnnnnnnnnnnnnnnnnnnnnnnnnnnnnnnnnnnnnnnnnnnnnnnnnnnnnnnnnnnnnnnnnnnnnnnnnnnnnnnnnnnnnnnnnnnnnnnnnnnnnnnnnnnnnnnnnnnnnnnnnnnnnnnnnnnnnnnnnnnnnnnnnnnnnnnnnnnnnnnnnnnnnnnnnnnnnnnnnnnnnnnnnnnnnnnnnnnnnnnnnnnnnnnnnnnnnnnnnnnnnnnnnnnnnnnnnnnnnnnnnnnnnnnnnnnnnnnnnnnnnnnnnnnnnnnnnnnnnnnnnnnnnnnnnnnnnnnnnnnnnnnnnnnnnnnnnnnnnnnnnnnnnnnnnnnnnnnnnnnnnnnnnnnnnnnnnnnnnnnnnnnnnnnnnnnnnnnnnnnnnnnnnnnnnnnnnnnnnnnnnnnnnnnnnnnnnnnnnnnnnnnnnnnnnnnnnnnnnnnnnnnnnnnnnnnnnnnnnnnnnnnnnnnnnnnnnnnnnnnnnnnnnnnnnnnnnnnnnnnnnnnnnnnnnnnnnnnnnnnnnnnnnnnnnnnnnnnnnnnnnnnnnnnnnnnnnnnnnnnnnnnnnnnnnnnnnnnnnnnnnnnnnnnnnnnnnnnnnnnnnnnacctgagtacagaagttcaacaccatcctggccaacatggtgaaacctgtctctactaaaaatacaaaaattagttgggcatggtggcatgtgcctgtaattccagctactggggaagaggcaggagaattgcttgaatccaggagacggaaattgcagtgagcccgagatcatgccactagcactccagcctgggtgacagagcgagactctatctcaaaaaaaaaaaaaaaaaacaagg

SEQ ID NO: 1112 - DNA, 1329 bp, Homo sapiens
ttttttttttttaaaggatattcttagtagactatatgttcacatgactcgatattcaaatggtgcaaaagtcactccatgagttatctagtgctccccattgaaggtaaaaaatactaccagttctttctggagattttatgcaaataaaaagaagggacacttatgattctcttccctattactggtggagtatgggtcactcctaatgtaggatgggatgattgccccaagctctgtcgtgagtggttgattgacggttttcttaagggaacaatgctgggaaagatgataggcgcccgccactgacccctcccgcctccctgcccctccagtaaactcccacacaaaatagcagtatgaggtgtggggaaataatcttggcctccgtcctgggtttacttttgactctgccacctacaagctgtcacctgaacaagtcctttccgttcctgtgtcttccctggtcacaagctctaagcctgaacccacactctgggaatgaagcagggtagcggcctctgcttcagcaactctgaggggtctaccttgggtggggagttggcctcatccagagggctgctggagggccaagacaaggctctggtggggaggtgtgctgagaggggattgcttatcccaccaccagcttttctgggggaggtggggaagtgatggttaaaaaatggagttcctgctatcagccatgtcctgatgaattggaaagtccccttctttctcctttcctcttgcatctcctgcctgcttcccctgcctgccctcctgtgacatgtgccctctccagcaggtatgtcacacagcaccccaagggaagggcagtgtaacgctcttttccatgatggactaccacagccagaggaagacaggccttcccttcttttctagttctttttggtttgaaaacaaggcactcttattttccccttccaagaagctggtggttcacacgggccagcacacgcattatcaaagacctagtttgtttctagtaaatgagtccattgaagtgggagccttggccgggcaaggtggctcacacctgtaatcccagcactttgggaggccgagatgggtggattgagatcgagaccatcctggtcaacatggtgaaaccctgtctctactaaaaatacaaaaattagctgggcgtggtgacacacacctgtagtcccagctactcaggaggctgaggcaggagaatcgcttgaacctgggaggcggaggcaacagtgagccgagattgcgccactgcactccagcctgggcgacagagtgagactgtctctccaaaaaaaaaaaaaaaaaaaa

SEQ ID NO: 1113 - DNA, 115 bp, Homo sapiens
gggcgcagtggctcacgcctgtaatcccagcactttaggaggccaaggtgggtggatcacgaggtcaggagatcgagaccatcctggccaacatggtgaaaccccatctctacta

SEQ ID NO: 1114 - DNA, 3502 bp, Homo sapiens
cccagctccctccccgggaccctaagagcacccccacccccacctactatggctccctggccaggttctcagccttatcatctgctacacccacgtccacccaatgggcctgggattcagggcaggggcccaggctcccctcctctgtggctcaaacggtggacgacttcctgttggagaagtggcgcaagtattttccatgtaagccccactctgggcggagccttcccacctgcctcctcctcctcctcttccttccttttcttctaccctctttctcctgctccttttctcctcttcctcttttgcatccctttgccacacctctcctcccccaacgttaccatagtccattggtccattgactctacctgtgggtccctggggaaggagacattgcaggtggccctgcagccaggagttctatgggttgggacggtttagatggagcctggctgactggggcctttattgtggattctggagctcagtagaacctaaaaggtcattgtcgtcattatcttaatagctaccatcttgtgcaatacatgatgggccaagcagtttatatatattttttcatttagttcttaattctctgaggtagtaattatttatccccattttacagatgaggaaactgagtttcagagagtttaagtagtatgctccagggtacccagtgagtgagtaacaaactcagttgtgaccccatgtctctgtgactccaggattctgcttggaacctcttggctgtgtggctaattcttgcttctgagccaggtggcctccccaggtctcagccctgctgaggattatgaaaagccataaaacaaggcatttgaggggaaacaaaatatcttctttttgccctaacccaaattgaaaagtagattaagttttaaaaataaaataaataggaccattcctgtctctcacctgtctctggcctccagccactgaagcttttccttttattgtttattctggggaggcaagaggtgctggtgggcagggtggtgaccactgcccatttctgagtcctgtccccatgctcttccagctggcatcccgctgctcagcaacagccccaccccgctggagagcaggctgggttacatgtctgccaggtgagcctccctgggggctggttggggtggaacgtcatagtcgagctgctcactgtgcctccctgggcaggtggacctctgaggggagcagacctcctggtcttaccccaagaaatcaggcaggcctctagtccacagagctgtccccgcttgcctgggtctgaggcgcccctccatgaccaggggaaagtcaagttcacaccgccaaggtcccagtggggaagggctgggcttaccctgccaaccccctgaggaagctgccctctggcccctgtggggaggagtcagcccctggtgggaccctgcccccgcccctccctctagcccctccagccccggagtctggcctttgtctttgcccttgagctcttgtttgcttcctgtggctcccttattcccccagtcctgctgagcaacatctggagtgagagggacaccctgtggaggagacagacgggcaattatttaaacctgttattaattttccattcatctcattccttgccaaatgttttcccctctccctcccttaggcagctaacagtgagtaccccccactaaccctttggccaacttgagagctgatgctggccaaggattgagttgacagaggggagcgctttgctgatgagattggcgggagcaggcggatgtgggagcccagagccttgtatcagtagcacccagcaagggggcagagggcctccaccactttcccgtttgggaactgttctggaggggcagatgttttgaagctttgaattgctagggacctcggagaagctgctctggtagctgagagaaagagggaggaggtgacagatgtgatggcctctgtgcatcctctgtcacttccgcgcctcctctctcccctcgccatgctctcctcttccttcccagtgagcagctccggctcctacagcactcccattcgcaagtccctgaggcgggcagcaccacctttcagggcataattgaggccaaccggaggtggctggaacgtgtcaagaatgaccccaggttgtatccttttacctggttcccaaactgggctgggctgtggggactgtgcttgtgccctgaggggctgaggaggatcctgttcagcctttgaccctttcatggcccctgcctggctatgcccagcgactgcagttttccttcaccttgtggccagacctctcttctcttcaacacccaagccaaaagctactttgagcctcctgcagctgggccttgatgagcacaacagagtgaaggtgtatcgcttctgaggccctgagcaggggcttggggcagcccagcctctcctccacccagaccaagtgcctgaggagctgcctgccttcttccatctgagaaagcaccgtccttccccctttgacttgcaggagccaccagggaccagggggttgagtggaacagtaaagccacacattctgtgactatataacctatctcaggctaaaatgtgtggactcgtacgagctcttgtcattgacatggcaagctgatggcgtgcggtggctgcggggtatcagggccgggagccctttgggaggaagggaggcgttagaggagctgccttcggaggctcagggagtccctttggagctggttgtttccttggccctgcagcgcactgctcggggctcccaaggaggttgtgtgtatggttcttaattcatcaggacaaagacccccagcatgtgtgtaccctgggacccgatttctctgggcccacatctatctccaatacctcagcctcagatcagaccctttcttttttgtctttcttctcttaatttttaaatgcctcttttcttgagcattccatctctctttttgaccctctcaggattgggcttagctgtccagagccctgccggagggtgctgggggctgtccctctgcaggcactgtgttttcctcaggggctgtcctcagaacacccctcctgctccctggggctcctcagggagccatttcagctggagtctcaggtctcaaaaacagcttctccgggaggccaaaaaaagactgggttggcttctggtcctcatgacggcttttatcctcctgggacactttgggtatattcatgggcattgtttccatctgtcttttctacctgtgccacccctgccctgattccacggctgcctcaggcaggcaggcaaggagctaggccggtgcccggccctggcagcaaggggtctttgtgcagttggagatgctgccgttgtggcagagcgtcctgcagccccgcttccatcagcaggctctggggtgggggctttgcaggggatgctctctgatgtttgttccgttgtttaaataaaatgcacttatttttgtttttttttttgcaa

SEQ ID NO: 1115 - DNA, 2649 bp, Homo sapiens
cttgtaggtactcattgaggtttattgtgtaagatgaatgaatgttgcaaattcctaaacatgtgattcagatgcccaatcttactctgttactttatgaaaattttttaaagctatatgatgttatatcaaaatatgttgttatactttaggataatcggtgtgttagccctgaatttcagcataagtcccatttttttccatgggagtctaggaaagctatatgtttattcagcagcaaaatacagtttggaacttaaataaactattgatcaatttctggtcttatgctagaaggaataaagcatcaagaaaaagaaaagatttgctgtcaagaccaggaaaatttgacaatagagtattagaatgcaggaaatgaggggaagtggaaaggcagcaagtaggagagaaaaagtgcagggacagtagaaagtgaatgtaggagctttctgacccatgcacttcaggaacgcaattcatccctaaaatgctgtttgctgtcttaggttgcaagtaaccaaattaaaaccagtttgaaagtagagtgagacagctgtcatcataagagtcatttgatctgtttaaaggtggctgcttgtatgcagggaccaacagtcatgttcagggcagcagctggtgcacacttcaagcacagaccataagagctaccccaggcagcacctgctaccaatagtgcaaacaactcagagagacctcgttggcataagggaatactctatcctttctgagtaaagagcaagtagaactaaaggtttcacattttaaacatactttacattcctcctcttctggggctcaagcctacttttgggccaaagcggatgttatatctgacatagagtcctcggagcagcagttgttcctgaaagttcctttttgcatctttgtgcctcatgcagtggcttacaagtcaaccagacttctcccctgacttttgatgtgtaagagcttgtgtttcaaatgggtttggttttcttaatgtcaccctaggttggtggaaaggagagtaaatggaaatggggggagcagggtcccctggggaggtttaaacagatggaagtcaattgtctcttgagaatagaggaggctattgagttttcattccacactctgctcctgttctgtcagcaaagaacaagcactactctccagcaattgctttccactggactcccccacctcggcctccctacaaaaacctagggatcaacttagttcactccaaattagaaaatttaatagtcatttgtttcttcttgtccacagggagaaccattttctttccttctttcaaaattgcccaggtcttgtgaagggttattaacaccggaaagaaatacattttaataagcttaaatctcatttctacatgaaaccatcagattttagtactgtgatattttggtccctctgtcttttaggctctgacaccaaaattgccataatgaaggtgtttcacttcttctcatttatttttatgggatcttttattcccaaatgccttttcatcccagccaaagggagaaatgttgatagatctgccatcaagaaggttccaaagctggcctgtcaggttttctgttttcttgtttattatctttgaacttttgttttaaatgttttaaacacttatttaccatgtaactaaatgtctgatagtattgaaaatactttgtgggttttaatttatttaatgctcatgaaaccctatgaggtaggtactgatattatttttattttactgatgaggaaagtgaagcaaagagaagtgaaatgaaaggtagtgagtgatgggaccagggtttggacatgggcagtctggctctaaaatgtatgcttttaactactatgtaatgctgcctcacaaacaacttgtctcacaaattgatattctggatcagaggatgtcgactggcccgcaaatgtattttgtatggctcatacacagttcagaagttttaaaaatttacatagaaatctgcatttcctgacttcttttgaaaatgggaataccaaacatcattaggcttgaattcccaatacggcaacaacagctgagcaacaagcagctgtttagactaggcactcgctctccaatttccacagtccccaccaatgcagatcatagtatcgacttaaatttcctgcctgccttagagaagcttctgagcttgtgacctctattctagctgctctatgaatggacgctgccccagtacagcgaggacctgctgcaaaatgcatttcttagtcttcaatacttattcctccttgtaactggatttctggtaagttatgtctcatggtggatctgccccaaagatggagactgaatggcagtgagtcactcgccctggcctccattgttctggagaaggttccagccacatggttgatgtcagctggttttccagagccagagctgggttgcgggacagacacacctgcatctaatagtgaaaggcaaagttgaaaggccaagaccagcctgaggtctgagggaccaagggcttcacagaggccagaagttcagaggtggacataaaaggtgttaggagaataaggaagtgaaaagaacatagtacagtgtatcagaggaggagctccaggctggcaaatatcactccc

SEQ ID NO: 1116 - DNA, 2649 bp, Homo sapiens; identical to SEQ ID NO: 1115

SEQ ID NO: 1117 - DNA, 190 bp, Homo sapiens
atgagaaagtaaacatacaacacagtaaaagttgttccaagtatttaaaaatgttctatatcttctaccttattatggctcaagatatagtaacttttgtggggttttatcattgtttttgttttattttgtgaaaacatccaagagcccgcaacagcctatagatttgcagatccttttctttcctggg

SEQ ID NO: 1118 - DNA, 190 bp, Homo sapiens; identical to SEQ ID NO: 1117

SEQ ID NO: 1119 - DNA, 21501 bp, Homo sapiens
gaggctctggtcataatggcgaccacacttttattgaatatctgttgtgtactgtccaggtcttcacatttgtcacctcatttaattctcatgttaagcctgagtggaaagcattatgaagcccatttgaggaaagagaagagtgaagttcagaggcaaaagtcatctgtccagggtcctttgccaaatgacagctggcatggaaccctcctaaggctgattcctctatcctccttctcctaacagcacttcaggggcaaccttctcctctatcttttctccactcaccatcaaagaagccctcaatttcccaggattctaggacatttccctaaggtgggggtggtgggacaggtagtaagactgatgccttttaactttccaagacctttctttatttcctgagatgaataaataagtggcaatggggtgtggggatgtggtgaacacagaacaggaactggcagcatgcagctggcaggagggagctgtgatggccccacccctgtgaggaccacctaatcctaagcaggggccaaagctctagcagccaccattaaggaaaaacttttgaaattcacacattgtgaagcctgccagtccccgccaggtgaagagctcatggtatccaccttcagggctactttttaccccaggggccttgtctgcccgggcctgggtacctgggctgctctgtaaggcaggtaggggtgcttaccccactctcaaaaataaaccaagctgtcctgagtgtccagcaggagggcagcccaagctctgggggcagcgtgggtgggaggaggtcctacaggtggtggccgcgattatctgcccttgatgaagccctccagcacacggtcactgcgctctgacaaccagtagccagtcatggccgccacagccccaatgaagatggcggtgaacaccaagtcgcccttagcagccagcgtggccagtgcacagatgatgatgccaaagaacatctgctgcagcaccaccaactcgtcttctgtcatctctgagaagaagcctgctgactctgcagaggagcaagagatgcagcctggcactcgtatccctgttcctggtagttcttggagtctccccagaactcccacacacctgatcatcatggccaccaggcctgcccagcaagccaggcacactacatttactgctcaaaaccaccctgcaaggggcagttaccatccctgtctcactaaatgggaaagtgaggctcagagaggtaaaggggttggacttgccaaggccatgtggtggacaagttgggggcagagcatttattacgtgtatgagtctcgttccacggtcagactgtctggattgggatcccagctttgcgacttgcttgccatatagccctgggaaagtagcttcatctctctgcatcttcatttttacatatgtagagtggggatgagaacccaacttccagcgtcgggttgtttcaggggttaaatcagttaagatggggaatgcacctagaacagcatctgacacagtaattgctggggaaatggtccctgccatcatcgttgtgattaccctgcatctcaccacacccccggcctaggacagctctcagcaggccagggcaaacactggtcccattggatagatgaggaaacaggttaaggaggcagactgatttgatgccaggtctgattccctttgtaccctggaaggtataaggctgctgagagccaacctggagatcagatgtagagcccggtctcagtgcagcctccagggggctgggtggcagtagggatggggcagggcctggagctgccactgctacctggggaaggggcttgcctgccttctctttgaatgaggacctcccctctcccgccccagggctcacctgggatctgctccttcacacagatgccttccatctgcttgtagccctcggcacagatgcagcgataaccgccctcggtgttttcacactgcttgttctctcccggacacacctctgtctcacactcatccacatcttgaggggagggaggggtcagagtcctgctagggccccccacccagcaccctgactccatcttgtccatctctcaacactcccctctgcccttgcccaggcaacattccacccttccttcccccacctgcccatattccagcctcttcaccattcatgctgggtgaggcactcccaggtgcctgtgtcccatcagcaggagactcaccgagacacttggagcccacctgctgatagccagggctacacttcttacagcgacctggccctgcccccatgcagcctaggcaggccttggcacagtctggagagaggagagaaagatgagggtgagatgtgcacctaggcccaggggagccacgctccagaagcggaggcctgggggtgctctgaagcctgagaaggggaaggtttggagggacaggtgtggagcagctcttcctccactcctcacgtcccctcctctgcagaagtagacactgacctcggcactcataggagccctcagtgttcacgcagaattggtcagctccacagttggctccctctgtgccacactcatcaatgtctgcagagaggtgagcagggtgagaatttcaatccctatttagtagggaagctgaagccagagccgttggggaatggtcttgcctgggattaaatggtatggcagagactgcaagctgtctaccaacacagaagcagactagctggacttcaggctgcccagccagagaccacatttgccaacctgtcttgaagctaagtgtgtccctgtgattgagttctggccaacaggatgtaaacaggagtgatgagctccaccgttagcttggtcttaaaacaatgcttggactcctcaatgcactttctttcccttctcccttcctgagtgctggcatgtgggacacagagatgcccaggactcagcttcaaccatgcagacaacgcccaaggggatgattgtgcagtaagttacaggaataatctgggtactggaatgattatgactagcagagctcccctgccagcctggactactcactttgggactgtaatatgataaaaaaaaataaacctctaccctctagattcttttttttttttttgagatggagtttcgctcttgtcacccaggctagagtgcaatggtgtgatcttggctcactgcaacctctgcctcctggattcaagcgactctcctgcctctgcctcccgagtagctgggattacaggcacctgccaccatgcctggctaaatttttgtatttttagtacagacagggttttgccatgttggccaggctggtctcgaactcctgacctcaggtgatccaccccacttcagcctctcaaagtgctgggattagaggcgtgagtgagctaccacacccagccaacctctatactctttaagccacagtcttttggggatttttgttacagcagcttagcctttactttagtctatataagtggctaggctgggaccaaaccaagtcttgaacccaggtttcctgaccccaagttcagtgtcctcattctcctagccaacccttcctcatttttttttttttttttttttttttttgagatggagtctccctctgttgcccagactggagtgcagtggtgcgatctcggctcactgcaagctccgcctcccaggttcatgcccttctcctgcctcagcctcctgagtagctgggactacaggcacccgccaccacgcccagctaattttttgtatttttagttgagacagggtttcaccatgttagccaggatggtctcgatctcctgatctcatgatctgcccgccttggcctcccaaagtgctgggattacaggcgtgagccaccgcgcccagccccttcctcaatttttaggacttggccaaagtaacgcctcctccaagaagcctttcctgattccccatcaccacttccactgaactagatcagaggcatctctcactgtacacagggactatactacacagtacctgtgtactggactgtaagtatctggttacttttctgccttcccagccaggttgagatctccatgaaggtggagactaggctagtctagcccaggcttgtgttgagagaataaaggaccaagcccaggcccctgaccatcttcccagacctagctagggccccacttacctacacacttgaggtgatgcagggcccagcccttcttgcattgcaaacagtttgattcctcaggtcctgagcatcgggcacaggggccaaaacaagctgggtggaatgggggcagcatgaggatgggcaggcaggtgccccatctgcccctgcccagtgccacaccttttggctacctacccgaacataccagatggctggcgttgcgttctgcctcaaagtagccaaggccacactggccacaggcctcacccccgtagccggcttggcagtcacagtgcccgctgccccctcgtgtcccttctccttcacactgcccgtagccaccgcagggcctctctgttcccccaggacaggctgtgggaagacaccaaaccaggtgaggtcatctatacaaccttgatatacaagataatattttctccctctccctctccctctcccttgccttccctccctccccccctcccctccccctccccctttccctctccctctccccatggcctccctctccctctccccatggtctccctctccctctctttacacggtctccctctgatgccaagctgaagctggactgtactgctgccatctcggctcactgcaacctccctgcctgattctcctgcctcaacctgccgagtgcctgcgattgcaggcgcgcgccaccacgcctgactggttttcgtatttttttggtggagacggggtttcgctgtgttggccgggccggtctccagctcctaaacgcgagtgatccgccagcctcggcctcccgaggtgccgggattgcagacggagtctcgttcactcagtgctcaatggtgcccaggctggagtgcagtggcgtgatctcggctcgctacaacctccacctcccagccgcctgccttggcctcccaaagtgccgagattgcagcctctgcccggccaccaccccgtctgggaagtgaggagcgtctctgcctggcggcccatcgtctgggatatgaggagcctctctgccaggctgcccagtctggaaagtgaggagcgtctctgcccggccgccatcccatctaggaagtgaggagcgtctctgcccggccgcgaccccgtctgggaggtgaggagcgtctctgcccggccgccctgtctgagaagtgaggagcccctccgcccggcagccgccccgtctgggaagtgagaagtgtctccgccgggcagccagcccgtccgggagggaggtgagggggtcagccccccgcccggccagccgccccgtccgggaggtgaggggcgcctctgcccggctgcccctactgggaagtgaggagcccctctgcccggccaccaccccgtctgggaggtgtacccaacagctcattgagaacgggccaggatgacaatggcggttttgtggaatagaaaagggggaaaggtggggaaaacactgagaaatcggatggttgctgtgtctgtgtagaaagaagtagacacgggagacttttcattttgttctgtactaagaaaaattcttctgccttgggatcctgttgatctatgaccttatccccaaccctgtgctctctgaaacatgtgctgtgtccactcagggttaaatggattaagggcggtgcaagatgtgctttgttaaacagatgcttgaaggcagcatgctggttgagagtcatcaccactccttgatctcaagtacccagggacacaaacactgcggaaggccgcagggtcctctgcctaggaaaaccagagacctttgttcacttgtttatctgctgaccttccctccactattgtcctatgaccctgccaaatccccctctgggagaaacacccaagaatgatcaataaaaaagacaaaaaaacaaaaaaaacaagataatattttctgctctgcatatcagtaaacatttttggagaagaaaattaattttaatgacataatattttgtcataaaactgacatttacttaaccaatttcctcttgtggaacaattagattttacagaccttttatttatttatttatttatttatttatttatttatttatttatttttagtgacagggtctcgctctgtttcccaggcaatgacatgatcatagctcactgcagcttcgaactcctgggctcaagcaatcctcccacctcagcctaggggaacaacaggctgcactaccatgccccactattttttttttaagagacagggtcttgctctactacccaggctggtctctcaaactcctggcctcaagtgatcctcctgcctcagcctcccaaagtgctgggtttacaggtacgagccactggaccaaatattttcttttttttttttgagacagagtctcgctctgtcgcccaggctggagtgcagtggcatgatctcggctcactgcaagctccgcctgccgggttcatgccattcttctgcctcagcctccagagtagctgggactagaggcgcccgccaccatgcccggctaattttttgtattttttagtagagacggtgtttcaccatgatagccacgatggtctcgatctcctgacctcatgatccacccaccgcagcctcccaaagtgttgggattacaggtgtgagccaccgcgcccagccaatattttcttttacaaagactgaatttgccatctttgtagctagctctttatctgtagcttcaggaaagactgctctaaaagaggctggtagtaagttcagctcttgtgccaggactgtgtgtgaggatggatggcgatcatggaggctccaggtcagcacccgcccctccccaggaaggtaccatagtccgatctggcatgggaaatgaaggggctgggaagtctatcatttctttagtacatgatgataactatactgcatatgactcagtctagcccctgtgctttctccaagcctttccccactgatttgcccatctccccagccctgtcaggcaggcaagaactgaggtccagagaagtttatctgagtagcctgagttcacacagcgaactagggacagagccaggactggatccctggactcggtggtcccctcccatccccaagagcaacttaaaaactcacgaaggcaggagggcccgaaggtgcctgcggggcagcagagcttcagggaatctgagcacagccactggaagaggtccggggcctcctgctgcctgaggcaggggcagggtggagggaggtggggaggaggtgctgagatagtgtcataagtgctgttcccattcccccatgcctgaatctgtgattcaacccagcttggacataagacccaaaaggccatctgaccaatgccctttccccatttggcagaagggtaaactgaggctcaaagtggagcgcaagtcccccggcaagttcttagcagacctgggtttggaaggagcacaaccaggacatgggccccagcatgcacccccctgcttctcggccaaatcaggccttatcaccaggcctcacctgtgacccacttccagggaaggccctttgccactcacttgtgaaaccaccagctctccaccagctcctcactcagctccagcaggcggtggcactcgaagtctgacttgctgcacacaccctccagcacctctaccaggcgggtctcactgatcggacagggcagggctggtgggaaacatgccccaccccacccaccaccctcctcaagtctctctccacccttcctcgtgcggtgaaaatatcaaaggagaggccatgaggtataatggaaggggtcatggttctgggaagcagagagacctgggttcaaatctagtggtagatctagtgggcaagtcacttaacctctctgaacctctttgttttgtcatctgtaaaatggggatgacaataccttccctgcaggtttgttgtaacatacatcagttcctgcatctgagcaatggaatataatacccttgctgggtagatatggctaaaaatacatcctataacaagtgttggcagggatgtggagaaattagaatcctcccacactgcaggtgggaatacaaaatggcatcaccactgtggaaaagcagttcctcaataagtaaaacatggaattgccataggacctgccaattccactactggatatagacccaaaagaatggaaaacaggtgttcaaacgaaaacttgtagacaatgttcatagcagcactattcacaacagccaaaaggtagaaacaatgcagatgtccatcaactgatgcatggttaaacaaaatgtggtacagccaaatgagaatattattcagccataaaaaggaataagtattgatatatgctacggtatgggtgaaccttgaaaacattatgctaagtgaaactagccagacacaaaaggccacatattttatgattccaatgaaatcagcaaatccataatttctgcttgactaacacaaattagtgattgccaagagccgagggaaggggagaatagggagtggctgtgtaataggtataggattttttgggggggtaatgaaaatgttctggaactacatagtggtgatggttacacaacattgtaaatattattaaatgtctttaatgggaaattttttatgtgtattttaccacaaatatatacatatatatatatatatacgcatatatatacgcacatatatatacgcagacatatatgcacatatatatacacacacatatatatatacacacacacatatatatacacacatatataaatatttgatgtcttatatcctgtatttaaagggtctggcacagtgcctggcatataggaggtgatttaaaaaagcaagcaacgcaggagccattacaaagctggaagtgcctctggggttgtcttagccaatcccctcattcctgaatgaggaaactcaggcccggcgaaggaaaagagaaaatgaccaatgttacataataacaaaacctttatttctagtgggcatcccagttaagccttttccacacttctatgaaataggcaaaccaggtattaatatccccattttacaggtgaagaaactgtggctctgagaggttaagaaccgacaaccaggtctaactctgagcctttgctgactcctcttccatctgactttgaaaagctggagggctcagggctcgcctttctgtatccttcccatgcctttctttacatactgactatataaatggctttctgtattacatatattgactatataatggctttctgtatccttcccatggctttctttacatactgactatataatgacaactctcaaattcctgtttccaattcctactcttttctgaattccagatttgtatggagtctacctggatgtctaatggacatttcagcccaatacgttcaaagaacaccacatcccacccctcccctaaaccttctcggtttcgcatctcaccatcttagaaaacagctgcactactcacccagttgctcaggcccaaaatctagtaagcatcttttattctactgtttctctatacccataatgaatctatcaccaggtcctattgttctctctgcaaaatatacccagactgtgacctcttcatcatgtcctccactagataccacactagcttgtgttgcctttgtacctagatgatgcacttgcctcccaaactggtctccctgcttcctccgcccttgccccttacaatccgtttgctacatagcagtgtgagtaatctttaaaggtgtagagaagacagtatcactttttctgctcatagccttccaagagcttcccattacactccaaaaaaaatctaaactcttttctgtagccctcgaggcttaagcctttgccttcaccttctagcactctccccttggctcactccactccagccacttctcaaatacaccaagctcagtcccatcctctgcccaattccctccctgtcacatagctcgcttcttcacttcctgtctctctgttcaaatgccaaaccttgaacaccttgcctcccaccgtcctgcagtctaccgtgcttcactgtttgttcttcatctgacataatattattcacttactcattcactgcttgtcttctctactagaatgtgagctccaggaagggggcattttgcttgccttgtttactgctatactatagatgttcagtgctatttgttgaatgaataagtgctccccaagagttcctagccctacaccagcagagcagagatttggcggggaggggaatatacaccccttcccccagcagccccttacctgtctttgtatttggacaaattctcttcctcccaggcagtgtttccacctccaaagttgtcccggatggttctctccaggccctggaaacagaaaattagtaatagctaagtacagtgcctggcacatgctagcacttcactgttctactgactaggaaactgaggcacagaaaggcaacctgcctagggccatacaactagtaagagaccaagatgaaacttaaatccacgcagatttgcatcccagagttccccactctaaatcgctgtgttcccctctaacgaggctgccggtgcacccaccttgttaaagctgtcaaccagtccccggcaggtatgacacggatggggctgaggcgggggagaagactggggaggtggagagggctggagccagataggtcctgggaggttgaggaagaggctgaggccccagagcacagctgggactaggcccttcgggggccatggggccatctttacccaggctggggacctgcagatagagggcgtggagaggcttcactgaaggagtcaggccccacgcgagaaagaaaaaggtctgttctaaggtgccgtggcgctgggatctgcgttattacaagcaaaagaggccaaactgggtattgcaggggctgtggggatgggtggggaaaggcgcataagatgcaattccagaagagaaataagttatcctcgctagcatggggtggagaggaaagtggcctcgctccttgacaagggggcagaagtcagcctcttgtctgagggtctgataaagaatattaggggccggatccgcagaattagggagaagagatcagattccaagtactgaaggagaggaggccagaggggttgtcttgggggaggtgtccggaaccccgggcttggagggaggagcccggatccggatatgaagggaagggatcagattcagggcctcgcagaagggcaaaggcacggcccacgagccggcagagaaggatccagaccctcgtaggccacggagaaggaagaagcgaccgccccagcccgcgggcgccgtgggccgtctcctcaccgcgtcgctgccacagcctgcgtaaaacgcacaacccccacccgcgccgcagtccagggggcggagcttgccgcccagccaatggcgacgggccatgtgccattacgtcaccccacgccagccaaccagaggcggcaccgagctgcacctgtccgggctttaaagggccgcggggctagggaacgacgtttgccagccccgccactgaaacggagacgcgtgtgggccacatgggtagaaaaacagcgtctgcctttatttaagtcccgtcccccgccccaggtcccgcccctggtcccaccccgcgtcccggcgcgggagtccccgggggatggaagtagctatccagggctggctgaagggcccgggacacttgctccgctctctcttggagccgcccggaacgcggggcgcgaggctgctgcagggcccccaggaagtctggcagttgggagggcagtgtgaagacgggcacggtgcggaaaagggcgggtacggcgtccgggtggagcagcctgtcgaagcaggcccccacgtagctgccgggcgcccggccctgcaagaagtcgggcagcacgcagctgagcgaggcgcggaaggcgtcgtgcgggccgtgcgccccgggcccggacaccccatcctgtagccactcgctgcacagcgccaccgcaccgggagagaagagcaagaccaccacgccgccctcctgcagggtctggcgccgctgcgcgtgaaaccaagccacgggcccctgcgcgctcagttcacgacggctccacaggtctacggccacgcgcagcggcagctggcacagggccgacgccagggcgcccaccaggcgctcgaaacccgagtcatcggctgagtagaggagcagagccgcgcggcccctggcggccgctgccggagaaaacagatggggagggaagaggtgagctggcacaggcctggctccccgggggcggccctccgcccagcgcttgctcccactcaccccccgagcggacgtcctgtttcaagagcctcagccaccctgttaggggagaggggcggaggcagccagtgagctcggccgccgctttccctcggagaactcccacagccactctggtcctcccccaggggaatggggagccgggaagcgctcacctttcgcgtgatcctttttgagaaggaggatgagggaaagcgcagcggcaaagagtaggcaggccagccacacgagggcccagcgcttgtggatgtctgggagacccagagaagaagagttagaaacttaccctccacagagaagaaaaactgagacttaacagaaatgaattgggccgggtgcggtggctcatgcctttatataatcccagcacttcgggaggccgaggcgggcagatcacgaggtcaggacatcaagaccatcctggctaacacggtgaaaccccgtctctactaaaaatacaaaaaattagccgggcgtggtggcacacgcctgtaatcccagctactcgggaggctgaggcaagagaatcgcttgaactcgggaggcagaggttgcagtgagccgagatcgcgccattgcactccagcctgggcgacagggtgagactcctctcaaaacaaaacaaaacaaaacaaaaaacgaagaaatgatttgcccagagtccacagcacagtgtcagagccagtggatgaatatagctccatctgtttaggggtctttgaataagtaatgtcaccctctgcctcagttttctcctctgtaaagttgtacctatgtcatagggttggtgtgaggactaaatatattaatacatataaagcttaacacaatgtgttaatacatacttaacacaatgccgagcatcttaagtgctaaaatgtcagctgtttttctcccctaagctagggttgctgggcccttgatcttgctgtcctgggtgtctgcaactacctggtgtccctgccctgtctttttttttttttttttacctccaattgatttgccttgaattgattcatgacagcctcagagatcttttaaaaatataaatttgggccaggtgcggtgactcacgactataatcccagcactttgggaggccgacgcgggcggatcacgaggtcaggagttcaagaccagcctggccaagatggtgaaaccccatctctactaaaaatacaaaaattagcagggcatggtggcaggcgcctattaatcccagctacccgggaggctgaggtagagaattgcttgaacccgggaggcagaggttgcagttagccgagatcgcgccattgcactccagcctgggcaacagagtgagactctgcctcaaaaataaataaaaaaataagtgtatatatatatatatatgtgtgtgtgaaatatataaaaatttgatcgtagctcctgctgctctcaacataagatccaaatcccctacatgtctcctgcatctttatctcatgacagaaacctgcctgtccaagaccctgtatctctacccccttcccctagctcagtcttcagagttttgctggaaccttccccctgagcccctcacccctcaccccacccaggtcaggtccacattgtatgcatttacagcactgaacacttggtggtgcttcagtagctcccactttaaatgtaagtgactggctcatgtcttgctagtcttctaggggtggggcgggggcaaggatttatatttttggtgttcctgcgatccctgcaagctctcatcattttttgagtgaatgaaggaatgaccctctgtttatctgatctcagggaaggacaaggccattgcatgtgctgtgcccaagagtggtccctgtcaagatccccactcctggtacagaaaggaaaggcagttcttacaatactcacatttgtccatggggcaggcccatagcgctcccaagtcatcgtcccatagctgtaagatacaaacagaaccaaatccagggcaccagccaggtgttccaatattcaccaagctctggtggcctgatctccaaatttccagcatcaactatgcatatctcccggctaaggttcctgcagctgctctgcctttgtgctgtgcccactgactagggtatgacttcttccataccaaatctggcttataggaagaaattcttcccggaagctctccctggaacccaaaacttagcacctgtaggtgtggttatctgtttatgggtgtctagccaacagtgtgctccttggggataggaactgtgcttcttctactcttaactttcccagggctgaacataaaataagcctaaatagacagtaggtgagtgctagttttaggcctgttgcccctaggcattgaggtggggcccttcttccaccagctcacctgcagacactggcctgactgcaggtcttgtagtaagtactctccaaggcgagctgccctctgccaagccaaaggatgggggcactgttacctggaggtagcacccttagggcagcacctaccaggctacagctgggtagaatgaggtagaggggactgggagactttggtgatgccgctgaatatggccctggtctgagtcaccccccatgttcccagagaccggcacagggtggatggagtgaaaatttgaggccagatgtgagatgcatttggagagatctgtggaggagggtcgcccagtcctaaccgtggaggctttgctgggtagtgaagtacagccactgggttccaaggcacagagggatctgttgtcctgggggcctcgtgtctccaacagtagcacatcgtctttgagaggccccagggagtctggaaggggtgagaggccactctgaccaagacccatccttgctgggattggccacttgcctgcctcccatgccctgaccttcacccctaggaggtggccctgccccagctgcccccaggcccaactcaccagcccacaagcactcctgcagctgcagcttctccgagctgttcacctgctgggaagagaccatggttagggccactaagaaaagcaaaagccaaaggcagaaagaccagaatggggcaggcaacagaaggcctgttgggttgggaatctgcactcaatctgacctgaggcagatgtggattcaaggctgggtgattaggaatcactacatctttctctgccccagccttgtgagatcatctgtataaagcgtcttctgaccctaaagctgtttttatgtcttacggagcatggttcccctctcatctaaccttctcaaagagattcctttctcacatgaccaccctgctaaaaattgcaaccccagtcccaccttatccctttcccatggtatttgtatgcaattttaagatactatatgatttatttacaatgtctgttgcctgcctttctccattacaatataagttctatgagggtagagatgttagggtctatcacaagtgcctaaaacagtgacttgtgctgctcaaaaaatcttgaatgagtgaattttttttttttttgagacggagtttcactctgtcgcccagtctcactctgtcacccaggctggagtgcagtggcgccctctcagctcactgcaagctcagcctcccaggttcacgccattctcctgccccagccttcctagtagctgggactacaggtgcccaccaccacgaccggctaattttttgtatttttagtagagatggggtttcaccatgttagccaggatggtcttgatgtcctgacctcgtgatctgccctcctcggcctcccaaagtgctgggattacaggcgtgagccaccgcgcctggccggatgagtgaatgttcttataatcaccctttgaaactgtagagcaacccattctacaggtatggaaatagaataaggatagcaataataaaagtggctacatttatggagcatttagtctgtaccgattcctaaggggaagcacttctcttatttcattgtcacaaccactccatgaggtagttactgtattatcatctgcattaaacagatgaggaaactgacgttcagagaggtgaagtgagttgcccagggtcccgcgcactactaaagtaggcagtggaactcccatagaggaagctggcaaccactatgctttagcggcccaagaactaagacccccttggctggggggtctgcccaggtccagcctccagcccagcactatgcacccctttctgacctgaacacagaggttagggtggcctttcagcaatgggaactcgagaaccttctgtggaaagagaggaatgggtgggatcacaaaaggggacccccggttccccactctcccctcaccacgggaggtgccctctgcttcacttacgtccacagtgacgttctcccaggaaagcggtgggaccagtggctggcaggggtccccacccggagcccgccagcacagtgccgcttctgcgggcagcgagcacggtgcgtccagcagccagctctgcagggtcagcagtcgcagtcgggcggcttgccagaggttctggtgtgcgcgggggtctgcaaggaaagggcacagtcaccgcaggccaggtacccatcgctcgcaacaccccaaccccagccccaggccggtcggctcaccctccctgaaggggcagatgttcgtcctaacggagtcaggttccagaggccacacctggaaaggaaatgggggtctgctcaggtcccctccatgggcatgtgcctggccctctgctggacagtggggatgcactcattcagcaggtatttcacaaacacttgctgggtcttcctgccttttacaaaacctggaggtgctcacatctattcttccagcaaacataatgctgggcactggcaacatcttcattaacaaacttttttttttttttgagatagagtctcgctctgtcgcccaggctggagtgcagtggtgcaatcttggctcactacaacctccacctcccaggttcaagcgattctcccatctcagtctcctgaggagctgcgattacaggaacatgccacaacggccggctaactggttaatttttgtatttttagtagagatggggtttcaccacattgatcaggctggtctcgaactcctgacctcaagtgatccacccgtctcagcctcccaaagtgttgggattacaagcgtgagccaccgcgcctggcccattcaacagacttttaatgagtgcctaccattgtgtcttagcagtatggcaagcacaagagaccttggataattaaatttttattatttttttattttttgagatggaatctcactctgttgcccaggctggagtgcagtggtgtgatctcagctcaccacaacctccgcctcctgggttcaagtgattctcctgcctcagcttcccaagtagcagggactacaggcgcacatcaccatgcctggctaatttttgtacttttagtagagactgggtttcactatgttagccaggctggtctcaaactcctgacctcgtgatccacccaccttggcctcccaaagtgctgggattacaggtgtgagccactgtgcctggtggataattaattttaattcattccacaatcactttgtaagcacctgctatgtgttggggaatgtgctaagttctaaggacacattcatttattctttcaacagacatttcaagagtgcctattatgtgcatagctctatgctaagcactagaggtaatacattaatttatccatcaagcctttagttaggaacaccgactatgtggcaggcactgtgtttggcaatgaagccatttaaatcacagcatacatctcatgaacatctgctgtgtcctatggctgtgttaggcagtaacatttattcactcattcaacagtgaggacctcatactgttaccttgtttaaaaacaaaacaaggctgggcgcggtggctcacccctgtaatcccagcactttgggaggccaaggtgggcggatcacgaggtcaagagatcgagaccatctggccaacatgctgaaaccccgtctctactgaaaatacaaaaattagccgggcatggtggcatgcacttgtagtcccagctacttgggaggctgaggcagaagaattgcttgaatccaggaggcagagattgcagtgagccgagatcacgccactgtactccagcctgccaatagagcgagactctgtctcaaaaaagacaaaaaaacaaaaaaaaaacaaaaacacaaaaaaacaaaaaacaagtaggcgctatgtgcaaggctcttgcaaagctattacatttgaattagatatgatttgcttgccttcaaggaaatcacaaactcacacttgtagtaaggataaaatatttatataaattagtaaaacactcattcatttcataatatttattgagcatctgttgtgtacaagaagaaattagatgcccaaataagaaagtaagtgattgagctgggtgtggtggcccatcgccacaaaacattaaaaaatgaaaacaggctgggcacagtggctcacgcctgtaatcccagcactttgggcggccgaggcgggtggatcacgaggtcaggaatttgggaccagcctgaccaacatggtgaaaccctgtctctactaaaaatacaaaaattagctgggcatggtggtgtgtgcctgtaatctcagctacttgggaggctgaggcaggagaatggcttgaacctgggaggcggaagttgcagtgagccgagatcacgccactgcactccatcctgggcaaaagagtgaaactccattaaaaaaaaaaaaaaaaaaaaaggaaacaattagccaggcatggtggcgcatgcctgcagtcccagctgcagaggctgaggcaggaggatcccttgaacctgggagcttggggctgcaatgagacgtgttcatgccactgcactctaccatgggtgacagagcaaaatgctgtctctaaaaaaaaaaaaaaaatttaagaaaataaaagaaatgaagtgataaatggacaaggaaagatagaagtgcaaggggatttggagctaggagaggccgggtggttggggaaaagctttgggaaggaggtgagggcatttgaggtaatgggaaccacctgagaaaaggcagggagctagctgtatcttggtaagtagctccactggatgtaacaatgttctcatgaaggggaatcatggggaaaatagagtgaaaaggcaccgttgggggcagaatatgggcccagaatgccaggaaagtgatgggaagggaggggagcttggaggtgttgaaacagtctagaaaacagatgatagagccctaagctggactgagatggagaggagggggaaagaaaatgagagacattaatgtcagaggtaagatggatgagacctgatgaccaattaaatgtgcaatcagcggctgggcacagtgggtcatgcctgtaatcccagcactttgggaggacgaggcttgtggatcataaggtcaggagatcgagaccatcctggctaacacggtgaaaccctgtctttactgaaaatacaaaaaattagctgggcgtggttgcaggcacctgtagtcccagctactcaggaggctgaggcaggagaatggcgtgaacccaggagaagcagcttgcagtgagccgagatcacgccacggtgctccagcctgggcgacagagaaagactctgtcttaaaaaaaaaaaaaaaaaaagtgcaatcagggcaagccacagtggctcatgcttataatcccagcacttggtgggaggctgaggtgggaggatagcataagcccaggaattcagaacagcctgggtaacatagcaagaccccgtctctacacaaaacaaaaaaaaactagctgagtatggtagtgctcaccagtagttccagctacttgggaggctgagacaggaggatcacttgagcccatggggctgaggctgcagtgtgccatgattgtgccactgcactccagcctgggcaacagagtgagaccttgtctaaaaaaataaataaatgtacagaggaagaggaaagagccagcatatttaagcctgggtgtggcacacattcttataacagccccatgaggctgttactattattattcccattttacagatgagaaacaggctcacagaggtgaagtgacttgcccaaggttacacagctagcaaatggcaagagccaagattcaaaccagtccaagttcgtagcacatgctctgcccgccaggggaacacaaagacagaactggaggagtagggaaaggtttcaaggagaaggtgacatttgaatggggccatgaagaataagcaggagttctgtggaggatcagggagagcattcagggaatgtaatagacagaaggcataggacagcaagggtcaagggagggccagccaccccagggagccacagtctccacctcaatgaagggtttgaagaatggtgagaccaggaaggcagggatcacccccatcatcatcttcccactcctcttctggcacccagctagactctgctcctacctgaatacagaggcagggaaccaggtctgtgtggttcaaggtaatgatctgcggtccagtctgtggaacaaataaaggaaggaggttggagaagataaggaggaagaggaggaggccaaagtcaaggaaaccaggaaggcagaagttcccccaccaattttcccttgcttggggtgagtcctcttcaaggatcctctctgatatggcactgcgtcctttgcacaggcatcggcctacagtgggaatggacttgggaagggggaggcctcaccaggtttttgtgccaccggggttttggggggccctggacctgattccagtacagggagaggccgaagtgctgctcctcagagacattcagaaccagatgcacgttgtcaccatctgctgacacgttgagccagggcagggctgg

SEQ ID NO: 1120 - DNA, 308 bp, Homo sapiens
ttttttttttcctttttttttttttgagatggagtctggctctgtcgcccaggctggagtgcagtggtgtgatctcggctcactgcaagctctgcctcctggggttcaagccattctcctgcctcaggctcccgagtagctgggactacaggcgcctgccaccatgcccagctgatttttttgtattttttgtagagatggggtttcaccgtgttagccaggatggtctcgatctcctgacctcgtgatccgccagcctcggcctcccaaagtgctgggattacaggcgtgagccaccgcgcccggcc

SEQ ID NO: 1121 - DNA, 1024 bp, Homo sapiens
gcggccgctgcaggtcgctcagcgacgtgcgcgtgcgcgggccggtcccacagcacgtagtggaagcacccgacggggcagccgctgcggcttctggcagctccctcgacagcttctccaggggttcactcaagatcagttggaacccctggcgccacgggctgtcatcagtggacagtctgcccctagatgagttgcccagcacggtacagctactgcctgccccgaccccagcccctgattctaccgccgctcggcagggggacggccagggagaggtccagccgcgcggcaagcctggggaatcccgcagcgcctccagtgataccatcgagctttgaagagcggtcctgacgcagggccaggaccctgcccgatgcccacatggcatggcctactgggacagttgagcctttaaaaaatgggcatcctggccaggcgcggtggctcacgccaggaatcccagcactttgggaggccgaggtgggtggaacacgaggtcaggagttcgagatcagcctcctggtctcgaacatagcgaaaccctcgtctctactaaaaatacaaaaaaattagccaggtggcacacgcctgtagtcccagctactcgggaggctgaggcgggagaattgcttgaacagggaggcagaggttgcagtgagccgagaccacgccattgcactccagcctgggtgacaagagtgagactccgtctcaaaaaaaaaaaaaaaaaaaaaaaaaaaaggcatccccaggcctctctacctgacggcaacccccgggggacagccaggtttgaactcaccccacccccatgccgttttttgcttttaatatttctatttttttttcagccggcattttgcacagaggccgtgtcttatgcggaatacagggtgggtgtgcatggattcgggcatgaagaacagggagcaggtgccccagactccccaacgtggagtgatgagcctcgcttgtctagattgtcctctttgtgccaaagaaataaacccttaggacttgg

SEQ ID NO: 1122 - DNA, 7365 bp, Homo sapiens
gaaagcgtgttggccaaatctgaatgatgaaagccaattacaaactagaaaatgaaaacagaccccagatgcaaggagatgagacagttaaatttacttcctcttttctaatctgagaggtttcatgttgaagaaaatcagtgttggggttgcaggagacctaaacacagtcaccatgaagctgggctgtgtcctcatggcctgggccctctacctttcccttggtgtgctctgggtggcccagatgctactgggtaagtaaaatatttgaatattggtgtgggaatggagctttgcttaccttgggagaaaggaccagaaggaaagaaacatggactaattctggccctccaaagaagcagtattcaggtggaataagaagggtaggtataagaaagtttggtgtacaggattgaattactttctgaatataaaaatcttccatcctgaaagtcccctctgatcatgatatcctctctagctctaatctcaactcttttctttcacttgtgagacaagttttcttaaaagaatagtttgcacttgctatctccacttcctcacttctcacacgctcctcaatgcttgcagcctggcttccactggaattggttttgtctagggcacaacgatctctatattgactgggttatggcatgcttttcagttcatatcctgctggacttctctgctgcactgggctctgttgatcacttactccttcttgcattctctactaccctggcttccatggcaccattttctccttgtactacatggacttctcttgatcccttaatagcttctcttctcttccccttaaacactagtgttctctatagttatagccttgcctctgtactcctctttctttacacaatctccttcatgagcttatttgtctgtttaatttttgccactataactctgtatttaagagtcccaaatcatatccccaaccctaaccatgcttttgagcttcacattcaaatatcaagcttcataccagacatatctacctacatatctcacaagtgtctctgcaccatgtgactagagttgaacttatctgtccttttggcccctgcctcatctaattcattttccactttctgatctcagctaatgacaccagcatctacccttacaaggccataaacctcagaaacaacccagactcttccttctttttcattctctaaatctgatcaatcattaggtttggccaattttaccttctaaattgttcatagaagcagtcccttgcctggatcatcactaatgtcttaggacaagccctcatcctctatgacttgggctattccagtaaattcctaactaatctcctcgtccaaaccttgtgttcttgaaatgaattctgtaccctgcagacagagtaatttctaaaactcaagtttaccagcccaaattctttatcatggcacaaaaggccaagcagcctctacttttaccctctcagccttgtaacttatgctctaataaatctcaatcagttcatatttacatactcacacaccagactcttgcctgtctctaaggctttgcttataccactatctctacctgaaatgagttctttccatggcaccctactctccttctccttgcaaatgtgtaggtacccctaaagactcagcttaaatggtatcttttccaggtagcttttcttgaatgcttctttctgctccaatggctgcttgcgatacatttttcttattataatattttcctacttatgctgaaataatattttcatctacctgtgtcttccactaaattgagagctatttgtgggtagtgacaatgtttttttgtttttgtcttgtgataagaactgcagacttggaatcagatactcctgtttcaagcccctcttctatttaccagctctatgtcactttagaaaatcactttttctatttctggttcagttttctcatttgtagaatgaaaataataatacctaccacctaaggtttattgagtgagttcccagtaacccaacaagattttattttattttattttatgttttgagacagggtctcgctctgccacccaggctggagtgcagtggtgcaatcactgctcactgcaaccttgacctcttgggcttaagcaatcgtcctatctcagcctcccaagtagctgggaccacaggcaagtgccaccaggcctggccaattttttaaaaaattatttgttgagacagggtctctctatgttccccaggctggtctcaaactcctgggctcaagggatcctcccacctcaacctcccaaagtgctgtgattataagcatgagccaccacgcctggataagattttatttttaaaaagaaaaaatggagaggaggcagagcacagatgagtgacagtggaggaactgaaaagaggtagcattacagtgaagggagcggagaaaggatggaaagaaaacacctggtactgatgtgatgagaattaggaagtagggaggggtcttggtaagggacatgacaaaatcaaagaagaacgctgggctattgggagtggaagagaataaaggcaagtggggcacgaaatgacagtcagatggagtgaagaagtatgcacatgtgaatggccatgaggctggaggagggggagaatagttagggagataaagagcagtcccagagaagggagaaatgtcacttcccttgcctaggtctaccatgaaggtaagagataggttgaggagatgtggtgagaaatggataattctaaatttcaatctggagcaaagaattgttccacagttactaatatggactgggaggaggggaaaaaagacagagaaagctctgtgccactgccagggaaaattcaagtggcagaggacattaaagtaaagatggctgaaaagtgaagacctgcaagggggaggaagaaaggaggagagacactgctgggtactgaaagctctttgttagataacatattcaaggctgaggagccaagtgaagtttgggaaaatcagaatatgaaagaaagtccccgaggaaggtctgaggactgaagtagaccatatttgcacagtgaagtaaaaagaacattgattttggactcagacacacctgcctttcccgatccattgcttagtctctttttaagctttgggtatgttaatttggttttctaagtgtgtttctttaagattataaaatgaggataaagtcacctacctggaaagtttgtgaggatgaagttagatactgcacacaagtgctagcagggtctggcacccagtgaacattagaatctgatgtctccctttcattcctgtcctatgcctccctgcttcgagttaccattgtctttgctcctggtttcccgtaccagcagctggatgtcatgccggtgagtttcaccattctttcattctctcccctccctcttctccaaaccacagtgcatttgctgagagcacctggacgccagtgaatcaaggtcaaaactatccccctgagacactctcaggggtctttccgaaaaaaaaaaaggttttgatgtcttactagtctcattctaaaaaggatgattatcctgggagatggaggaaccctgtcctctttctccaagttgcatcatcattttctggttctccctgggccatgccctcttcagctgccagttttgagacgctgcagtgtgagggacctgtctgcactgaggagagcagctgccacacggaggatgacttgactgatgcaagggaagctggcttccaggtcaaggcctacactttcagtgaacccttccacctgattgtgtcctatggtgaggtcctgggaaggcctgagcagtgccccaaaccccttctttcagcctcagagcccacccaggaaagtgtccctaggaaattggctatgggatgaggtacttccttcccagtcttcagcccacagcaaccagggtgctctaagtcctaggccctagggaagttgtcccatactcccaaccaggggtgagagtttacctggaccctcagagaaagtttaggggagtaggcatgcttgggggtggcccccaagggaggccctgggtgacactcagctctttctctggaccatagactggctgatcctccaaggtccagccaagccagtttttgaaggggacctgctggttctgcgctgccaggcctggcaagactggccactgactcaggtgaccttctaccgagatggctcagctctgggtccccccgggcctaacagggaattctccatcaccgtggtacaaaaggcagacagcgggcactaccactgcagtggcatcttccagagccctggtcctgggatcccagaaacagcatctgttgtggctatcacagtccaaggtgagagctagaagcagcattgtcatggcaggggagggtaaggagagacagggagcccaaattgtctttctttagcctggaggtagcaagatcatcaacagactatggagcaggttgctggcaaatgcccaagttgggcttcgaaagggacgagacctcagccttttgaagtcatccagccccactcagagtccagcatagttcctaccacccagatctatgcttcctagtgctcactgattgggtgtctggacaactatcagatttgcccatctgtggatctttcctagtcctgtctacttacagaaagaacttgacagattcaaatggaatctaagagagcccattcctgctggaaacaggggaaaggaagtatgactccccaagtctcttcacctgcatgtgtctacctgtatataagatggctgagctcttctttcctgcctatctttttcccagaactgtttccagcgccaattctcagagctgtaccctcagctgaaccccaagcaggaagccccatgaccctgagttgtcagacaaagttgcccctgcagaggtcagctgcccgcctcctcttctccttctacaaggatggaaggatagtgcaaagcagggggctctcctcagaattccagatccccacagcttcagaagatcactccgggtcatactggtgtgaggcagccactgaggacaaccaagtttggaaacagagcccccagctagagatcagagtgcagggtgagttcgcatcagagtgcaggttgtctgtttggcatgcgtgtgagtgaaaaggagggataggataaattgacctgtgagctggggttcagtgtgagcaggttaagaagggacacagagggggcaggaacaatgggccagaatccctgatgatgagagacagcacaaatagagaacttctccctcagactgtggtgcacacctcaccagaccaagagctgagccagctccacacctgctgccccacaagccttagcatcccccccaacatgctctctgggcatttataggaatttaatatctggaatgaagatgggatagtctgaagtctatgttcaattctgggagccactgttaagaggctgcacttgacctgaaacactcccagaagaggtgtccagggtgataagggggcttaaagtcatgtcatatgaaaaataatggaaggggctggagatgctatcctgaagaggaggtgactcagaggccagcagaggtgtcctcaaaaagctgaaggctggcattagcacaaggaattggactaatgtcttatataataaagaggctgacctagaaccagttaccacattcatgcttcagggaattagattcagccttgatagagaaagaactggctaatagttatagctgtccagtggtgaagcctcactgctgaagaatttcaaacagaagtggccaagcttcagattaaaatttggaccaggagggacactagagtcctcaagtccctgctgccattgggccccacagccactttcagagaacaagaaagattggccagggatgggagggaagggccagagtcagacttcactcttgtatgtgcctcctgccccataattcaggtgcttccagctctgctgcacctcccacattgaatccagctcctcagaaatcagctgctccaggaactgctcctgaggaggcccctgggcctctgcctccgccgccaaccccatcttctgaggatccaggcttttcttctcctctggggatgccagatcctcatctgtatcaccagatgggccttcttctcaaacacatgcaggatgtgagagtcctcctcggtcacctgctcatggagttgagggaattatctggccaccggaagcctgggaccacaaaggctactgctgaatagaagtaaacagttcatccatgatctcacttaaccaccccaataaatctgattctttattttctcttcctgtcctgcacatatgcataagtacttttacaagttgtcccagtgttttgttagaataatgtagttaggtgagtgtaaataaatttatataaagtgagaattagagtttagctataattgtgtattctctcttaacacaacagaattctgctgtctagatcaggaatttctatctgttatatcgaccagaatgttgtgatttaaagagaactaatggaagtggattgaatacagcagtctcaactgggggcaattttgccccccagaggacattgggcaatgtttggagacattttggtcattatacttggggggttgggggatggtgggatgtgtgtgctactggcatccagtaaatagaagccaggggtgccgctaaacatcctataatgcacagggcagtaccccacaacgaaaaataatctggcccaaaatgtcagttgtactgagtttgagaaaccccagcctaatgaaaccctaggtgttgggctctggaatgggactttgtcccttctaattattatctctttccagcctcattcagctattcttactgacataccagtctttagctggtgctatggtctgttctttagttctagtttgtatcccctcaaaagccattatgttgaaatcctaatccccaaggtgatggcattaagaagtgggcctttgggaagtgattagatcaggagtgcagagccctcatgattaggattagtgcccttatttaaaaaggccccagagagctaactcacccttccaccatatgaggacgtggcaagaagatgacatgtatgagaaccaaaaaacagctgtcgccaaacaccgactctgtcgttgccttgatcttgaacttccagcctccagaactatgagaaataaaattctgttgtttgtaagctattcagtttgtgtattttgttatagtagcccaaatggactaggcagttggcctctgccacatgactgagtttatgatatgttaaaaatactcataaaacagtg

SEQ ID NO: 1123 - DNA, 2593 bp, Homo sapiens
tgggcacctgtaatcccagctagttgggaggctgaggcaggagaatgaatcgtttgaacccaggaggtggaggttgcagtgagctgagaccgcaccattgcactctagcctgggcaacaagagcaaaactccgtctcaaaataaatacatacatacatacatgcatacatacatacatacatacggggattaaaatagtctagtagtgacacctgaacagagagattgatccaagaaatgaaacagaaattccggaagttgacctgaatacacacacacacacacacacacacacacacacacacacgaaggcgtgaaagactccatgaccctcaaggtataagatgcattttttttttttttttgagacagggtctcactctgtcacccagactgggtgcagtggtgtactatcccagctcagctctaccctccatccccccaacctcccccaaccaccctgagctcaagcaattctcatgcctcaaccctcagcctcatgagtaactgggactacaggcgtgcaccaccatgcgcagctaattttttgtatttttagtagagatgggtctaaccatattgcccaggctggtctcgaactcctgagctcaagcgatcctcttgcttcagcctcccaaagtgctggcattacagctgtgagccaccgcacctggccgcattcttctaaatcacagtacatctggctcccagtgcccaggctctcagggcagaaggtccagtgtgatcactttgcatggcctctctcccctcctgagcttgtgccagggccccagggctgacctggagaaggaaaatggcagagggtgaagatggggtgtctggtttggggaccatcctggccccccttgtcactgttgacatctcttctgcacagtggcattgctgggaggtgcttactgtgcctattcaaggggctggcagccgcagcctcactgcagatcagggacttggcttcccagttgaccacaggtccaagaacctgcagggtccagcctcccccccatccccagtcttccccaccctggcccggccctccaggtgcagaaacatgcaggcccctctccaggactgtgggaggagcgtgtccctcagactggcctgtgtcctggctcctcttaccacctcttccacaggttgtcacctgcagctgccccaggataaaggcaaggccagagaggactcctgaactcctgtgtgcctggggtggcaggggcaaacatagccaactggtggcctgagcggggccatggtgaggacacccttggtggcttgtcccacatcaagctgggaggtgacactgaggatgcattagtctgcagcgtatgataaaaacggcatttcaggccaggcgcggtggctcatgcctgtcaccccagcaccttgggaggccaaggtgagcagatcatatgaggtcaggactttgagaccagcctggccaacatggtgaaaactcatctctactaaaaaaacaaaaattatgtgggttggtggtgtgcgcctgtaatcccagctacttgggaggctgaggcaggagaatcacttaaacctgggaggcagaggctgcaacgagccgaaattgcaccactgcactccaggctgactccgtctcaaaaaaaaaaaaaaaaaaaaaggcatttcagttcaaatagggaaaggatacatctttctttcttttctctttctttctttctttctttctttctttctctttctttctttctttctttctttctttctttttctttcctcccttccttccttcctttctctctctctctctttctctcgttctctctttctttttgagatggagtttcactctcgctgcccaggctggagtacaatggcgtgatctcggcttattattattctccatgttggtcaggctggtcttgaactcccaacctcaggtgatccgcctgcgttggcctcccaaagtgctggtgtgagccactgcacccggcttaggatgcatttttcaatattttagtgtttgaataacgggctaacttgagaaaaaaataatttgaatcacacatcacaccaaaaataaattctaggtggattttaacactttcaaaaattattattattattagtttagagacagggtctcactccgtcgctcaggctggagtggagtggtatgatcatggttcactgcaaccttaaactcctggcctcatatgatcctccagcctcagcctctcaaaggactggaactacaaacatgcaccaccacgcccagcctaggtgggtttttaaaatccattcaagggcgggtgcagtggctcacacctgtaatcccagcattttgggaagccaaggtgggaggatcacttgagcccaggagttcgagaccggcctgggcaacatagtgagactacatctctacaaaaaatttaaaaatgagccaggcatggtggtgcacacctgtagtctctgctattcaggaggctgaggcgggatcattgtttgagcccaggagacagattgcagtgagctatgatggcaccactgcatggcagcctgggtgacaaagggagattcagtctcaaaaaaaaaaaaaaaa

SEQ ID NO: 1124 - DNA, 149 bp, Homo sapiens
ggctgggtgcagtggctcacacctgtaatcccagcactttgggaggccgagacaggtggatcacctgaagtcaggagtttgagaccagcctggccaacatggtgaaaccctgtctctactaaaaatacaaaagttagccaggcgtggtg

SEQ ID NO: 1125 - DNA, 8996 bp, Homo sapiens
gacggggtttggccatgttggccaggctggtctcgaactgctgacctcaggtgatccgcctgcctcggcctcccaaagtgctgggattacaggcgtattccactgtgcccagcctgagtttctgtttagaaacaacagtctatgatagtataatcctctcttttttgtacacagagtaaagaggacaaataggtgaaagaataaatgaaaggctggaatcccacttcccccgctgtcccagggcattggatattgacggataggaggcagcaaaccactcacagagccaggaagaaatgaaggcgttggtattgccaggaggggaagccggctcggctgaaatacgctatgaccatagcaaggagatactgatggagagaaaggaacacagagagggagaggtcacatcttggaagaggaagattgtggagagggggaatgagggtctggggaggggctgcccatcagagaagggacctcagtgttggggtgactgtactcatttggaaattgcgggatggaggggtattcgaaggtcggatgcaaatccgagaagccagaggaagggttttgggtgatgctcccaggatggtgggctccgatgggatctttggagggggtgtgtctaggttggctggtgtcaggagggtcttttgtgtgccaggcagagaactgtcccgaagagctgagagtagaggggccaggagcttcagggctgcggccagactgtggcccagagctcagatcccaaaggacccataggagaggcaggggccactcattcactctgcaagagaccagcagaatcctgagggagatgctgacaaatcataaaaagaccaagaatagccgggagtggcggctcaagcctgtgatcccagtactttttgagaggtggagacaggaggatcatgtgagcccaacagttcgagaacaacctgggcaacatagtgagaccctgtttccacaaacatttcaaaaattagttgagcatggtggcatgtgcctagtcccagctcctcaggaggctgaggaaagaagattgcttgagcccaggaattagaggctgcaatgagctatgatcatgccactgcactccatcctggggagcagagctagattctgtctcacaaaaaaaaaatttgtgggtgccaagactcaagaccatgggagctggtcgggcacagtggctgacgtctataatctcagcactttgggaggccaaggtgggtggattgcctgaggtcaggtgttcaggaccaacctggccaacatggcaaaaccccgtttctactaaaaacacaaaaattagccaggcgtggtggttcatgtctgtaatcccagctgcttggaggctgaggcaggagaatcgcttgaacccaggaggcatcggctgcagtgagtgaagatcgagacactgccctccagcctgggcaacagagcaagactctgtctcacacacacaaaaaaaaaaaaaaaaaaaagactgtaggagcatctggtgggaggtggtggagggagaactgtgggtttggaagctgcgccctccccccagccatgcgttggaacaggaacagttacatggagaacaaccttaccttgtccgacaccctcagatctttgtcccaggccaggaatcttttaatgacaggatcctctgtgattagagagcagatgtcagtgtgagaagcaggacagggtttccgtgggagcagcagggcagcgaggagaagtgtgcctcccggggggaagtctcaggattgtggccgcgggtgaggtggatgggagaggggagaatgactttcactgggcaagggagagaggctcctgctctgagactcccctgagaagaggccgaaggaggccctgggtgtgagaatctacaggatgtagagctgggaatcagccaggaccccctccagcagacacggagggaccactgcagagtcataaaggaattcccatcatttcctcatgagacagtcacacatcagggtgtgaccatggccttggtatcccccactatggatggagacacttaggtttagaaaagtcagtaagagacattaagtttcagagggcacagctgaaaccactttctttgtttattgattttgtttttctttatttgatttttatttttatttatttattaatttattttgagacagagtcttgctctgtgggccaggctggaatgcagtggcctgatcttggctcactgcaacctctgcctcccgggtttaagcgattctcctgtctcagcctcccgagtagctgggattacatgcatgagctactgtgcccagccttggtttttcttttgagacagggttttgctctgtcacccaggctggagtgcagtggtgtagtcatagctcactgcagcctcaaagtcctgagttcaagcaatcctcttgcctcagcctcccaacgtgctgggatctcaggcgggagccactgcgcctggcccgaaaccaagctttcttatcccaagcgctgacctttatcaagttgacctaatcctttatcatctcctaagtgtccctcatgagtgatcacttcacattcctcccacatggagagctcacccactggggcctatttttcccattggaaaagtgtggttattggaagtttcctgtttttggaaagaacaggattggaggtgctctctggggtgtcctcctaccaagcagcctgttgaaggcctcgtggtgctcagggagcacgagcgacactcgccgtcgcttcagcttcatcttgaggccacacagcatctccgccacccagatctcctcaggctcaggggcgagcaccttccgtggctcctcctccgactcctcagatttgtcccaccactccatcttccttttccagcaaaaggacctatgcggggggctgggatctaccccaggggctgagtaaagaaaccaggccacggtgtaatgcttctgcagttgatcacactagagcccgacccaaaaccccaaaccactctccatcctccccagcctcgcagactgctggcttctccaagccatctttccttctgtctgtctcctctgctgagctccatgtgccgctccttctcctccccattctcccgtttctctgtcctcagaacacttcctcatatccttccctggtccctggctctctgagtccctttttttttttttttttttttgttgttgttgttgagaaacagtcttgctttgtggcctaggctggagtgtagtggtgcgatcttggctcactgcaacctctgcctcctgggttccagtgattctcctgcctaagcctcccaagtagctgggattacaggtgcccaccagaacgcccagctcatttttgtgcttctagaagagacagggtttcaccatgttggccaggctggtctccaactcctggcctcaagtgatctgcctgcctggcctcccaaagtgctgggattacaggtgtgagccactgaaccctgcctcagtacctccattcttcccacacaccctcctcacgtgctccttcctgacttctgggcccgcccttccttcttttttttttttttttgagacagcgtctcactctctcacccagaatggaatgcagtggcactatcttggctcaaaacaacctcttccacctgggttcaagcgattatcctgtctcagcctcccgagtagctgggataacaggcatgcctggctaatttttgtatcgttagtataaatgacgtttcgctatattggtctggttggtctcgaacaactgacctcaagtgatccacccatctcagcctcccaaagtaatgggattacaggcatgagctaccacacccggccttcgtttttcttttgacacagggttttgctctgtcacccaggctggagtgcagtggtgcagtcatagctcactgcagcctcaaagtcctgagttcaagcagtcctcttgcctcagcctcccaacgtgctaggatctcaggcgtgagccactgcacctagcccgaaaccaagctttctcatcccaagcgccaacctttatcaagtctagcctagtcctctattgtctcctaagtgtccctcatgagtgatcacttctgagtcctcctgcgtggagatctcacccactgggggcgtatctttcccattggaaaagtgtggttattggaagtttcctctttttagaaagaacaggattggaggtgctctctggggtgtcctcctaccaagctgactgttgaagtccttgtggtgctcaaggaggatgggtgacactcgctgttgcttcagcttcatcttgagcccacacagcgtctccactacccaggtctcctcaggctcaggggcgagctccttctccggctcctcctcagattcatctgaccactccctcttccttttccagccaagggacctacatggggggctgggatctaccccaggggctgagtaaagaaaccaggccactgtgtaatgcttctgcatctgatcaccttagaccccgacccaaaaccccaaaccactctccatcctccccagactcgcagactgctgacttctctaagccatctttctgattttctcctctgctcaaccccatgtgccgctccttcccctccccattcttctctctctctgtcctccgaacgctgcttcatgtccttccctggtccctggctctctgagtccctccttttttgttttgttttgttttgttttgacacagaatcttgctttgtcacccaggttggagtgtagtggtgcaatctcagctcactgcaacatccatctcctggattccatttattcttctgcctcagcctctcaggtggctgggattacaggtgcctgccataatgcccagctcaattttgtacttttagtagagacagggtttcaccatgttggccaggctggtctcaaactcctggcctcaagtgatccgcctgccttggcctcccaaagttctggggttacaggtgtgagccaccgcacccagcctgaatttctccattcttcccacacaccctcctcaggttctccttcctgaccgctgacccttcttttcttttcttttcttttttttttttttggagtgcagtagcgtgatctcagctcactgcaacctcttcctcccagtctcaagtgattctcctgtctcagcctcctgagtagctgggattacaggtgtgcaccactaccacttggctaatttttatacttttagtagagatggggtttcaccatattggccaggctggccttgaactcctgacctcagatgatccgcccgcctcggcctcccaaagtgctggggttacaggcgtgagccaccgcacccggcccccttccttcgtcttagtcaatcctatcccacctcttcttccaccagtcccctcacctgatggtcccaacacttcatcatccaccacctcctggagggggtaccccgaggtgctccgctggggactctgctcattctggcggtgcggttgacggctggtcgtgatctttcccgtaatctgtcccctcttacggaacctagtctccgttctgtccatggccttcttctggacactgctaggatccagaagagtatgttatcaattctcaagcctaggagaagtcaggagtggagaacagctctgagaagatactgttgtccaactgatctccaggcaccacggagtccggtccctccaatcaggaaggtcggaatctctgatgtcatcgttcatgccaacctggcaaccagtttgaaaaaaaaacacatgtaactgccaggctgatctcttgtcctggagatcctgggtgaatggtatctcctgccactgtcccaacctcagaccattgtccaaaagcatcttcagggactccacatccctctgttccctgtcccagcagaggctgtgtcctctccactcaaagcctgaagcatgttggggtctcttcgtctctgtacgtgcccatttcagagtccagtctggtgggagagggaacagagtgggaaagaaaactagggtaagcagaaacgatgaaaccttataagagtgagattatcatgtacaagagtgagattatcatgtacaagagtgagattatcatgtacaagagatcccaggaatactgacttgatgaaaaagtcacatcagagcactcagtttggcagagcttttctgctgaatgtttactcacattcactgtccaagattctgtactgggggtacatacgtcctctgccctaaggcaattttgagtccaagagacattttgaggcctaaaaatcataggaaactgcccctgagctcacacatatttccaatggagctcacacatatttccaatggtgtccccaatttcagggaatccatggattacctaagccagcccctccagttcggctaagaaactctagtctatatatcaagttttgtatcatatgtattgctctgaactcagaaatttcccttccatttatggattctatgaataaaatatcacatgtacaaaaagactaagtcgaaaaatttcagctgtgcacagtggctcatgcttgtaatcccagcactttgggtggccaagggaggaagattgcctgaggccagcagttcaagaccagtataggcaacatagcaagagcccatctctaaaaaaacaaaaccaaaccaaattagccaggtgtggtggctggcacctgtgttccaactacttgggagactcatgtgacaggaagatcacttgagcccaggagttagaagctgcagtgagccatgatcttgccactgcactccagtctgggcaacacagcaagatactgtgtcaaaaaatttttttttgataaaaaataaaagagttacatgacattcagagaccatccaaaaaacctgcgggttcccggctgggctcagtggctcatgcctgtaatcccagcactttgggaggccaaagtgggtggatcacttgaggtcaggagtttgagaccagcctggacaacatggtgaaaccccatctctactaaaaatacaaaaaattagccaggcatggtggtggatacctgtaatcgcagctactcaggagagggcgctggagaatcacttgaactcatggtgcgcaggttgcagggagccaagatcgcaccattgtgctccagcctgggcaacaagagcaaaactccatctcaaaaaaaataaagaacctgcgagtgagttcccacacgttttcctgatgggctgctgctttcctaggagtctctcgctcatagaaaaggcacaaactgaaagaggaagcagatcccattgctgtggaagtcccattgttaggaagctctgcttttctggagttcaaattcgcattcatgacgctttaaaccgtcagagctgggtgggtcctcctacaacaaaatcgtttgctctctctctcctagttaacaggctttcaaatattagaagatcaatgttctgaccccattaaaatttctcttttgtggaatgaaaagctctgatttaacccatcttcaagcctggtttgatggaggaataggggctgagtcacctgcatttcccctccctgcacaaagtcctgggcccagatctggggtctgtctctgctgagggtggggtgaaccaggaagcacctccctctacatctccttgatgaatgggtataatggttgccatggaactggggcttgtttgatgacctggggctgggtgggcctctgagagcctttatagctgattgccttttgggagagggcaggtgggagccccaccctgtcttatgagtcaccccaaaggtgcatgggcaggcaggtgctggggaatcggctactccccagagcttggcgtggccatccctgtggcccctctgggagtctggagcccattccctcacactggtactctctgcagctggggacatctgcactaggaagacaggacacggcatggaagctggcctctgcccagaagccatgacattctggtcaccagcctgatgctataaaacgagtgtcacggccgggcatggtggctcacacctgtaatcccagcactttaggaggccaaggcgggtggatcatgaggtctggagttcgagaccagcctggccaacatggcgaaatcccgtctctactaaaaataagaacattagccaggtgtggtggcacatacctgtagtcccagctcctctggaggctgaggcaggagaatcacttaaacccaggaggcggagattgcagtgagccgagaccacggcattggactccaggctgggcaacagagcacgactccgtctcaaaaacaaaaaaaaacgagtgtcacctggggctacttggccagacacagagagcaaggagacatccctattatctgtcaaaaataattgttggggctgagcacagtggctcatgcctgtaatctcagcactttgggaggtcggagcaggaggacttgaggcctagagtttgagaccagcctgggcaacatagcgagcaccccatctccagaaaaaatttaaaaattggctgggcgcagtggctcatgcctgtaatcccagcactttgggaggccgagggggatgggtcatttgaggtcaggagtttgagaccagcctggccaacatggtgaaaccccatctctactaaaaatacaaaaattagccgggcatggtggtgggcacctgtaatcctagctacttgggaggctgaggcaggagaatcgcttgaacccaggaggcggaggttgtagtgagctaggatcatgccattgtactccagcctggacagcaaagctagactccatctcaaaaaaaaaaaaaagtaaaaaatttaaaaattagatgggcatggtgacatgtgcctgtaatccaggtactaaggaagctgaggtaggaggatgacttgagtctaggagttcgaggctgcagtgagctctgatcgcaccactgcactccagcctgagtgacacagcaagaccctgcttcaaaaaaaaaaaaaaa

SEQ ID NO: 1126 - DNA, 25426 bp, Homo sapiens
  misc_feature (8427)..(8427): n equals a,t,g, or c
  misc_feature (22142)..(22142): n equals a,t,g, or c
aagaatacaaagttccagatggaatggttggattcagtaagtaacttgatttttaaagttttgaaaacatgatcaaaacatactttagaatctttcaaccaaaaaaaaaatttttttttttctaactagtaattggcagaggaggtgaacagatctcacgcatacaacaggaatctggatgcaaaatacagatagctcctggtaatgttacattctcatggtattttcagtgtgactagaaaactagcttttttttttttttaagccttctagtaacaataatgctacttttaatcttttgacctgaagttatctgtttgttttaaattgtagacagtggtggccttccagaaaggtcctgtatgttaactggaacacctgaatctgtccagtaagtttgaaaaatcttaaaaatctacttaagtaacaacagcagaactctttgaattttgtctcttctctttgttactgctttattttacactgtggtttcgctgccaccttccctcaaagtcctccaactcctttgaagtttatgcctcatgcctttctcaggtggggttcatcatctgaatcattaaacacagaaaatggttaaaacaactccatatctactccagtctctacttgtaaagccacgtgtagcctggagaagaatgcacagtcaggtcgactggtgacacttaaaactcagacattaagctcaagtggactgttgtgttgcctgcatttccctagttccattcacttttccactcctctcccaggctctttaatactgtatttccccacctccaaatcttcagcatctaaccccacgctctcccacttaagcttatttactgagaaaatggaagcaaatgataagaagcttttctttttccctaccactaaacctaccagccttcatttttcctctgttcacatagtactcaggtaattgctttccttttgtgttcgagtgcctaaagccagccctttcttcctactgaaggttcagcttgcagttgtactttcttctgcattgttagttctccctcattactaggttttttcttttcttttttttgagacgaagtctcgctctgttgccaggctggagtgcaggggcacgatctcggctcactgcaacctccgcctcccgagtagctgggactaccggtgcatgccaccacacccagctaatttttgtatttttttagtagagacagggtttcaccatgttggccgggatggtctcaatctcttgacctcgtgatccacccacctcggcctcccaaagtcctgggattacaggcgtgagccacttcccccagcctgattttctttatggcactttccaaataatgtgttattcatttgacatgttatttttacttatttaatgaaatgaagccactctagcaggaaccctgtttctttgagtgctattaccccattacctagaatagcacctgcacatagttgatatttaaatatttgttgaatgaataattgtagcatatgagtaagcaaaatggtagtttaaaaatgtaaataaatcatttagttcttggaagaatcagtttaattctgagataactttagcattagagttctttcttggaaattttggactattcttaaaaataaaaattgtatatctagaaaatttttttgcataatctctcaatctttgacccttgatggcattttctttcagttaaaagtaaaagcattgttaaagttagcatcaaggcacctaatcctgaactgggataggaggagtacttggttatattgttttatatttctctatttgaataagcttgggtatgctacagcttactatttaaatattaatttgttaacaggtcagcaaaacggttactggaccagattgttgaaaaaggaagaccagctcctggcttccatcatggcgatggaccgggaaatgcagttcaagaaatcatgattccagctagcaaggcaggattagtcattggaaaagggggagaaactattaaacagcttcaggtattgttatttttgtgaaatggctacttttgatctgttttgatgcccatttttgtccacttcttttgttaatatatattatttctatgattgtaacaggaacgggctggagttaaaatggttatgattcaagacgggccgcagaacactggtgctgacaaacctcttaggattacaggagacccatataaagttcaagtaaacttaactttatactttataaagaaagagtgggttgaatggggttgggcaaaatatgcatgaataattaaaatgttttgagacatgctttctaaattagctaactttttctgctttagcaagccaaggaaatggtgttagagttaattcgtgatcaaggcggtttcagagaagttcggaatgagtatgggtcaagaataggaggaaatgaagggatagatgtaagtaaaaatacccattcagaaatggttgtatgctaattcataaatataatagtgttttctgttttgtgttaagtagctctaacattgttatccttttatttcacctttatactttagaatacagaattctatatatcttgttaccctatttactataaatatagaattatatgtacttttatgatttgaggcagattttcaggaaatggcgcttttttaaaatacttttttttactttaaaccctgagaagctagctttcttaatacttagtcttttttacataaggtccccattccaagatttgctgttggcattgtaataggaagaaatggagagatgatcaaaaaaatacaaaatgatgctggtgttcgcattcagtttaagccaggtgagtacatataataatcttgtaagtgttggcagcagtgagttttgacatacatttattgtttaattaattttgtttctttgttttgaagatgatgggacaacacccgaaaggatagcacaaataacaggacctccagaccgatgtcaacatgctgcagaaattattacagaccttcttcgaagtgttcaggtttgatagaaagttaacattttcattttttgtttttatggaaaagtattttccttcatgaaatctgaagttacctctatatcagagtctgcttgatgatgctttattaatggagaaagtttaaattgctttaaggtaaagatcttggagcaggaagaactactaccttaagtgctaccttatttactcttgtagttttaaaaaatgttattactttattagggcccagttcatctctacatttcctgatcaggtatatgagagctgggaaaaataaacttaataattttatcatgaaacaaaagtatttctgtgctgactcttcgttcttgtctttccctctctataggctggtaatcctggtggacctggacctggtggtcgaggaagaggtagaggtcaaggcaactggaacatgggaccacctggtggactacaggaatttaattttattgtgccaactgggaaaactggattaataataggaaaaggcaatgtattttaaactcttaatgttttaacacattattcatttttctggacactttctgttgctgtcgtaaacaagtggcaatgctttttctctgaccgtattttagtagaaaagaattcttatgttaatatgtaacaagtaaaacataaatgagggatctcatgtatatttagagaaagagcaggattttaatcttactagcttctagagaaagcgaactaagagataattattagcataagaaatgtcttttgacccaaaaagtggtttgagtgtttttgtttgtgcattttggtttttcccgactcatattttaaaaatttgaatgtttataagtgtattagtttatatttacactgcttttaaaagcagttaattcaaatattttattataatcacattaagtttatgtttaaacatactaagtaaatgtaaatgtattttaagagaagcatgaaatgcttcctaaaatttgattttcagtgtagaatattaaatgaaaaatcttaatacaatattgtcaattaggatactgaccaaaccatatttttaatggcccatttaattgtgaccattttcttctaaatagctcctagtacacccttgaaacctttagagaaattactgtcttttgattttaggaggtgaaaccataaaaagcataagccagcagtctggtgcaagaatagaacttcagagaaatcctccaccaaatgcagatcctaatatgaagttatttacaattcgtggcactccacaacagatagactatgctcggcaactcatagaagaaaagattggtgtgagtatactttaaacttttaatttttagtgtagacccttagactgtagttaaattaagacgtttattcaaatacatcaaaggaaaatgtatcattactagtcagcatttatagatttcatgatatgtataatagatacaacgtgaagattttccagcaatgaaaataacctaattaaatgtgtagttacaggttttgagaacaaccttacatttgggtgtggctagataagaggagggtagtgttacctgtaggcatgatattagtgttggtgtaggattgtggaacatacttgaaggacatagttaacgggaattcattatttattaagattttactctactgaaccccagcgaggcaaacaagataaatcagatacatctgccactctacagtagaaattcataaatcctaggttttggactggctcacagatcatctgggggtattaaaatgtagactatttgggtgcttcccactcctacacataatatacagagacagacctgactcaaaatgtctgggatagggcccagcatctaattttacatagatgtttgggtgattctggtgcacagacaaatttggaaatttttcctccaggaaagttttctgttagaacaaaaaagtatgaaacgctttgactgcttttttgtaagtgaggcagacagtgtcttactggagtttttaacacaaagtgtgcagggggcatcttaaattattagaattgcctaggaaaaattatttttggtgtttgccatgctgtgaatggggtgcgtgcaaaacaaggttgacactgtttctgtcacacttgggaagaacacaaatagatgtacaaaagacgcttaaggaacgtcttactaaatgtacacaaacattgtgagttctgttgtatggatagtttaatggttcaaaaaatgaagaggatgtttgtagagtaatgatagaggttgatgccatggcaaaaaaatgaatagcactcatcttggttttttattttacagtattagcctaacatgcatgcgtcaggatttctgttggattcatggaaaaacaagatagattgttttggagaagcaatttggtgtggtgattaagagcatggactctgtagtcgggttgcctcagttcagaattctgtgaatcatttactggttctgtgaccttggagaagttactcaggcttttctgtgccttggtttcctcctgtaaaatgaagataatggtatctacttcatagagttgtagggattaaatgaatgttcatgtgtgtgtcacttaaaagaatgcctgccacataaccctaaaaaatgttgctactttttcagtattatttttactacttggaaagaataggtcatggatagtaagtgagagatgacagcaattggagatttaaagagacaagttaatagaagaactttaaaggtcatgaagtttagtttccctattttgcagtgagaaattgacgaccaaatgtagtgttagcattttgtccaacatgtcgcctggttgtgttaactactcagaaggagcattttaggacagttaagtgtaatgtctttgttggcttaaccaaacagaaatcagttaagcgttattaatgatgtggcatgcatgcatgataaggatataaaatatcctgatttattgaaggaattaaaaagggaatttttgtgctattaaacatcatgatacatgaaaggccaaaaaggatataaattattgatctgaatgggattttagtgacagaaataggttgtgaggtggattttagtttcatagtgaaacaactagctattaacgttatcagtgaaatgttcagaagacgatgatacaggacccaagcggtttgggaatatattgtcaagacggttgtctcatgttaggcaagtagatatagagagaagagctgaagataaggacctgatttctgtgagtaagatggaaaaagatagtaaaagtaagaatgataaaaggaaagggaactactgctgtccgcaaacaagctaaaggaaatttaattgctaatttaaatttaatttaatttaaattgcatttaattgctactgctattgattttagtgaattttacatgtctcattattatggcagatgaaatagtttttgcaaaatgaatgaggaaaggaaggaaaacctaaaatttgttatttgtgactataagagggtagaaatggatgattatttggccgtagagttgtttaaccattactgtgtttttctgatttttctatgtcatccttttttttgtagggcccagtaaatcctttagggccacctgtaccccatgggccccatggtgtcccaggcccccatggacctcctgggcctccagggcctggaactccaatgggaccatacaaccctgcaccttataatcctggaccaccaggcccggctcctcagtaagtattgggtttagttctgggctttccccaaagattctagttttgggactgttttttatgctgatttttcttttcagtggtcctccagccccatatgctccccagggatggggaaatgcatatccacactggcagcagcaggctcctcctgatccaggtagaagatgcttattatttgtgtgttatctgtattattttccactcctgttacattattaaattttctagtgttgattctacatttgtatgcatcaccttcactcactttactctttcaacagtgttaggcactgcctctaccccagtgtataggactgacatgaatatgagctctgcttttatggaatttctttctacttgcctttggcttatgagttgatacagtagaatgataaaagctaaaagctgcaggaaagagcacagtgtcataggttttggataccagtgctgtcaaatgtgtagtatgttcattgtgacattatctgtggaaaaatagtttttacttatttagaaaagtatgtgataggggctgggcactgaggctcacgtctgtaatcccacctattcagaagtctgaggctgaggcttgagaccagcctgggcaatatggcaagacccatctctaaaaaaatttgttttaaattagccgggcagggtggtatgtgcctgtacttgaggctgaggtgggaggattgcttgagcctagaagttctagattgtattgagctgtgggcacaccattgcactcccctgggcaacagaatgggatcccatctcttaaaaaattatgtatatatgtaacagtctatataaatatatatatataacagtccaacagagtgttaagtattggggcattaaacttccaaattgtcaaataagatatctgttctagtactcctcatatgacaacttcatgtgagtaaaaatcaggcctgtatttaataactgcatgctaaagcccaaatacgtttaattattttctatattcagatttatttttatcctattatattctggcatctttccataccctgtagtttgctttccatcttggtcaaagagtcattctttgaaaccaattaacatttatttatgatccttttttctcacctgctacctaccttttaggcctctttcactcgtgtagtttcaaggaaaatatactcaattatggaatactttctacacataatacatttatcccaaaaaaacttgaagtaatttatgtaaatgaaattgcttgattaacttcataggaagtgtgctgtttggaatatgatgacacagcatgacagttaccaagcatgacttgagttgtgctaggatataggtgtgcaaagttggggttgtgttctatagcaaaagaatgcactcccagcgtaagcaacactgatggaaggggctcacagggtacaggatataatactcttaacaactaatttttggagaatgaaagggcttttctttccctcttgttggctgattgggatggtataattaatgggattgaagagtttgagtaggttaaaaggcagattcatattgggtaacttggatctgcccaagattgtatttttgaaccactactggggtgttagcatgattgaggaaaaatgatgggaataagaagtggaagtggtctttggtattcacaagttgaattcctccacttggagntagtagtgaaatccattactgtaagagctggtcagtgaaatgtggttgcagcatggcctttgggcaagaagtaacccatttaactaaaaccagctggttggccccactcagatttatcaaagggttactgggtccctgggggtggatattgcttatattagacttagaatagcatactgttttaatattatatgaactaaaatgtttctttaaaaaaagagtggtctgttaatggatttatgtagtggtcaagaatttagacttcagagtcaaataaacctatatcagtcctagtcctacagtttactaattgtgagatgtcaagcaagtttttgaactcctctaagcctctgttttcttatctataaattaataaatgaatgaatcgggttgagtgaatatttagtaaattcttagtacatactagttatttgtaactgtgagactggttttttggtatggttttcacatttgggagtagaaataccacttcctaaagtctgttttatctcaaattctctatccaggcatagtgtaaagtgaaatacctagatttcttgattaatatacagataatggccagacgccatggctaaaacctgtgacgctagcacttcggaaggctgaggcgggcggatcacttgaggtcaggagttggagaccagcctggcaaacatggcgaaaccctgtctctactaaaaatacaaaaattagctggatgtggtggcaggtgtctgtaatcccagctacttaggaggctgagacaggagaactccttgagaattgctccactgccctccagcctgggcaacagagtgagacacttcatctcaaaaaaaaaaaaaaaatacagataatgacactattgagatatgtaaacatccaacataaaaaagcagtacattgggcaattgagaaaagtttggcaggtgtcctaataacaccttacaattatattaccttgcaattttctttttctagaaattcttgctcatttttctcaaacttgactaacctttattaagcagctgagaattgctactgttcagaatgaaggtataatagaaaatttaaaagttttaattgtatggtattcctagtataaaagacaatcaagttttttctggtttctagaagattgaaaggtctcaaactgttcgcacttcagttgatgtgggagatgagtgagggtcagtcaagtgtagaggagacaacatagctaaaagccgagacacgggcatagtgatttctgaaaagtacaagcactgtgttgtggctggagcttgggtgttgaagagatacaaccaaagggagagatgaggctgaaatggaaaggataagccaggggcttcaggctgttaaagatgttgaatgataggctgtacttaagctttgaacatcctgaagattgcagagaatgaagaatttcaagtaggatgacatcaagtttataacattcaatgtgaaataggatgaaatgtggctaatcttttttaagatttttatattttctcttcattgaaaataaggacaaagttcattgttctaaaataattttctttcttatacaggttagtccctagaaatgtttttctttagtcatcttctagatagagctgtttgtgcttgaggcgaaaccaatttagaaaaaaacaagggcacaggatggtttgagacagagcattggatttggagccaaaagacctgtattcatatcccagttatgccactcagtagtttttaacctaggaaagtcacttagtctctgagacttggttttctttaataaaagctgatggtgacaacaaaaataatagaaaatttaagttttcatatactttttttaatgttctagttaattttgggggctgtatatttgccagagagctgggcgggggggtggtgtgtgtgtgtgtgagagagaattacagacttcacatgcaaaccttgaactttcatttattttagctaaggcaggaacggatccaaattcagcagcttgggctgcttattacgctcactattatcaacagcaagcacagccaccaccagcagcccctgcaggtgcaccaactacaactcaaactaatggacaaggtaactacagaacttattgtatgtgaaagccaaaagttgtgcttggaattatatatgaagtacatcactgtataatacctaaaatttctgacattatttaattataatttaagcagacttttccttttttaaattgttactttgaaatagtttcaaactttcataaaagttgtaagaagaatacccggagcacccagatagcccagctgttaatgttttattcccttgtttactctgttaccatctatatcatacatgtgtatctgtatttattttaaatatccattataattagttctgaaggaagctaattatatccagcataattagttctgaaagaaatcactgaagactaaactgtagacatgatgtcctgttgggtacttcttcaaaaatacataaccatcatacagccctccaaatcagtaagtcaacattgatatattaagttctttatatcattatggatttctgatttttgcagtaggttatatttttaaagtatttttataattttgataatcagattatcctggatttggccagtcagggagtatattcagggtggtgcctatatccttttgaaatacctgtcattcttttaagcacttccatactgtctggcacagtaagattgttattttgtgctttctgggctccagccctcgagtcagctatttcttcaaggagctcttattccttttagtagagtatggtagttagaaacgagacttgagtatgcttgttgctactgaggtgtaattgcttctagcttctttcaacaggcagaactaggaaatatatttacatacatgcatacctacatacacacaccaaaaaacacataaacatcgatatatgtatatatttttaaaaactatgttcatatcaccacatccgtttcagcattttggggttttcaagccttttccttttttgtacttgtttacaaacgtgagaaacctggtgtcctcagtgtatttccttatttgacatgcatttacttatatgttcaacataaccagtcttcaaacaggttggttttcttttctgtccaccacctctgtacccccagtaccttctatctttggcactgttagggatgccaccaccacatagtacttccctcctaccctcactgtcacattgcaggcccctgccagctcctgcacccaaggaaacggccaaaattgccttttaaaaactttaattctgttttttgttttgttttgcttgaacaaggagatcagcagaatccagccccagctggacaggttgattataccaaggcttgggaagagtactacaagaaaatgggtatgttttatacatttcttgaaaatacatacttaattaaattgaaacaaattattctcttcaggaagagaataattgaataaaatcactggacttgtaaacatatcaagacagttgtaaattatagtttttaaatttgtggttatatggcaaggaaatttttttttctaattgcatttgtcaaccagttattaattgaaactagaaatgtccttactggtacatacaatattaacattactatacttttgacaatgacagttatatatattatcagtctaaatgacataaggttaaattttaatgtgtcaggcgaaaattgtgtgtgataccattatttttgctgcaagataagcaggtaagaagtaatctgcagtgacggaaagtaaccaagtgatggaaccagaatctggcttcaagagggtctgagtcccaagcttgtctcccaaatttgtctctttaggaaccatttggaacctgatactatacttctggacaaatcactatatttcagctgcttttgctcttagtcatttaaaattattacataccacagctagatgtcacaaatgaaagctaaattggtaagcttggttatccttcactagcagaaaaagaacctataggtggtagagttttgtcataagagaacggtctacttgggattttcaatgttttctttgccaaagaatgtttctcattctccacagaaagaaaaatttccagaaaggtgatgattttaatcttctagatgtaaaattacatatacctgatgataaagttgttttgcacaactggtttctttttaaagaaaaattgtttttcctcttagaatggcttcctaggagagtcatgttccgtctctttctgaggctttaacagattatgtttttgtgacctagcttaggcagatctacagtagctacaattcggcaaaaagaaacttttaacttaaaaacagcatactctgattaaggttggttacataatttattttctgaactgggatcctttttagaatgaatagggatgctattaataatcatgccctgacagcattgtggtcaggacctgtaatcaacttaactttaattaaatagcatcaccattttaaaagacttgagcatgagccacgtgcggtggcacacacttgtagtcccagctgcttgggaggctaaggtggaaggattccttgaacacaggagattgaggccagccttggcatcatagtgagacctggtcacgtgtttgggttaaaaatcactaacttcaacttctattttctcaatgggtaatgtcccctagatagggtccctagttattattaagtaggtaaaaataaaggcttgttaatggatttaggtaattatggaggaatgagtttggcttctgtgctttattttaccatattgattatttgtaatatggccattaatacatttactgtttagtcttttttgtattactttttatgttttactcaaaatgagtgggtgggtggaattctaatttttattgttaagggaagacattttaccttgtctttaattttttatttttttttaccatttccctgccagttagagatactatactatactgtcttgaatcctctgtaggaaaacatggcatagaaataattaaataataattagatgttaaataataatgctgtatgactaaagaacctccttaccccaccttttctgttgttgttctgtagtaccacaataatcacttgttaattttatttatttatttatttgagagggagtctcactctcgcccaggctggagtgcggtggcgcaatctcagctcactgcaacctccgcctcccaggttcaagcgattctccggcctcatactcccaagtagctgggattacaggcgcctgctaccacatccggctgattttttgtatatttagtagatacgggctttcatcatgttggccaagctggtctcaaactcctgacctcaggtgatccacctgcctcagccttccaaagtgttgggattatgggtgtgagccactgcacccagcctcacctgttaattttatgagcaaaacagattagttgggcaagtccttcacatgcatatctcgttgttgttgttttttttaagacggagtcttggtcttactccccaagcaatggtgcgatttcgtctcagtgcaacctctgcttcctgggttcaagctattctcctgcctcaacttcccaagtagctgggattacaggcgcccaaccacacccagctaatttttgtatttttagtagagacagagtttcaccatgttggccaggctggtctcgaactcctgacctcaggtgatccacccgcctcagcctcgcaaagtgttgggattacaggtgtgagccactgcgcctggccacatgtgtatatcttaaaggaaataatgctaggtaatttagtcaggtgcttgatgagcatttgtcatcatcatacggagtcaatttgtctttttctataaaagttctttttgtaaatgattagttgcttaactgctttaatttcttctaggtaccttacctgtcatcaggatctttttaccacaaataagaaaccttaaagcataaaacttggttcagtcttcacatttcttaaatggaaggagaaagggaataatagggagatatctttatctcaaagccaactgttgttgacttttccagtggcaggggtatgatgctaggacttcagatttcctgattccccatcctagtgccccttttgccaaactaggcaggctttcacagcttttggagcctaatttaagtttttcttgttaagaacagaaaactccattcatagattttaatttgtcattatttgcttatttactgaaaaaaaaaaaaaactattgaaaacaggtgtgggttaagtttcccaaaattaggtttatatttcaaaacaattctaagttcccaaggataacaccaaactaagaggataaatttttattttatttttttttattttatttttttgagatggagcctttccctgtcgcccaggctgaagtgcagtggcatgatctcggctcacttgcagcatccacctcccaggttgaagcaattcttctgcctcagcctcccaagtagagaaaatcttgataagatttcagaggcttataaggaacagcagtaaagatgggtgtttttaaagctagaatacagggatttttttaagacccttaagagaacaaacagggtttcaaaatagaaaggagtaattcttgtttggagaagtgaagacatttgggaaaagtttgacttgaggaaggccattatgataaggactgatgtggtagactctgaaccctgaagaatctggtaccttaagcctaaaggagggtagagtgaggacttgtgggaaaggtacagttatatgggaagacaactgagtgtgaaaatctattcatgcaaggctggctcttaggctctaatagaatcttgcaagctaactctagagcaagtcttttatctttgggatgaaagaaatttaaggctaaactttatacattataattataaaactataataaatattagataatgttctactgaagtataaactcaactatctggcatcaaacagtaactaagccatgatcacaccactgccactgtgttctggcctagtgtgacagagcaagaccctgtctcaaaacaaaatccagtaactaaagagaggaataaggggagcgcaaggtaaggcagtacatgtctgaaggggcagggaaagagttctttctctacttccaactgggcaaaataaatcacatttgccctttagattggaagagtgaaataagcttttcttgaacatcttttaagattggagtgtcaaatattaccaacttatttaccaagaatttggtttttcttaaagtctaaagtgtttactattagctttccacagggatataggagtttgcagaggttgtagttttttaagggaacatcaatgaattttcttgatgcatatgcctgtttctaccattttacattgttaatttgcctctaaaatgagtaactcttacaatggggtttaaaacctgaagactattgattgctaccttgatcaggtttggtttcaagtgtgcaccctgtaagagacaatgtgtggttttattgctattgtcacaccagttttttagatattgaaacctgtttcagatttgcttgaattgtgtcttgtaagaggaaaatgttaaacttacttcctctttgagaacagttatttatagaagacaggaaaatatgagaatttttaatagtatatgagagttctctgttaccaagaaaagagggtttttttcaggcatttttaaagaatcataaatcttaaattctttcactcagttgctttgagtctgtgacctgttttacaatggtgatagactgctttctgaaactatgaaattggtcttgttggcatgctcctacaaacataaaaagagcttcctgtgtgtccatgctccagtatactcgtctatggtagttatttcacaaagccaagcgagttacaaacgaaataaaatagtgcttaagtaaagaaactgaataggagaacatatactctctcttctcaattttatatttagaaaaatataccttcagaaattggggaaataggcatcagacactcagcttcatcattttttaaaagtttgctgtatgcgctttatatgtatgttttttgtgtatgaaccatttcaaagtaagttgcagacaagacagtttgctctaaataaactcaatgtctgggcacagtggttgacgcctgtaatcccaggactttgggaggccaaggcaggtggatcacttgagtccaggagttcaggaccagcctggacaacatggcaaaaccccatctctacaaaaaaagagaaaaatgtcagctaggcatggtgggcctgtagtcccagctactctagaggctgaggtgggaggatcacctgagccctgggaggttgaggctgcagtgagccatgattgcaccgctgcactccagcctgggtggcagagtgagaccctgtctgaaaataaataccctcaatattatcacaaacatacagactatatttaaatttccatagttgtcaggaatatgtcttttgtcgtctgtgtgttttgtttaattcagagtacattcaagattcatgcgttgcatttcattgctatatttctttaatctcttaattcagcaaagtcaccttatttggaaaaagacctgattgtgaaagctgagttttatgtgttttcattgatcttgttctttattccttgtcaggttacttttaataacattgtgttgtaattggaataaattattaatacttttaacatcttattatgtgtgtgtgtacatacactttataggttactaatcaggaaaaagtcttggctaggtcttaatacagtctttaaatcattgcctttaagtgggcttaaagtttttcaaaaatgttctttttgtaattctggaatcgaattaagattatgcctaaatctttaccttccttagctaaagcagtgtggatttggggttgattctgtttttttactaataatgacgctctagaactaaaagttaacgattaattataaggcaaaaagaaaagagcgttctttttttttttctaattgcagagtagtttcctgacactactaaatgaatattttaaataaaacaggagtaattctgaccctctgtgcttttgtcttataacctgtacttacagtggatgtaattttatattaaagtttaggggtttttttttttggtcaacaagggcaaacacaagattattcaaaggcttgggagaaatattacaagaagcaaggtattgtttttattagaaatgagatgttgggcttataattgtggttacagcaacaaagttcttttttttcaaaggtcaggcagttcctgctccgactggggctcctccaggtggtcagccagattatagtgcagcctgggctgagtattatagacaacaagcagcctattatgcccagacaagtccccagggaatgccacagcatcctccagcacctcaggtataatgtaattgctaatttgttgatttctactccagtctgttttctgcatgtttactgtttgtctgtttgggagtgtttgccttttaaatttttatctggcaaagtataataactatttaaatgaagtactacggtgtattgtttgggtttttttgttttttataatgctttccagcatctgagtggtgaatatttctgcaatgcctttgattttaaaaataaattttcttcccccagggatttgcaaatcatgcaagaagccaccaccatttatattaaccactttttctttcttaaaggattcactcctgaattagctccatttcaaggattttctttaactttttgtgtatttcttatgtatctcttctgcacagggccaataataagaagtggacaatacagtatttgcttcattgtgtgggggaaaaaaacctttgttaaatatatggatgcagacgacttgatgaagatcttaattttgtttttggtttaaaatagtgtttccttttttttttttttttttgaaaatgtacaaaatatctatcactactgataggaggttaatatttctgtgtagaaatgaaaattggtttgtttttagtatttagtgtagatgtacacattccagcaaatgtatttgcaattatgtggttgatgctttgtgatataaatgtactttttcaatgtatactttcacttttaaaatgcctgttttgtgctttacaataaatgatatgaaacctcctgtgtcggtaagttggatatgtgggtatttaaaggattcataatttcttagcaatgataaattaagatacatatacacaaatatataagctttccccatgaaatattgagtttttaaacactggcatgtttttccccccttgcagtatagtggtagattggaggatcttttccatttattgtattggctctttcagcacaagtaatcctgatatcttcattttttttccttctgtttgattaaaaactgcatgtgtgtacaatgatcttttggcatacttccattgcattaacagtgaaatttccttttatacatgaccactgtttcagacctgtactgctgctataacagttaacctttctgttcttaatttgataatacttgatttccaagactgtttcggcataactaattttaaacagttttcagatagtgaatatgagtagtctaataagaacagtttttttccatgtgaagcaactctttcaatgtatataatgttagtgtgtttctttctaaatttaggatagaaaagtgaatagtgtgcaaaaagtatagctacattgcatctgccattgaaacataaatggggtatggaaacgttcaagctttttttttttctttatgcagtatagataagctttgttttgtaaatgcacaagtccaatcattgaatcaacttaatttttttatgtacttgaagtcattttattactctttaacactcatgctgaagttctgatattttgttgaaatccattgttttactctttgcatatttgttggctctttgcatattaatatattagactacatgcaaatacagtctgtcttgccattgtctgttgaagtgcaggtttgatccagccagtatagaactagctctgtaggggtgaggaggactgtgctgtgtatcatccttgattgtgttccttcaaggagcattgcactgtaagtacatcagaatgacaaattgcatgaactgcaacagtatctttttgtcaatgttccacataatgcaaatgccatacgttgtgtgatattatgttggaatacagtgctgatatcttggaaaaccataactgcctcttaatttaacatagaataatacatagttctgtattttttttaaagtgagcttaatgggtaagtattttttatatgctttagctatagctaaagaaaactgatacttaacaaagttgaatagtattattcactggtgctcctaaaatattgtttttcagtgtaaaatatgcatatcttctatatttaatatgaaagtcttgaaatgtatcagacagaaggggatttcagtttgcaaataatgagcaatgtagcaattttaacacatttcataaatatatattttgtcattggtggagagcaccatttgttgttttgaatatactttaaaggaagaggtacaaggacataaatgttgagattacctacaggatggaaatagcagtacagttcattgtagatattttgaaatgtttttgattgttttatataacctagagtgacttcccttacccttatttagatctgcatatatagttctagtatgaagtttaatagttaaggagttagctatttgttatctttaagagtagggtattgacgtgaacaattgcagtattttgcatgatactgttttatagatgaccttttaggaaagtggtgcatttattaattgaactgaagaagtagttcagttgaattcagtatcataattcacaattggaggctgttgattttgattcatttaaggtttaaaatctttattaattgcaaacagtgcaattatttatacttcacagtgccttcccagaccttccaccttaggttctgctgcaaaaagcaccaggtaagcacaacctaaggacatatataaataaatatttcaatacattaatgttgtccctgtgaggtttttgtggttgtgtattcaaaggcaatctgctactgcttccccaaaatgtattttgttattttatgctaccatcttagtggaaagtctgtaagttgttaaagcaactgtttacatttctgggtaatgttttttattttacttttttttttttattaagacaagaaaatgatgagtagattgctgcagtaattgaactacatccaaatctttttgtattttttccccaaatatagaagtgttaatattaagaaaggacaattacacagttttcaagatttaggaaatcacttgtttagaaacttcaacagccttcacaatctgttttatatgatggacagaaaatttctttgccctccaaaattataatttctttatttttttcttattcttaaactataataattcagtaaggatattatgggttagaattttattatgatttttttcttagacaaaagttatatgctgaagaaggaaaaagttataaggcagtatgttttgataaaaggcatgtgcatcagtgaaatgttaactgtatagcaaataacctttcataatctgtagcatcagtatttttctgatttaataatatttaataactgacgctgcatttaatttttttgccagtttaaaatgtttgtgtgtttttatagatgattttaactggtacatattttgagttaagttgaatgtatgaaagcagcatcttatcagttttgtttattcgatttctaaaatgtgctgatccttttaaaactcctgcttatctctgcaacaaagaaaaatattcaaaaatactgccttcattttcacacacagtgctgaagatgctgcaagcaccaaatcatagctcataaaatcaggtcctgagatagttacccataaagaggaatcctttgagtgtatgccattggtgagccgatgagcatggaccatagaagggctcaatgtagaaggtaaaattggcaaatcataattgagaaatatgaaatgtattcccatacataatatggtatagggtgtaatgtacctgcttttgatcacttttcattttaaagtgctattcacttgatcttaaatgttccatgaactgttaaatttcttaagttacatagttactacaccacatttatgtgtatgttatgttttaatagtcaatgataggtatgtacaattgataatataaaggggctcattgaaacttgagagcctgttgagttttggttagttgtagattgcatttttataaaaaaaaatacagatagattgatgataatagatattggggcattgtttctgtctcatgagaattcttttattcattaccataagccttcactgatactataagcattattttaaatgacgctgatcttaagtctgaaataaatggaaagcagaaaaggtgagccagttgatttgaatgcattggatattagtgttagaaacaatgtatagtttagattgaaactgaactgacttatttagcacttaaacaaaaattgacaatgtttntagttttttttaagacagcttagtgtggtgatacttagaattctatggtttgatgtttcttttagaaatgagaagtatagttttattttttaatataaaaaatggttttaatactaaaactagtaatttgatactagttgtttataaacattgtaaaatatatcttttaaacaaattatcttggtagttaattcataagggtgggtttgggtaggaatagcagagtactttcagagggaaaggggagtcattcagaagtgatagcattttatttgtttgaatactctgccagtaaaatcagctgtacttagaaagttatctgttgtgtagaataatgatgtagagtttactaatcagtgaggatgtcttgtttttattttctgcaaactctgcctcactttaaaatgcattataacaatacctaattaaagataattttggctctgaaagttaccttattttttgttgagttagtgacttcatttttcttgccacaatataagcttttgagggatttttttaaattggtgcttttaataagcaaataaatcccagggttttattttcttcagtgatacccctatagaaactcttaaatgtattggcgcatatatatatatatattttcttatgcatgctcgatgcattttcgtcctgagaaaaatgttctctacagaaactacccgtgtgtaaaaagaagattggcttaaaatggctactgtgatgggaacagtgtcttagggagatgcagcttggacttgaggtaaattgaatactttacaactgtggtttagagtttgctttaatgacattgtatgtaaaaggtcacatgattgctgtaattttgtattcattatggtttcctcaataaatgtacattgatgactattataaaggagtgctttgtgttttttatacatatattacatggtaaaattttctacttgactgggtttttttttatgtttactgtgagaaaaaatgattttaaaaagttttaatgataaaagggtaacatctggttgcacaagtcttaaaatacagaaagacttttaaatacagaagttactttatttgggttcacgttgtaaaataaaattgtcttccagaaaattaaaatataaaacaacttaatagaacgtaatagctaattatttacaaactcattttaaagactagaattttaaatcgaaggttgtgccactttttccctaagtctgatacacttagatcttgaagccttcgactatgttgaaagtgttttctcttgcgtgaactattaatagaaagttttttcattaaaatataatttgttcaggcaagatcacaacataaatttgctttataaatttaatatatattacatacgtttgaaaaataacatgtttaatatcctcaacactcaacactgtatagccattctttaagtcctttaatttttgtttttctccatgctcctccccttttcctctgaaaggagtgacagttttccccaccccgctccaatcccaatatatctgcttcagaaagactttgaaactacaacaaccaaaatggtgtactactaaagaaaaagtccactcaaattgataggttccaaattaattatctcagctatttcagcctaattttaggtgtaaaaagctcagaaatgacattccttcatgcaaaataatgtattctacttaggtttgtgtgttttttttttgtttttgttttttaaacatagttgctgtaaacgtctatgggaaatacagtctttataataggttctgatagaataattgagtaattcccccccataagtacattttattgactgttactgcataataggcgataaatctgatgcttatttggaaaagaagtaggcattctttagatgagctgtgctttgaagactgttatgaaaaggaataagaagtcagcatagtggcactcctggtttccttttttggccccgccacagaaaagatggatgtagtaagaaagttggagtgaaagagaaagttccagggagaggggaggggagctagtagtcatcagctaaaaaagagaagaagaaaagtgattttaaggaaaaaaaaattaatagaataaaagataaaaagagtgattaattcttactttcaatggtaagaatacaggtactagctgcagatcctttattgttgactgctttacacatatactctcctccatcttctgggaaagtttctggtaagtaaaggcagtaagtttctcccctttcaatatattgatagtcttctccatcctgcagtatttctccttcaaaccaccatgtaatttctggttgggttctcctgttactttaaccgtaaatctgactggctcactgtctacaactgatgtgtttttaagaggcttcttgaaccatggagctcctgatctggtttgctcttcatcttcagcagtggagccattcatgatgctaccttcttcctcctcctcctcttctcttttctgtattaaaataaatgcattcaggttggcatttatagtattttcagggcagcgatttagtaacaattttgaaatgaaatttttttttttaagtaaagaacatacaagtgtgcctactacaaagtgtacttaacagtacattccagtgacttgaaagaaaaccattaaaacatttttttaacctacctaattataaaactatgggttttaagagggcatctttggaaaataaaggatacataagcctggtaccttttgtagtgctgcatcaatttccctttgttcaaactgcatgcgtagtaacttttgttcttcaattcttctttgttcttcttcttctcttgccttagccatttgttcaaatctagctttcatattcactttgtgagtaaatggagcctcgctttttcttgcaggcctaacatcaacatcatcttcctgcaagaaagtgggccaagattaacaattgcttgccttctaaaaacaaagaagcgttactagttctaaaggtgtttagaagcacaaaatgattaacatgtttataatgcatatttttgctacactgcagacactcagattttttctaactctccagttcaggaaaagtgatagatacatttatgaagcattctcttagttatagactttttctccaaatgtaaagatcacaatatcactgggatcctagcctgtttgtcctaccaactctgcttggttttgatagcacttaactgaaaaaggtcagaatgctatacattctaaataattgttaaaagtactcccttgattcctgtaagtcc

SEQ ID NO: 1127 - DNA, 286 bp, Homo sapiens
tagaagaacaggggtgaattagagtaactgttaagatgacattctctaaactccacttcaacttctttacagttaatgccttcagactgttccattcatcatcccttcttcacttgatgtgtcatcttaaatttcttaatttaactactcaagtaataagatcatattttttgacatgagtctgagcctagaaccttagtttaagccattgggagacattagacttccatttttattaatagattatcttttatttgtaaacaaagtatctttcattgaaggaaaa

SEQ ID NO: 1128 - DNA, 964 bp, Homo sapiens
ctcacaagataatatctcttgcctttttcctctcggagtgttcctgcggtttgtgatctctcttagctctggtagcctgttcaggccttaaggtatctgttcggtattatgtggtcaagtagctgggaccacaggatcacaacaccacgtctggctaatttttttttttttttttttttttttttgtagagatggggtttcgctatgttggccaggctggtctcaaactcctggcctcaagcaatcttccagccttggcctcccaaagtgctgggattacaggtgtgagccaccacgtctggcttggagggcttattaaaacaccgattcttagcctcacccccagagtttctggttagtaggtcttggcagggctggagaatttgtatttccacaccttccttggtgatgtgttgttggtagttcagggagtacatgtgagaggaaccgtttagatagtaaaaactgcaaacctgaagaagaatagaagaatccttattctgtgctctcttagatttagtttcctcatctatgatcaataactattcatttcttcctcatttccaataacgatttgctgcttttaagagcaagagatcacttttccttcatgttgttttgctagtggcaaatcagaaatggtttcgccagtattcactgatcttgtaatcactctcggaatccagctgcatctctagtgtagagttttgggtcaacaagaataatgctgagcttaaagaattggactcagtctcttgaagtcaggggttgatgagaaggtggctctaatctattcattcaacaacttcctattgagcacctgctatgtgccaggtgctgttctagccactaagatagagcaggtaataacatagggccattgtccttatggaatttgtattttagtggggtgaataaaaaagggcagtctaggtggggcccagaaatagaaaaatagaaaaaa

SEQ ID NO: 1129 - DNA, 964 bp, Homo sapiens; identical to SEQ ID NO: 1128

SEQ ID NO: 1130 - DNA, 236 bp, Homo sapiens
tgggtggatcacgaggtcaggagttcaagaccagcctggccaacgtggtgaaccctcatctctaataaaaatgcaaaaattagccaagcatgatgatgcgtttctggaatcccagctactcagtgaggctgaggcaggagaatcgcttgaacctgggaaacagaggttgcagtgcactcagattgtgtcattgcactccagcctgggccacatagtgtgactctttcccccatccc

SEQ ID NO: 1131 - DNA, 236 bp, Homo sapiens; identical to SEQ ID NO: 1130

SEQ ID NO: 1132 - DNA, 3722 bp, Homo sapiens
cagatgcttcccactagagaagctaagaagctgtggcagccacagccgggacagggcctggcctccagcccagggctttccctgatgtccagcctcagctgcctcttcctgcctcatcccacccgcaagaggagctggggaccagagacagagacacaaactccatttgaatgtgaaccttggcaccatggagatgctcagggtgagcccagtctgctctctcattagtatgaatttccttgtgtttctgtctctctcctcttccctggtatcagctgctggccccaggttcctccagagaggagcgggggtgggtggggtggtgctgattaaatctgaggacatgacattgagcgagagaagcaaggggagctgctgacctccctggatggataaccatcaggaggcggtagcagagtccacataccatcaccttctcctgcagatgttggttcagccacctttcctctaccacagatgggctatgtgttttcaaagcagaagagcagagacggcagagaaccccagctggttcccaggcaaggataatgaatacagtcccctggaatgtgggggcctgccgcctggccctccccaccaccaactgccccccttcagcagactcctctgcttccccaagcaggtgggccaggctgttgtctgggaatgccacctgccaccaggcacatgagcagccaggccaggatgaggtgggcagcagaggctgctgcagcctggggcaggggtcagcacagcatctctccatccctgcctttgggcagcccatccgcccacgcgtggatccgccaaagcaaagccctgccttctctctcgcggggcgctcagagttgcacactctgggttggtctttgatgacaccggccttgtggaaggagcaaaaaaacaaacctttaatgtggacctgcaacaccttccattccacttccattatgtaatcttgggagtcactcaactctccaagcctcagtgccctcctctgtaaagtgaggccgtgaatagttccgactccacagcattgctgtgtggtgcaaataagaaaatacacttgacgcaccagcacgaggcctggcacctgcctggttcctatgatctctgtgtgccaagccctcagccaggcaaagtgtccccgggtttttctccagttctatggcattgaatcctaacaaaacccagcaagggaggtgtcacaggacttcctggtacgcgccaggagactgtggctcagaaaacaggtgttgactctgtctcgagcagtctgtaaatgtggagttggggctcacccccgcccccaactcccatcctctagcaaaaccaaggccttctgtcattgcaaatggcctgcaaacttgagagtgattggaaatgcatccccaccctccagaacccataagagacccagcgcctgagcccacacatgggagtagctcctgagtacaggcagggcaagggcgggaggcaggaaggcaggagccagatgatggattagcacaggaaggagcacagcacctggagttgctttttagtcttcttcccaagaactgcatggggctggcagggagaggaggggaagtaggaggccacacgacacctggcacccattgtatgttttttatttttttttatttttttgatggggataagatttgcatgacataaaattagccattttaagactgactcatgccttaatcctagcactttgggaggccgaggtgggtacattgcttgagtccaagagttcgagatcagcctgggcaacgtgtcaaaacctcatctctactaaaaatacaaaatattagccaagcatggtggcacgcgcctgtggtcccaggtactcgagaggctaaagtggaggatcacttgagcctgggagttcaaggctgcagtgagctatgattgcaccaccacactcccgcctgggcagcagagcgagacccggtctcaaaaaaaaaaaaaaaaaaaaaatcattttcaagtgagcaattcagtggcacttagtacattcacaatgatgtacaaccaccactgagttccagaatactttcatcaccccagaaggaagcctgtacccactcacagtcactccccattcccctctctcccaaccacctgccagtcaccaatctgagccccatctctatggatctacctactctggatatctcatataaatggcatcatacaatagttgacctcttatttagtttgatggcaagagggggaaggagctgctgctggagcccctccaggccctgcctgaagcttctgcttgtggggaagtttctagatgctcagagggagcagcccagtctgccctagacctttgtttacctccttctttggggctccgctgtgtagtggactgggtgccggtggtcctgggctttggtctcagctcagcagctgatgcagagtcctcagggaagctgctgcacctctctgggccccaggggtctcgtatgtgaagcgagcggttgaacttgtgggtccctgttgctgcttttgcacccccccactactcccaataagttctgaggagagacgggactccctgtggtagagacaaagggccactgctgattggaggggaggaggtccagaagctccttctaaaacggaaagaaagagaggggaagtggccttgaccttggtccagcaaggggcagtgggccaccagacctcgtgggttctctgccaaccatgagagccagtaaaagggataaagaaggtgaccagggcaggagcagagcccagtgtccaggggtgcacaacggcctgcttccctccagattgggtgcagccccagatgggtgacaccaggatggccgtgggccctaggagtgactggggaggaggccgcgtgtgtgtggtgtgtgctggccggcaggcatgtgcaggcttctgtgtataatctggcttgtaaattgctcggggactgtaactgcggaaagggccatagagccgcgtggtgttattatttatgataaagcacagaggtgcctgccagggactagaatgggctgagcactgcgtgcaggatggacggcaaattgaactccaattttctgctcggcagtctttgttacacgccacaaagcgctggtacaccggggtcaccagcctgatgaatgtgtgttcttcctcagcggtggctccatctctcagcctccgtgcagagagcgactcgtgctttgttttttcctccctgcggggcccagccttggaatctgttcctgggctccaaacgcagcctggacagaggggaggtcagaggccttgcatggaggcaggcggctatgggttcaaaacccagctctgccactgacacacatgtgactgggtacctctctcatctgagcttcagatgagagaaataaaagagaagtcctcatagcactcccctaaggaggctgggaggattaaatgggtaaacatgcgctgctcagtgtggagtaggcctttaacaaatacccatctttccttcttgtccctgggctgagcagcctcgccctgaagccaggaaattgaggagaagcccctgaaattgggcagacaggccccgtctgggggtggtgaggtcaagcccctaaggacacctgctgtccagctcagccctctttattcaatattgggaaaccaatgctggtgttaagtcagagccactgcccctagctcccatcttcccccagcttccatctctc

SEQ ID NO: 1133 - DNA, 278 bp, Homo sapiens
ctcgatttccaaatcaggtcacattctgaggttttgggaaggacatgaatttgggggagacatattcaacccaatacaggcatcacctagtcttgtcccacagatgactttattaaacatcccttggcttccatgttgggccttactgtcattcatttgccacatatttcccaagcatcttctttgtctcaggctctgtgcccagtgccagggctatagaaaaacaggagtcttgggcccagctctcctggcatctgtgtgatgtgttctgcttttct

SEQ ID NO: 1134 - DNA, 14976 bp, Homo sapiens
gaggggccgcgcgcacgggaggacggagaggcggaaaggatggcgctgtgacagccgggccggagccctcgcgtccccaccccgcgccctggccgctgggcccggcggtgagtgcgcgcgggcgggggcggcggcggcgcggcccctcccccgggtcccgggcggctgggccgcggcagaggcgggggcgccgaggctgcgccgccgccgccgccgcctttgttgcgggcccgccggggaggcgggcggcgccggctctcgccgcccggcaggtgcgctggggccgggagggggccaggtggggaggcgggccgggcggagggggcagcggaagcgctcccggcgcggttccgcggagaaagggaaatggggcaagatggctggagaaatccgaacgcgcccgggggcgcggcggcggtggcgcaggcggggcagggcgggcggcggccctggttgcggcaccttagcgcggggaggcggcccctcccacctctgccccggagccggcagggagaccgccgccaagttcgggccccagctgcaggcatctgaagcctagacccatccatgccgcgttcgcctatcttttttggaaatatcgaaggaaccgactttgaactccagagggatcttttctttggaggttccccgatgcagccctcaagatgcatccgcactccacacctaggaattgcccgcgcccatagagggcaggagtgcggccctttgtactggccaagagtcagcgaatagagaatttgcagcccagaggcaatgggttatttccctgtcggggtgggccccagccgatttctgcacctttttgggtatccaggcataaccctcactatgtttcactgactcctgcgtttgcaaagtcccttaaggtagaatgaccctattttctgaaccagctcgtggacagaacctttgaatttggaaaatccaggcaatgggcctactgagccaaccgctccgcccatgcttaactggcttctagcacccattccagttgagtaagtgtccaatctgtgttcagacaccttcactgataggaaatcagcacctttcccctgcctctgattcctgtttgggtggcactggctgtgagaaagtactgcctttctcactgcttaaaaccttttccaggagtatttatccactggccggcctctgttctgccgtccagtctctacaaaccagtctgggttctcttccccagatagctttttaaatatttgaaggcagccagatacgttatctacccacagcctctcttatcataattaaacatgtcaccctgtagcttcctggccgactcttgtttccttacttccctccagcgggaacagtgcttggggctaaagaggtttgtatgtggctcagcctcccccatcataggctttggggaggtcacagtgacacctggtttttctgaacctgaatcttgcttgcagagatggagtccacagcctaccctctcaatttgagcctgaaagaagaggaagaggaagaagagattcagagccgggaactagaggacggcccggcagacatgcagaaagtacgaatctgctctgagggcggatgggtaagtaagaaggtgtggagtccacacagccagcagatgcaggcctgagagcccagcttgctttaagtctcctcctcagacagacgtgggaagtaaaaatagcccagcccggtgtgtttgcattcctgagaaaacagctctgtggctttaaaaggcagtgcaaagaatggaggaggtgttatggaaacagtccctcagccatgtagcttgtcatcgttcaattggaagtcctagaagccaggaccttgtctctctcgttcacccacttatcctgcactgcgtttgatgccaggcacattgtaggcaccaagtaaatgtttgttgacttactgctggttgaagggaaccattttaaataagactcgagtcattgggttgacatgagaggttaggctagttggttctgtgtgagcacctcttaccacagttgacacaggagagctgcctgtccagctgacctggatagaaatggtgggcagcagggaatacagagattcagggtatacacgcagaatagtatgatagaggtcggtttatacaaatgcaaatgcagtagatacttatagttacagatagttattcaccgtagttactggacttcgtggtaattaggcatgaatagtaaacattttaaataagcaacaaattgacattccttttctctgcttattttccgttgtgtataaacattgtcagtatacatagtatcctttgcttccatgaagagcccctatccatacaagcatggtacttctaaattgttccctaccagaggagagaactgggatgcagaaagattatctgccttgccctaaggttacacatgaacactgacatttgttcttcaaaacaggtctcctgagctgcacccttaaaagtaatgcattttaccatatgtatgctataccttaatttaaaaaaaaaaaaaacagtgcaaccacaggctctcagtttgccagtctagctgtggacaccgcgctgcctttgtctcatcagtgttctttgcccaccacatccttcttcccaattctgatccaagcaggcgtcaggtctatttagcctggaacaagaactcaaggcagtcaaaactcagggctttgaggctagattggtcaacccagaacatctaaatggagagccttggagaacaggtgcaatgaaagtgaatgttgggacagtgaggaaggagcaagatgaagaccaaccatgcttaggtgggaaaagaaggaagtaaccagaagggctggaggagggagtccagcagctggtggtgctggggattgggcatttgtggcctccaggcaatcagccatccatccacagttaccaagcacagtgctgggcgtaaagagagactcttttcctgatggaatttccagtcttgtgagcaaggcaggaaagtaaacataagtaatagtaagcacagtgtgcagagtgcagtggtggaagtctgcaaggatgcaccaggagccaagatgaggggatgcctcattcaggctgagaactccggggcttcctggacaaggcctaatcttgagcagtgagcaattttgcccccacccctggacatttggcaacatctagaaacactaccccctttccccacccctggatatttggcaatatctggaaacacttttgttggtctgacttggtgggggtgcgttggggactgggagatcctcctggcatctagtggatagaagccaggggagctgctagatatctacagtgcacaggatgcccccccaccaccacacacacacacacatacacacacaacaaagaggtaactggcccaaaatgtcagttgtgctgaggttgagaaaccctgctctagagcattagaagaaaagaatctgtttttaaaatatgtattttggttatagagaattatgttagggtgatcagtgaaagcttttcaagcataagaactatgataatatattaggataaaattccatagaattgaaatagaaatacaattttaagtagaaaaaataaaaaatgtgctttgaactgagtcttagtcattatggaatcagccaagggaagggaagggggttgcattccaggcaagaggacagcacaggcaaaagcactgaggagaggagcttgggtgcagagttaggagcagctcctgcagctggaacctgaaactcatggcagggagtggaaggggatcaggtataggaggccaggccaggggccagagccagccaggaggacatgcagtgctacgccagcgagtttgagctttctccttagctctgtggaatgaggccttagcccatctttctaagggaggcctcaggctctctacagccaccatgctaaggcctgagtggcctgctaagaaagcaaagctttggcatcagactttctagctctgtgaccttggacaagttacttaaccactctgtttccttacccataaaagtgaggtagtgatccccatgtccctagtttagcggattcagtgagagaatatatttatatgattgagtgtcctatacagtgcttggcccatagcaggcactccatcagtggatcagtacaaactaccccaaccccttcccccgagatccctgcgtctttgctgggtggctgcaaggctttagcgaggctgtgcaaggtgtaagcactttacaacatttaccctttgagatagcattggaatgccaacttcctgagcagagcaaggcagtgcacacaagctagaggaagaacacttatccagtgagcccttgatcttctgaggaaagggaggagggcagggactgaaggtccctacctgcaaggccaaggaggggtgtctggaggtggtacacagactgcctgacttctcagttttgcccggggccggccctgtttaccttctgctatgttgagccagataaaaggcctctgtggagcgaggggaggcctgcgcagcagggcctggctgaaggatcgctccattctcacagaggcttgctgtgaggagaatgtctaagccactacactgtgcctctggagcataatgtgggcttgtttgaagatcctccgtggctcagtcattaataggaagagatgaatcctgcaccagcccccagctttcttcctgcagcttcagggctcctggtacctgatgtttttaccaggcctagaatatgttaccccccctaagagtattgatggcccctctgaaatgacaggcatagacagtcctgttcccattttatcagcaaagggaaagggactataaataggtatgacctagatctggaacttcccagggagaaaaaaaggccaaagagacagttctttaaaagcctgggaattgggaaaggagtagggtggaaaattcctgggctgactggctttccagggtgaggaagtctgaggaaagcctgaagacgaatccattttacctcctcatatttcacacttagggatgtttgtccattcttactccaaagagtaggtttggttttatgacagataaaatttaatgattctttgaaacagttccaagtagaacaagagaagggaaatccagagatttgcctagatcgtatattcaaaagcacatttttcagtgactactagctacaggaagtgtcctcggcttagggaagcaaaaaggagtaagtacaggtcctgctttcaacaagctcagattctagtggagggagcagacaagtcaaccaaaagaattctgcagtgtgatgagtgccccgggagtgtggagcccaggacatttcagggacatgtgggtgtgctcacagcgtggcacagagtgggcttcctcgggagcagggattttgggctgagtcctggaagatgggtgggtgtcagccagaccaagaaaggggaggccctccaaggccaggggagaatatgggccaaggtgtgggggcgttggggaatggttgttcagggaactgcacacagctgagtacaagtggagcacagagctggggagagttgagggttagtcatcagggaggcagctgtgctcggtattgctggatccttggggtcaggcggtggtggccccaaaacgcaaccccaccatttattggctatgacattagcctggaaatgagacctctccaagcccatattctccttgattaagtaggggcatggtggcttgtgcctctaatcccagctactagggaggctgaggcaggagaatggcttgaactcaggaggcagaggttgcagtgagccaagatcgtgccactgcactccagcctgggcaacagagcaagactccatctcaaaaaaaaaaaaaaaaaataggcgtatctactcctccacaggcccattgcagggaataaatgaagcagttacaggccctttcctagtacgtgcttcctatgtatgaggtgctgtggaggtggggagagaacaagggggcttccttgggtcagggaggaaaggccaatgtatgtaagtgactgttggcctgacccctgaagtggctgcaggctatatagcatatggacactaattttctaagctaaggaaaaacagtatcataatcacccagacccaagatacagctttgggaaatagctttgaaggcaagaatacaaaataaccagcctgaaacaagccatccagtgccttcttatcactaaataggatgagctttggagtaggatttttaatgactgtaataagaaatacagttaaaaacaaaaagaggaggttggtttgggtggcttggctgccttgggctactgaggagccccctggtgctgggccaggaagcagaggaacaggggagggatgcagtcctttgggctttctgcctacctggtccaggatcaaagtgaatgagtttgctctggcatctcattacatatattaagctgtaattagcccttctttcttcctcttcatgctcttgtggattggaaaggccaaatagggccccttctctcagtggctcctccctgggcagctgtgggttccaagtctaacactttggttagtacccttggaaatgcagtgccctggaaacccacaaagatcccacggagggcagtgatcctattcagatttacaaacccaactcaccccgcccggggccgagggtctttttctggggtgggagggaattgggggtgcttgtgttggtgggacactttgtctgggtgtgggtggcttaagtcttgggtcagaggtgagccgtgagcagctctcaccacagtgcatgagggtgcgatgtcccatgtcctccaaccggtgatcatggtagggagttagttttcttctcaaagtgctgcttaccttatctgaactgagggtggcagctgctgtggtgggcacagaaggactgtgctcttgcccttgttggcttccagcagctgtatgaatgtggacagtccgttttcccctgggtcagggtccctcacctgacctgtgagaggacaggctgtgctgggctgtctgtaaggtcctgtccgctctgaaagtctgtctgcatatgcctgtttgtcattgtgaaagggctgttcactcttccaggtaccggccctatttgatgaggtggccatatatttttccgatgaggaatgggaagttttgacggagcaacaaaaggccctctaccgggaagtcatgaggatgaattatgaaactgtcctgtccctgggtaaagctgtgttttcctttgtctcctggaagctctgagcccagagaattgtttccatgcctctcttctctggtatatccaatgtccctctctcctgaacttagactctgcctcctcaatgtctgtgcccatttattccaatttttgatttgggcagtatatcaatattgtgtcaccctactcggcaatccgtgctgcctcagaactgcccccattcaacccaggcattcacatttaaggataaaaaccatgtaaccttagaaatgtcaccatggatctgggcctgtgcctcactgttccttacgagagaaggcaggcgttaatgttaccctgtcagcctcagaagtttggggacataccctcccaaagactgtttgctcctctccccaacttccaccccaaattgatatcacacatcttatcagcagaatgtaatcatttgaagagatttcccagtttgcttatacaggtaccaaaatgttaattggatcagcagctgcattcacccttctccctgctaaatgcagttcttttattgttggtgccaataccatccctcattaggagagatctacccattcctttagacagacctattttccattatcttttttctttaagtatccctgagcctttttccccttgtttttcacaaagaaggggagagtggctcttaagtattttgaagtacttattttggtagtgctccaggacagtaacacacagctgttacctattttatttcctataaacagaattcccattccctaagccagacatgatcacccgtttggaaggggaggaggagtctcagaattctgacgagtggcagctccaaggaggcacctctgcaggtactacaagtaaagcagttcagcgtccatccagctgggaacattgtggagtgggattttcagtgtacattccacggggtatttaagaggtagaaggattatgggttttggagttttgaaatctccctctttgcagtgctaaatgtgtgacagtgtgtgacaggcaactgcttttacctcagagcttccattcttcctctatcagctctgagtaacaagacttgatgtatgaccttgtttgtggatgaagcaaaatgaggcttgtgcagcatttggtctagtgcaccttctggctgaacagggctccctcagtggcgtaccatgtgcctctgcaaactaagaatagtgagaggaagcacacttcctgagttacctggctccctgtccatctcatactggatagaaaaagcaatagcaatcatagcatacatttgagcaaatgtatctaagaagtacctagtcctttgtcaagaaaaatggttattgaggccacagttgaataaatatagcattgcctccagacggccaaaatagttttatcttttctccggaagtaagagtttaaaatgccatatttcactgactctgagacatgtttttctcccattgctttactgtttctgaaattgagaatgcctcttaaaatcagtggcatgtcatagcttaattagtagtgttttctttcttaatggcacataatgatgcatcctacaactgatgacattttagtttgggtgagatagggtaatttccccaaatcatattcaacttctgtgaccaccttctaaatataaagtgaaacctggttgcaccattaatgtgcaagaactaattttctgccttataagcttaactttgctaagtgtggtttttgctgtaggttttcttggttctaaagggatatgattcaggccatgatgcatctctgtaatattatatggtagtatggttaacatttggcttctcattcacataaaaagtattttgatgcaaacatggcccccaaattatttggtccaagcttggttcctctgttgagttcccagctctgccactttctggcttggctaccttggtgcattatgtaacctctgtagcctccccttcttcatctgcaaagaaggaacagtgatacttagagttactctattaagagaactaggtgtgggtagtccacataaattggcatatggaaaaggacttaggcaatgttacctgttattaaagttactacttttggtgaacttcagattaaggtattcttagcatttcaacccccaaaaatcagggtataagccattttacttactggcattatttttgcccctcactatttgtctcccagaaaatgaagaatctgacgtaaagcctccagactggccaaacccaatgaatgctacctcccagtttcctcagcctcagcactttgacagctttggcctccgtctgcctcgggatatcacagagctgcccgagtggagtgaggggtaccccttctacatggccatgggcttcccagggtatgacctctcggctgatgacatagctgggaagtttcagttcagccggggcatgcgccgcagttacgacgcagggttcaagctgatggtagtggaatatgctgagagtaccaacaactgccaggctgccaagcagtttggagtattggaaaaaaacgttcgagactggcgcaaagtgaagccacagcttcaaaacgcccacgccatgcggcgggcattccgaggccccaagaatgggaggtttgctctggtggaccagcgtgtggccgaatatgtcagatacatgcaggccaaaggggaccccatcacccgggaggcgatgcagctgaaagctctcgaaatcgcccaggaaatgaacattccagagaaagggttcaaggcaagcttgggttggtgtcgaagaatgatgagaaggtatgacctgtctctgaggcataaagtgcccgtgccccagcacctgccggaagacctgactgagaaactcgtcacttaccagcgcagtgtcctggctctgcgcagggcgcatgactatgaggtagctcagatggggaatgcagatgagacgcccatttgtttagaggtgccatcacgggtaactgttgataaccagggcgaaaagcctgtcttggtcaagacaccaggcagggaaaaactgaaaatcacagcaatgcttggtgtcttggctgatgggaggaagttaccaccgtacatcattttgaggggaacatatatccccccggggaagtttcccagtgggatggaaattcgctgccaccggtatgggtggatgactgaagacttgatgcaggactggttggaagtggtgtggagacggaggacaggagcagtgcccaagcagcgagggatgctgatcttgaatggcttccggggccatgccacagattccgtgaagaactccatggaaagcatgaacactgacatggtgatcatcccagggggtctgacctcacagcttcaggtgctggatgtcgtggtctacaagccactgaatgacagtgtgcgggcccagtactccaactggcttctggctgggaacctggcgctgagcccaaccgggaatgctaagaagccacccctgggcctctttctggagtgggtcatggtcgcgtggaatagcatctcaagtgagtccatcgtccaagggttcaagaagtgccatatctccagcaacttggaggaggaagacgatgtcctgtgggaaatcgagagtgagttgccaggaggaggagaaccaccaaaagattgtgacaccgaaagcatggctgagagcaactgaagggaaagggaaaggtaaccactcaggagtagatactcagtgcctttgctgacatgtctgtgttctacaaacaccttctctccattatttttctgtttttaagttcccttagagcctacagtgcagtagtgtagatcaggggtccccaacccccaggtcacggaccatactggtccatggcctgtcaggaactgggctgcacagcaggaggtgagcggcaggtgagcaagcattaccacctgagctccgcccgctgtcacagcagcggcattagattctcataggagcacaaaccctgttgtgaactgcacatgtgagggatctaggttgcaggctcctcaatgcctgaggatctgaggcggaacagtttcatcccaaagccatcctaccacccactaccccgcacttcctgggtccctgcaaaaattgtcttccatgaaaccagtccctggtgccagaaaagttggggactgctggtatagataacagaccattagcattttctcctttatatgaaacatttattatttgatttatttgtgtctattttgctctgtggcttggacccagaaacacttgtataataggtgaaatgaacaaagaatgagctgccagaacatctgagagctgtaaagttaaaattatttggacccaaagaagcatagtctgacgttgttcagttcacacaaaattttgtctgaaaagccaacttttttctttcccttttaaattatgctgaacatttagggccagtatgtgtaactgacatgctgggacagttgtactcacttttgctggcctgtaggactgtgacatagggagaacactaagtgtgtcctccgggcctcgggtctcagtcctggagctatctacagtatgttaccagcgagtaagaataatagcttctacttgcttttccctacagagttcaggagttttaaaacgtcatcttagtctcattatgaccttcacatgggctatgacaataatttcctgtagtcagcagatgtctgaaggaagatattttttaactgaatctttacaccaaaaaaagaaaataaaacggtgcgtatctaggactctagtgagggctgaggacaataggcctggaattttctgggttgagtacacaagaagaacagctttcaaaggaaagtaggaatggaggcctaactgagacaacactagtgaaatgaccccacccacctacacctccagagaggaggaggatgagcatgtacagcaggggggacacccacaaagaacaaacaattcatttacctgttcgttctcatctccctaattataaattaaattgatcctccagacagtgttttatatgaaggaagaagccaccttttttacagaggacctgaaaccgtcaaccatcttcacacattctttttctttcttttaaagtataattaggtatttccatcttccttgcttttttctccaaatgaaatgctaatgggagccttattttacccacttcagctatataagtccatctgtgtttcaaagagtgacttatgtctcctgccttgcttccaaattaaattgtactcatattgctgaatcccattgtaattctgggatccctggaattacaatggagcaagaagttcttactattacattcaaaatcaccaaaattgcttttttttcccccttgggtcctccttgctttgagaaaccccatgaatccagcctcccttttctgctgacccttatattgcctgcattggatatcaaactgaattacattgagtttccatcttttcttcatttaccttttgcttttccctctccttgttagataacatttttgtgcacttttaatttcctaagctccttaccacctcagggacatgattaaaaacttccagaagaggaaaggagaaaaagctatgctaagttgcatttatgaatgttggcctgtaatattggtcatgagcttttgctcttctagtctgccacaattctctctgcagctcctgaggaagtgatgggagtagacagattcacagtgaacaagagatttgggagaccaagtgggcataaaactacgtcttggcctctatttggaaatctgaatgatggaattattatgtttgttaaaagttataccaaaaagccaagggttaattcatttaggttctctctgttttccagcaaatggaactctgatttaaacagctggggatgaaattcctcaagatgattattcctgaaagtgtggatgcgctggatgcgcagggaacatcaggaaaaggccacggggctctgaacagccccggtccagacagcagcctgtacatccatcccaggacacagcccagcccctccccacaccatacaaggtatcagaaaagtctaggacctatcatttcatcagagacatgatcagaaaagaaactgcttctgccccatttcttgttttggagattactccatctgtccatcaaaagaaacctgtaaatatgaaagaacaaaggttatttcctggagaaaagacaatttattcaacaccaacgagggactcatcatatgggcacaactctggtgtccttctatggagaaaacctcaagtaaagttttattctgcctttgaaaatgcttccaaaagtagaccctgtccccacacaggtcaagactacagagaaggctttgtagaaatgtgtcacctatgtacacctgctacttacacatttcctcttttggaaaaatgagatacttagaataacaagaaaattaagacatactggcctggtgccagcagatggcttttctatagacaaactaggttagtgtggaagatataggttaaaataaactatgctgttttatttatcttcccaacctgattggcagctagacttttttagggtctcatttaatggccctgtttttttcattattatatttaatgatagggcaggatttcgtatgcaagctcttgtttctcaggctgcctgcagaagaagtcgctataaattatctgttgtctacatggtacaaggcccattgactcatctgatgcttgttttgttaatttctttaatatttttatcacggggcagtgggagggcttgggcttttagccacagctgttttaagacttctgatctcctgccctgcaggaataggtgggaagtcattgaatttttacactatagtaatttgcattcccacataagtttgagtgttacgaaaacattcctttaaagggatctgtgctacacaaaatatgccaggacctcacagacaaagccattgctagaaatgtcattccaatgatcagatctggaaacaggctgccataaccacttttccttcttgtagactcagctcacctgtatatttaaactgttcttggcatcttgaaacacctatttctactcaggtactcattgtcctgttactgattcacctttctgatccttttcaaccagttttcccccaaggggggaaattttacttaacctctagtatttgaacaactcaatatttgaattgttgccccatttgcttttacctgtactgtattcttggtcatctcaaatggcgtctaaacccagctactttgcattccagaagtttccattccctccaattccacctaatttttcatctgtcctagttactggctctttcttcatgtcttatttctcttgctttgggagcttaaaagattttacaagacctaattttgggttccttccttggagccatagttaccctgccaagaagagtagaaaatgggttcaactcctgtttcgctccaccaacacctctgtgagtctcatcatcagctgagcgatgatgccttacaggttgcatagcactggaactttcctagagtaacggctctgctgccagggtttctctgggctcattcttccactgacttaattatgatctatgcctaacagagccccagtacaactattttgcagaatggctgttaccctagaattactatagcacatattgagatatagttgtactccctagtagataggaactgaccccaacaataaactttgataataaagacaata

SEQ ID NO: 1135 - DNA, 720 bp, Homo sapiens
gtcttccagcattctatggtcccaccaggtgggtaggtgactaggaattcaggccaggtcctagagagtagtgagaagttttccagtttgcagtttcctctgtgctgtatgtacagccatacagcctatggaacctgacattgcagtgggcagcaggacacggtcaaggctcctagctgcctctccatctatggaactatgaaatttcacacatattccctaggcagcattaaggcccaggtatattgagtagtccaaaccaaaaaactatattcgagtatcagtttaaattcttccaagccctaaaaattcttacgtagtttctcacctaaaactaatggcttgtgccaagaactgaaactaagctattgatttttttttaagaagtcttaatctatacataagaaattacatacctggccaggtgcagtagttcaggcctgtaatcctaacaaacactctgggaggccaaggtgggcagactgcttgagctcaggagttcattaccagtctgggcaacatgataaaaccgtgtctttacaaaaaaaaaaaattttaaattagccgggcatggtggtgtgaatctgtagtcccagctacttaggaggttgcgatgggagaatcacctgagcccagaggtccagtctgcagtgagccatgatcacaccacagcactccagctggggtgacagagtgagaccctatctcaaaaagaaaaga

SEQ ID NO: 1136 - DNA, 3126 bp, Homo sapiens
cttggcaatgtattaaacagcaggccttggagactagcacttgagttaacacagccaccacaaccaccactgccatcatcaccttcccggaaagcagccacctgtctggctcctggctttgtccagctgccaacctaaggcatgtgcctacgcaggaggcgatgacattttggctccacgttcaaagttgttttttttttcctttctcatgtgttatttctaaagataacaaaggtcaaaaggcatccagcgttttctggtttctcataagcttctggtcaatatttaatctggtttatggattttttttaggtcttctagatgccttcttgaggctgcttgtggccacccacagacacttgtaaggaggagagaagtcagcctggcagagagactctgaaatgagggattagaggtgttcaaggagcaagagcttcagcctgaagacaagggagcagtccctgaagacgcttctactgagaggtctgccatggcctctcttggcctccaacttgtgggctacatcctaggccttctggggcttttgggcacactggttgccatgctgctccccagctggaaaacaagttcttatgtcggtgccagcattgtgacagcagttggcttctccaagggcctctggatggaatgtgccacacacagcacaggcatcacccagtgtgacatctatagcacccttctgggcctgcccgctgacatccaggctgcccaggccatgatggtgacatccagtgcaatctcctccctggcctgcattatctctgtggtgggcatgagatgcacagtcttctgccaggaatcccgagccaaagacagagtggcggtagcaggtggagtctttttcatccttggaggcctcctgggattcattcctgttgcctggaatcttcatgggatcctacgggacttctactcaccactggtgcctgacagcatgaaatttgagattggagaggctctttacttgggcattatttcttccctgttctccctgatagctggaatcatcctctgcttttcctgctcatcccagagaaatcgctccaactactacgatgcctaccaagcccaacctcttgccacaaggagctctccaaggcctggtcaacctcccaaagtcaagagtgagttcaattcctacagcctgacagggtatgtgtgaagaaccaggggccagagctggggggtggctgggtctgtgaaaaacagtggacagcaccccgagggccacaggtgagggacactaccactggatcgtgtcagaaggtgctgctgaggatagactgactttggccattggattgagcaaaggcagaaatgggggctagtgtaacagcatgcaggttgaattgccaaggatgctcgccatgccagcctttctgttttcctcaccttgctgctcccctgccctaagtccccaaccctcaacttgaaaccccattcccttaagccaggactcagaggatccctttgccctctggtttacctgggactccatccccaaacccactaatcacatcccactgactgaccctctgtgatcaaagaccctctctctggctgaggttggctcttagctcattgctggggatgggaaggagaagcagtggcttttgtgggcattgctctaacctacttctcaagcttccctccaaagaaactgattggccctggaacctccatcccactcttgttatgactccacagtgtccagactaatttgtgcatgaactgaaataaaaccatcctacggtatccagggaacagaaagcaggatgcaggatgggaggacaggaaggcagcctgggacatttaaaaaaataaaaatgaaaaaaaaacccagaacccatttctcagggcactttccagaattctctcatatttgtgggctgggatcaagcctgcagcttgaggaaagcacaaggaaaggaaagaagatctggtggaaagctcaggtggcagcggactctgactccactgaggaactgcctcagaagctgcgatcacaactttggctgaagcccctgcctcactctagggcacctgacctggcctcttgcctaaaccacaaggctaagggctatagacaatggtttccttaggaacagtaaaccagtttttctagggatggcccttggctgggggatgacagtgtgggagctgtggggtactgaggaagacaccattccttgacggtgtctaagaagccaggtggatgtgtgtggtggctccagtgggtgtttctactctgccagtgagaggcagccccctagaaactcttcaggcgtaatggaaaatcagctcaaatgagatcaggcccccccagggtccacccacagagcactacagagcctctgaaagaccatagcaccaagcgagccccttcagattcccccactgtccatcggaagatgctccagagtggctagagggcatctaagggctccagcatggcatatccatgcccacggtgctgtgtccatgatctgagtgatagctgcactgctgcctgggattgcagctgaggtgggagtggagaatggttcccaggaagacagttccacctctaaggtccgaaaatgttccctttaccctggagtgggagtgaggggtcatacaccaaaggtattttccctcaccagtctaggcatgactggcttctgaaaaattccagcacacctcctcgaacctcattgtcagcagagagggcccatctgttgtctgtaacatgcctttcacatgtccaccttcttgccatgttccagctgctctcccaacctggaaggccgtctccccttagccaagtcctcctcaggcttggagaacttcctcagcgtcacctccttcattgagccttctttccccactccatccctctcctacccctccctcccccaaccctcaatgtataaattgcttcttgatgcttagcattcacaatttttgattgatcgttatttgtgtgtgtgtgtccgatctcacaagtatattgtaaacccttcggtgggtgggggccatatcctagacctctctgtatcccccagactatctgtaacagtgccaggcacacagtaggtgatcaataaacacttgttgattgagtaa

What is claimed is:

1. An isolated nucleic acid molecule comprising a first polynucleotide sequence at least 95% identical to a second polynucleotide sequence selected from the group consisting of:
(a) a polynucleotide fragment of SEQ ID NO:X as referenced in Table 1A;
(b) a polynucleotide encoding a full length polypeptide of SEQ ID NO:Y or a full length polypeptide encoded by the cDNA Clone ID in ATCC Deposit No:Z corresponding to SEQ ID NO:Y as referenced in Table 1A;
(c) a polynucleotide encoding a polypeptide fragment of SEQ ID NO:Y or a polypeptide fragment encoded by the cDNA Clone ID in ATCC Deposit No:Z corresponding to SEQ ID NO:Y as referenced in Table 1A;
(d) a polynucleotide encoding a polypeptide fragment of SEQ ID NO:Y or a polypeptide fragment encoded by the cDNA Clone ID in ATCC Deposit No:Z corresponding to SEQ ID NO:Y as referenced in Table 1A, wherein said fragment has biological activity;
(e) a polynucleotide encoding a polypeptide domain of SEQ ID NO:Y as referenced in Table 1B;
(f) a polynucleotide encoding a polypeptide domain of SEQ ID NO:Y as referenced in Table 2;
(g) a polynucleotide encoding a predicted epitope of SEQ ID NO:Y as referenced in Table 1B; and
(h) a polynucleotide capable of hybridizing under stringent conditions to any one of the polynucleotides specified in (a)-(g), wherein said polynucleotide does not hybridize under stringent conditions to a nucleic acid molecule having a nucleotide sequence of only A residues or of only T residues.

2. The isolated nucleic acid molecule of claim 1, wherein the polynucleotide fragment comprises a nucleotide sequence encoding a secreted form of SEQ ID NO:Y or a secreted form of the polypeptide encoded by the cDNA Clone ID in ATCC Deposit No:Z corresponding to SEQ ID NO:Y, as referenced in Table 1A.

3. The isolated nucleic acid molecule of claim 1, wherein the polynucleotide fragment comprises a nucleotide sequence encoding the sequence identified as SEQ ID NO:Y or the polypeptide encoded by the cDNA sequence included in ATCC Deposit No:Z, which is hybridizable to SEQ ID NO:X, as referenced in Table 1A.

4. A recombinant vector comprising the isolated nucleic acid molecule of claim 1.

5. A method of making a recombinant host cell comprising the isolated nucleic acid molecule of claim 1.

6. A recombinant host cell produced by the method of claim 5.

7. The recombinant host cell of claim 6 comprising vector sequences.

8. A polypeptide comprising a first amino acid sequence at least 95% identical to a second amino acid sequence selected from the group consisting of:
(a) a full length polypeptide of SEQ ID NO:Y or a full length polypeptide encoded by the cDNA Clone ID in ATCC Deposit No:Z corresponding to SEQ ID NO:Y as referenced in Table 1A;
(b) a secreted form of SEQ ID NO:Y or a secreted form of the polypeptide encoded by the cDNA Clone ID in ATCC Deposit No:Z corresponding to SEQ ID NO:Y as referenced in Table 1A;
(c) a polypeptide fragment of SEQ ID NO:Y or a polypeptide fragment encoded by the cDNA Clone ID in ATCC Deposit No:Z corresponding to SEQ ID NO:Y as referenced in Table 1A;
(d) a polypeptide fragment of SEQ ID NO:Y or a polypeptide fragment encoded by the cDNA Clone ID in ATCC Deposit No:Z corresponding to SEQ ID NO:Y as referenced in Table 1A, wherein said fragment has biological activity;
(e) a polypeptide domain of SEQ ID NO:Y as referenced in Table 1B;
(f) a polypeptide domain of SEQ ID NO:Y as referenced in Table 2; and
(g) a predicted epitope of SEQ ID NO:Y as referenced in Table 1B.

9. The polypeptide of claim 8, wherein said polypeptide comprises a heterologous amino acid sequence.

10. The isolated polypeptide of claim 8, wherein the secreted form or the full length protein comprises sequential amino acid deletions from either the C-terminus or the N-terminus.

11. An isolated antibody that binds specifically to the isolated polypeptide of claim 8.

12. A recombinant host cell that expresses the isolated polypeptide of claim 8.

13. A method of making an isolated polypeptide comprising:
(a) culturing the recombinant host cell of claim 12 under conditions such that said polypeptide is expressed; and
(b) recovering said polypeptide.

14. A method of making an isolated antibody comprising:
(a) administering the polypeptide of claim 8 to an animal; and
(b) isolating the antibody that binds specifically said polypeptide from the animal.

15. A method for preventing, treating, or ameliorating cardiovascular disorder, comprising administering to a mammalian subject a therapeutically effective amount of the polypeptide of claim 8.

16. A method of diagnosing cardiovascular disorder in a subject comprising:
(a) determining the presence or absence of a mutation in the polynucleotide of claim 1; and
(b) diagnosing the cardiovascular disorder based on the presence or absence of said mutation.

17. A method of diagnosing cardiovascular disorder in a subject comprising:
(a) determining the presence or amount of expression of the polypeptide of claim 8 in a biological sample; and
(b) diagnosing the cardiovascular disorder on the presence or amount of expression of the polypeptide.

18. A method for identifying a binding partner to the polypeptide of claim 8 comprising:
(a) contacting the polypeptide of claim 8 with a binding partner; and
(b) determining whether the binding partner effects an activity of the polypeptide.

19. A method of identifying an activity in a biological assay, wherein the method comprises:
(a) expressing SEQ ID NO:X in a cell;
(b) isolating the supernatant;
(c) detecting an activity in a biological assay; and
(d) identifying the protein in the supernatant having the activity.

20. A method for preventing, treating, or ameliorating a medical condition, comprising administering to a mammalian subject a therapeutically effective amount of the antibody of claim 11.
